United States Patent Application Publication US 2017/0114356 A1 - sequence listing, part 44

SEQ ID NO: 59246 - DNA, 3330 bp, Zea Mays
ctctacttaagtcacttagggtatcatacacagtttgggttctttggatgatgactatcttgctcctatccaagctgatcgagaaaaagagttgaagtttgtgcagtaggttgaactccacagggtagaggaagctgcagcaagagaggctgctcttgaaaatcaaaagaaagaaaagaagctaaaaaagaacacaagggagaggtagttcacttagtactatcaaagtcaaagttgcagaatatgattgagattcatatatctacttatacagtttagtaagctacagcttggttcggtaaattgcagaacatcatgaatcatgacctcttatgcatggatggtaaattatttttagtttacatctcagtgttcattttacttaattgaccatcaatagcatggagtaccaaattttcttcgtcttaggaaatatatcctcattacttgtgcgaacctctcaacttatggaatgatacttagactgctctctttcgtctaggttcatttgatcgttcttttactgtattaatacaacttctattttcaagctactaagaaagctgctgaaattggacagctgaacgatggttatatgtttgacacatcaaccgacatgtcatgaatgtgaagataatacaccctgccctccattgacccactacattttttgttatattttgcgttttttgacattagttgcttataggttagattccccaacatgtccagtttgtccgcaaggtttttgtggggatttcaaacaaacattaaccccttccgggttggattggaaaatggactgcggactgccttataatccttgggggcatgctgtgcacgacatggccaccgagagccgatggatgccagatgagaagaagctggcttctgctgccactgagaaattcgaagaggaagataatacctcctattgtcaacagtgatgtgtcaatggagtgtgtatagcatgaaaaaaccaaacatgacagttcaagagagacatttcagaactgcttagtttgtatatcccatgagttatctcctaacatcttttaactgcttcaacattgcatcgaaagcaatataggcatgcctgatgatggagagatagatattttcatcgaagctgtcggtgacatgctatttgagttgcagaaacatttcatattttctattattatatacataggtttttgtatggaggtactgaaagccccctcctgaaatatagtatgattaccaccttctctacaatcctttttttgtttttgttttatttttacgttgaagcaaagaaccataaaatatctgtttggaagggacgagatttgaaggtgatgaggctccttaaagaaggtttaatggaacaaatattagcataaggagtttgctggccatgtcaaaatctctatgggcagattctaactagagacctctaaaggttcaatgagatgaacattcatcaagtcttcgtctagatagaatctcatggtttcaagactgccttcaggttttgccactcactatttggaaacgtcagcagctaatttggacaacttgcaccttctatctatcttcaacaactaatttcgacaatttctgactttcatttagaacaagtatgattttcaattaaacaaaattgttacctattgtcgtaagcctctacaatataaatctcatttcttgattgctattttttcgcatcatcacccagtcatctactatttcggaattggaagaaggtgcattgtgcattctaacagtctgcaacttcattcagaacaattatggtttttcaataaacaaactcttacatattttttccatactcatcagagcgcacatccctcctaaacctcatttcttactcgctgtttcgaatcaagaacaaccgttttggacagcttgcagcttctatacagaacaggtacacatattacctgttcaatgccatgttatgcatagaaaagtctatgttttcagatttaattaccctgagatacattattatttctttactacttccacttcgcttgaacccgcataagacgcataactaaaaaaacattccttccttactttttcccaacgcgtggttaaatactattatgaaacctcaacagcaaattcagacatcatgtaacttctattctgaaaaagagtatggttactagaccaaatattatatatttttacaaccatgtgtcacatattactccattactcatgttttgtttaaacaaataactatgcatacctgctcaccacacataaaattaatcactcctcttatcaacggtcatccatcattattgctacaatacgcatggtcatcagatttcctatgtaattaccatactttaacctctatgtacatgtaaatatgtgcttccaataggtgctcaagtacatacgatcgataccatgttgttatgcataagtacatttacacacacatactctatactgattgacatctattgatccccctactattctcttgaacctacacacaatttttaaatgtatcttatattaagatatccttagcgtttgcgttcttcatcaacgtacaaactacaaatctaatttcattcttacttcattttcacatgtttacattctaatttgaatcgacgacaggtcatttgtacatcttgcaacctgtacatactccagatacgctttgtccgataagcacaaatattacctttatagtatgcatcttcaggtttttccactcacgcctcaaattttattccagcctttgtatctcatttcaataagtagctgtgctcagctgcttaccacacatcaaaaaggaccaaacaacgatcgatggacaactcaaaaggaaaaaaaataatatgccctcaatggaagctcctccaaaaagaattggagcatgcacatacgagtagcagagtagcgacattacattatgggggagaagatctcccataggtggggagctgggaggtacagttgttgatggcgcccacgacgcacaggcccttgacaccatccttgtccttgtagtcccctgacaaaacagaaaaaacgacgcatgatgaccatgagcacaagattgcgtgtcagattcatcttggaacgaggggcgtggtcgcttaccgtcgtagttgtaggtgcagaggaagtaagaagaattcgttaattactgttatagagaataaaatgaagtagatggcttaatctaggctgtcgaatgtcattatcataaggcatatccactatgctgcaagcctggaaccttttattcatgtaaagtaagcatgtgatgtgaactccgtcatgctagcttca

SEQ ID NO: 59247 - DNA, 303 bp, Zea Mays
tataagtgaatttaccacctcttcatatcagattaaacttttggatttaactgattggtgcatgcaacttaatatgatgttggagtcagaggtttcgaattcaaatcctaattagcgcaattaaaataaaaataattgttgctcactcttattccacatctgagaccgagaaaaagtctggacgtgagggggagtgttggaatataatataagtgaattgaccacttatttctattagctaaagtttttggattggactggttaatgcatgcaacttaatagtgttgaacacaatcagcttgt

SEQ ID NO: 59248 - DNA, 448 bp, Zea Mays
attttggagttacacaaatccaaattgcaacctgcatcacatgtataggtagctcggtatggaaatttgtgcatatttttggaggaaactgaatcatttcttgccaatttgagattcagtactggtgctttgcatagagatgtattaatgcaagatatgtacttccatggcaaatggactttgcacaatatgagatgctacttactgagaatgttgaacaacatgaaccaaagtaagagccttataaaacatccagctatgaggatactgcagtacacatttatgtttagggctagtttgggaactctattttttcaagggattactatttttccaagggaaaatgaactaattttctttgcgaaaatgagaattccgtggaaaaatggggttcccaaactagctcttattgaacatttgttgctcggtactgtcataaaatttcaag

SEQ ID NO: 59249 - DNA, 3107 bp, Zea Mays
attttgtgggtagacatgtggaaagtggcgtccggatgaatcacggagacctgaaattgatgacgcccccgttttcactccgactgaagaggaatttaaggatgcaaccgaatacattgctagcattcgcccgcaagcagaaagatatggaatttgtcgtattattccaccatcttcttggaaacctccgtgtcctctgaaggagaagagtttctggaaatgtacagagttcaatactcgagttcaacaagttgacaagcttcaaaacagggagcccacaaagaaaagaacacaacctcgagttcagaggaaaagaaagagaagaaagagactgaggtttgggatgacacatagacgtcctacttcaagtgcggactctgaagagaaatttggctttcaatctgggtctgacttcacatttgaggagtttcagaaatatgctgatgagttcaagcaggaatattttggaatgaaaacgagtgatgaaatttctatttgtgaaattaagaaccacataaaaacatgggaaccatcagtggaggagattgagggggaatattggcggatagtcataggccctgctgatgaagttgaggtggattatggtgctgatttggacactgcaacctttggtagtggttttgttaaattatcttcttcagatggaaataagcaagatccatatggtgtgtcttgttggaacttgaataatctgccacggctgcctggatctgttatctcatttgaggaagacgatatatctggtgttgttgtcccgtggctttatgtaggaatgtgcttctcttcattttgctggcatgtggaagaccattttctttattctttaaattatatgcattttggtgaaccaaaagtttggtatggtgttcctggtggtgaggcagtaaagctggaagaatctatgagaaaaaacttacccaaactgtttgaagagcagcctgacctacttcatgagctggttacacagttatctccatctgttctgaaagcagaaggagtttctgtttaccgtgctgttcagaagtcagtgtgctgttgagctctatagagatcagcatcgcaagacatcaatatcacatgacaagttattactgaaggctgcaaaagaagctatcagacaactttggatgaacgttttgaattgcagaagtggtaaaggagaatacagatggctgaacacatgtggaaaggatggagtcctgacaagtgcaattaagacaagagttaagatggaggttgctgcatgggaggcaaatgttcctttgaaaagtaagaagatggacaaggattacgattccaatgaccgagagtgcttttcatgcttttatgatctgcacttgtctgctgtcagttgccagtgcacacctgaccgctttgcttgcttaaaccatacaaatcttctttgttcatgcggaatggacaggaaaatcacattctttcgatatagcatggaggagcttaatactcttgtagcagctctggagggtgatctggctgcagtttgttgctgggtacaggaccacctaggcttagtttgccaatcaggttctctgaagcacagcaaaatggactcatgtaaaagcacagaattttcaggattagctattgatgccaatcatgtttctgtatttggtggtattcaaaatcagtgccatgaccttcaaaagccagcaggattccagcaagagaaaggaatccaggataattgtcttaatctcaacatagaagatccaccatgcagttccagaataaaagaagagcatggcaaggataggatgtttcttgatcataggcctttacagaaaactgacagtccatttagaatgagctctgagtgcagttcttcattgtctttatattgttcaggcaacttagtctctccttcaagaaatcaagctagcaattctggcctagcttgcaacactactaagaaactatttggcgttgacattggaaatttagcaaagcattctaatggtcaagttggtcaaatggtaatggcttcagggcaatctgatgcatcgtctaggccaatgtccgggcaccaggttgagccactagactatggaatggtaatgattgacaaaaggtggttcaataatcaagctattttccctaaaggtttcagaagtcgagttacattttacaatatacaagatccgacagcgtggtgcttttatgtttcagaagtcctggatgctggacctcttggaccattgtttaaggtgaccttagagcaagttcctgatgtctctttcactcatacctcaccgatgagttgttgggatagtgttagagacaaggtgaatgaagaaatagaaaacctacaaggaattggaaaatgtggcgttcctaattttttaccacctgattctgtaaacgggctcgaaatgtttgggttcttgtccccacaaatcgtccaggaaatcgaggctctagatccccatcaccagtgtttagactactggttatcgaagtctgcagtagttcctgcgtcaatgaggacacttgagaagctgccaaagaaggctaaactgccagatggacagaaactatctagcatataggagcaacgagcaaggacctgagaaggtaggcgcattctgcaggatgaaatgaagtaatagaataggtaaattaggcctgaatagatagaacatgtcaagtgtcgcctcagaatgactagactaaactggtcaccattgatttacagcttgttcgctgcggcttgctgcggctgcaatccggctgcggctgcggcttctacagtatttttctctctatggattgcagctgcagcagtccaaacagctgcaacagtgtcggcttgtagccagccgaacacgcccttacttttttacagacagcttccaatgaccgtactcattttacattcttttattcataaggatggcaggatggctgatttgtccactgattgtttccctgattagtcaatttcatggcaatcaatatatgggctatttttttttttgtctcagacatagtttgcatgtacaaaacattcggtgctggaaatccgaaagatgtgaagtttattgattatggttaacctaattgtatta

SEQ ID NO: 59250 - DNA, 2945 bp, Zea Mays
gacatgtggaaagtggcgtccggatgaatcacggagacctgaaattgatgacgcccccgttttcactccgactgaagaggaatttaaggatgcaaccgaatacattgctagcattcgcccgcaagcagaaagatatggaatttgtcgtattattccaccatcttcttggaaacctccgtgtcctctgaaggagaagagtttctggaaatgtacagagttcaatactcgagttcaacaagttgacaagcttcaaaacagggagcccacaaagaaaagaacacaacctcgagttcagaggaaaagaaagagaagaaagagactgaggtttgggatgacacatagacgtcctacttcaagtgcggactctgaagagaaatttggctttcaatctgggtctgacttcacatttgaggagtttcagaaatatgctgatgagttcaagcaggaatattttggaatgaaaacgagtgatgaaatttctatttgtgaaattaagaaccacataaaaacatgggaaccatcagtggaggagattgagggggaatattggcggatagtcataggccctgctgatgaagttgaggtggattatggtgctgatttggacactgcaacctttggtagtggttttgttaaattatcttcttcagatggaaataagcaagatccatatggtgtgtcttgttggaacttgaataatctgccacggctgcctggatctgttatctcatttgaggaagacgatatatctggtgttgttgtcccgtggctttatgtaggaatgtgcttctcttcattttgctggcatgtggaagaccattttctttattctttaaattatatgcattttggtgaaccaaaagtttggtatggtgttcctggtggtgaggcagtaaagctggaagaatctatgagaaaaaacttacccaaactgtttgaagagcagcctgacctacttcatgagctggttacacagttatctccatctgttctgaaagcagaaggagtttctgtttaccgtgctgttcagaagtcagacagtgtgctgttgagctctatagagatcagcatcgcaagacatcaatatcacatgacaagttattactgaaggctgcaaaagaagctatcagacaactttggatgaacgttttgaattgcagaagtggtaaaggagaatacagatggctgaacacatgtggaaaggatggagtcctgacaagtgcaattaagacaagagttaagatggaggttgctgcatgggaggcaaatgttcctttgaaaagaaaatcacattctttcgatatagcatggaggagcttaatactcttgtagcagctctggagggtgatctggctgcagtttgttgctgggtacaggaccacctaggcttagtttgccaatcaggttctctgaagcacagcaaaatggactcatgtaaaagcacagaattttcaggattagctattgatgccaatcatgtttctgtatttggtggtattcaaaatcagtgccatgaccttcaaaagccagcaggattccagcaagagaaaggaatccaggataattgtcttaatctcaacatagaagatccaccatgcagttccagaataaaagaagagcatggcaaggataggatgtttcttgatcataggcctttacagaaaactgacagtccatttagaatgagctctgagtgcagttcttcattgtctttatattgttcaggcaacttagtctctccttcaagaaatcaagctagcaattctggcctagcttgcaacactactaagaaactatttggcgttgacattggaaatttagcaaagcattctaatggtcaagttggtcaaatggtaatggcttcagggcaatctgatgcatcgtctaggccaatgtccgggcaccaggttgagccactagactatggaatggtaatgattgacaaaaggtggttcaataatcaagctattttccctaaaggtttcagaagtcgagttacattttacaatatacaagatccgacagcgtggtgcttttatgtttcagaagtcctggatgctggacctcttggaccattgtttaaggtgaccttagagcaagttcctgatgtctctttcactcatacctcaccgatgagttgttgggatagtgttagagacaaggtgaatgaagaaatagaaaacctacaaggaattggaaaatgtggcgttcctaattttttaccacctgattctgtaaacgggctcgaaatgtttgggttcttgtccccacaaatcgtccaggaaatcgaggctctagatccccatcaccagtgtttagactactggttatcgaagtctgcagtagttcctgcgtcaatgaggacacttgagaagctgccaaagaaggctaaactgccagatggacagaaactatctagcatataggagcaacgagcaaggacctgagaaggtaggcgcattctgcaggatgaaatgaagtaatagaataggtaaattaggcctgaatagatagaacatgtcaagtgtcgcctcagaatgactagactaaactggtcaccattgatttacagcttgttcgctgcggcttgctgcggctgcaatccggctgcggctgcggcttctacagtatttttctctctatggattgcagctgcagcagtccaaacagctgcaacagtgtcggcttgtagccagccgaacacgcccttacttttttacagacagcttccaatgaccgtactcattttacattcttttattcataaggatggcaggatggctgatttgtccactgattgtttccctgattagtcaatttcatggcaatcaatatatgggctatttttttttttgtctcagacatagtttgcatgtacaaaacattcggtgctggaaatccgaaagatgtgaagtttattgattatggttaacctaattgtatta

SEQ ID NO: 59251 - DNA, 3194 bp, Zea Mays
acatgtggaaagtggcgtccggatgaatcacggagacctgaaattgatgacgcccccgttttcactccgactgaagaggaatttaaggatgcaaccgaatacattgctagcattcgcccgcaagcagaaagatatggaatttgtcgtattattccaccatcttcttggaaacctccgtgtcctctgaaggagaagagtttctggaaatgtacagagttcaatactcgagttcaacaagttgacaagcttcaaaacagggagcccacaaagaaaagaacacaacctcgagttcagaggaaaagaaagagaagaaagagactgaggtttgggatgacacatagacgtcctacttcaagtgcggactctgaagagaaatttggctttcaatctgggtctgacttcacatttgaggagtttcagaaatatgctgatgagttcaagcaggaatattttggaatgaaaacgagtgatgaaatttctatttgtgaaattaagaaccacataaaaacatgggaaccatcagtggaggagattgagggggaatattggcggatagtcataggccctgctgatgaagttgaggtggattatggtgctgatttggacactgcaacctttggtagtggttttgttaaattatcttcttcagatggaaataagcaagatccatatggtgtgtcttgttggaacttgaataatctgccacggctgcctggatctgttatctcatttgaggaagacgatatatctggtgttgttgtcccgtggctttatgtaggaatgtgcttctcttcattttgctggcatgtggaagaccattttctttattctttaaattatatgcattttggtgaaccaaaagtttggtatggtgttcctggtggtgaggcagtaaagctggaagaatctatgagaaaaaacttacccaaactgtttgaagagcagcctgacctacttcatgagctggttacacagttatctccatctgttctgaaagcagaaggagtttctgtttaccgtgctgttcagaagtcaggtgagtttgttctgacactaccacgagcataccattctggattcaactgtggtttcaactgtgcggaagcagtaaatgtcgctcctgtggattggctgcctcatggacagtgtgctgttgagctctatagagatcagcatcgcaagacatcaatatcacatgacaagttattactgaaggctgcaaaagaagctatcagacaactttggatgaacgttttgaattgcagaagtggtaaaggagaatacagatggctgaacacatgtggaaaggatggagtcctgacaagtgcaattaagacaagagttaagatggaggttgctgcatgggaggcaaatgttcctttgaaaagtaagaagatggacaaggattacgattccaatgaccgagagtgcttttcatgcttttatgatctgcacttgtctgctgtcagttgccagtgcacacctgaccgctttgcttgcttaaaccatacaaatcttctttgttcatgcggaatggacaggaaaatcacattctttcgatatagcatggaggagcttaatactcttgtagcagctctggagggtgatctggctgcagtttgttgctgggtacaggaccacctaggcttagtttgccaatcaggttctctgaagcacagcaaaatggactcatgtaaaagcacagaattttcaggattagctattgatgccaatcatgtttctgtatttggtggtattcaaaatcagtgccatgaccttcaaaagccagcaggattccagcaagagaaaggaatccaggataattgtcttaatctcaacatagaagatccaccatgcagttccagaataaaagaagagcatggcaaggataggatgtttcttgatcataggcctttacagaaaactgacagtccatttagaatgagctctgagtgcagttcttcattgtctttatattgttcaggcaacttagtctctccttcaagaaatcaagctagcaattctggcctagcttgcaacactactaagaaactatttggcgttgacattggaaatttagcaaagcattctaatggtcaagttggtcaaatggtaatggcttcagggcaatctgatgcatcgtctaggccaatgtccgggcaccaggttgagccactagactatggaatggtaatgattgacaaaaggtggttcaataatcaagctattttccctaaaggtttcagaagtcgagttacattttacaatatacaagatccgacagcgtggtgcttttatgtttcagaagtcctggatgctggacctcttggaccattgtttaagagcaagttcctgatgtctctttcactcatacctcaccgatgagttgttgggatagtgttagagacaaggtgaatgaagaaatagaaaacctacaaggaattggaaaatgtggcgttcctaattttttaccacctgattctgtaaacgggctcgaaatgtttgggttcttgtccccacaaatcgtccaggaaatcgaggctctagatccccatcaccagtgtttagactactggttatcgaagtctgcagtagttcctgcgtcaatgaggacacttgagaagctgccaaagaaggctaaactgccagatggacagaaactatctagcatataggagcaacgagcaaggacctgagaaggtaggcgcattctgcaggatgaaatgaagtaatagaataggtaaattaggcctgaatagatagaacatgtcaagtgtcgcctcagaatgactagactaaactggtcaccattgatttacagcttgttcgctgcggcttgctgcggctgcaatccggctgcggctgcggcttctacagtatttttctctctatggattgcagctgcagcagtccaaacagctgcaacagtgtcggcttgtagccagccgaacacgcccttacttttttacagacagcttccaatgaccgtactcattttacattcttttattcataaggatggcaggatggctgatttgtccactgattgtttccctgattagtcaatttcatggcaatcaatatatgggctatttttttttttgtctcagacatagtttgcatgtacaaaacattcggtgctggaaatccgaaagatgtgaagtttattgattatggttaacctaattgtatta

SEQ ID NO: 59252 - DNA, 3195 bp, Zea Mays
acatgtggaaagtggcgtccggatgaatcacggagacctgaaattgatgacgcccccgttttcactccgactgaagaggaatttaaggatgcaaccgaatacattgctagcattcgcccgcaagcagaaagatatggaatttgtcgtattattccaccatcttcttggaaacctccgtgtcctctgaaggagaagagtttctggaaatgtacagagttcaatactcgagttcaacaagttgacaagcttcaaaacagggagcccacaaagaaaagaacacaacctcgagttcagaggaaaagaaagagaagaaagagactgaggtttgggatgacacatagacgtcctacttcaagtgcggactctgaagagaaatttggctttcaatctgggtctgacttcacatttgaggagtttcagaaatatgctgatgagttcaagcaggaatattttggaatgaaaacgagtgatgaaatttctatttgtgaaattaagaaccacataaaaacatgggaaccatcagtggaggagattgagggggaatattggcggatagtcataggccctgctgatgaagttgaggtggattatggtgctgatttggacactgcaacctttggtagtggttttgttaaattatcttcttcagatggaaataagcaagatccatatggtgtgtcttgttggaacttgaataatctgccacggctgcctggatctgttatctcatttgaggaagacgatatatctggtgttgttgtcccgtggctttatgtaggaatgtgcttctcttcattttgctggcatgtggaagaccattttctttattctttaaattatatgcattttggtgaaccaaaagtttggtatggtgttcctggtggtgaggcagtaaagctggaagaatctatgagaaaaaacttacccaaactgtttgaagagcagcctgacctacttcatgagctgttatctccatctgttctgaaagcagaaggagtttctgtttaccgtgctgttcagaagtcaggtgagtttgttctgacactaccacgagcataccattctggattcaactgtggtttcaactgtgcggaagcagtaaatgtcgctcctgtggattggctgcctcatggacagtgtgctgttgagctctatagagatcagcatcgcaagacatcaatatcacatgacaagttattactgaaggctgcaaaagaagctatcagacaactttggatgaacgttttgaattgcagaagtggtaaaggagaatacagatggctgaacacatgtggaaaggatggagtcctgacaagtgcaattaagacaagagttaagatggaggttgctgcatgggaggcaaatgttcctttgaaaagtaagaagatggacaaggattacgattccaatgaccgagagtgcttttcatgcttttatgatctgcacttgtctgctgtcagttgccagtgcacacctgaccgctttgcttgcttaaaccatacaaatcttctttgttcatgcggaatggacaggaaaatcacattctttcgatatagcatggaggagcttaatactcttgtagcagctctggagggtgatctggctgcagtttgttgctgggtacaggaccacctaggcttagtttgccaatcaggttctctgaagcacagcaaaatggactcatgtaaaagcacagaattttcaggattagctattgatgccaatcatgtttctgtatttggtggtattcaaaatcagtgccatgaccttcaaaagccagcaggattccagcaagagaaaggaatccaggataattgtcttaatctcaacatagaagatccaccatgcagttccagaataaaagaagagcatggcaaggataggatgtttcttgatcataggcctttacagaaaactgacagtccatttagaatgagctctgagtgcagttcttcattgtctttatattgttcaggcaacttagtctctccttcaagaaatcaagctagcaattctggcctagcttgcaacactactaagaaactatttggcgttgacattggaaatttagcaaagcattctaatggtcaagttggtcaaatggtaatggcttcagggcaatctgatgcatcgtctaggccaatgtccgggcaccaggttgagccactagactatggaatggtaatgattgacaaaaggtggttcaataatcaagctattttccctaaaggtttcagaagtcgagttacattttacaatatacaagatccgacagcgtggtgcttttatgtttcagaagtcctggatgctggacctcttggaccattgtttaaggtgaccttagagcaagttcctgatgtctctttcactcatacctcaccgatgagttgttgggatagtgttagagacaaggtgaatgaagaaatagaaaacctacaaggaattggaaaatgtggcgttcctaattttttaccacctgattctgtaaacgggctcgaaatgtttgggttcttgtccccacaaatcgtccaggaaatcgaggctctagatccccatcaccagtgtttagactactggttatcgaagtctgcagtagttcctgcgtcaatgaggacacttgagaagctgccaaagaaggctaaactgccagatggacagaaactatctagcatataggagcaacgagcaaggacctgagaaggtaggcgcattctgcaggatgaaatgaagtaatagaataggtaaattaggcctgaatagatagaacatgtcaagtgtcgcctcagaatgactagactaaactggtcaccattgatttacagcttgttcgctgcggcttgctgcggctgcaatccggctgcggctgcggcttctacagtatttttctctctatggattgcagctgcagcagtccaaacagctgcaacagtgtcggcttgtagccagccgaacacgcccttacttttttacagacagcttccaatgaccgtactcattttacattcttttattcataaggatggcaggatggctgatttgtccactgattgtttccctgattagtcaatttcatggcaatcaatatatgggctatttttttttttgtctcagacatagtttgcatgtacaaaacattcggtgctggaaatccgaaagatgtgaagtttattgattatggttaacctaattgtatta

SEQ ID NO: 59253 - DNA, 2119 bp, Zea Mays
acacgatgacaacgaaaataaacacgctctttggttgatgcttgcttgttcgtcctctaaaccacaccgcccggtgaaggcactaggcgcccaattctctcccgctctcccctctgctgcaagtctgcaaccgcagcagcacgtccatttcacgtgccctttcctccctccctttcccctgcccccacgccacctccgttcgccgccgcccgccgcgccggcgatggcgatgaccgaagggcttgtgcctattacgcggacctacctcgcgcgctactacgacaagtacccgctgcccccgctgcccgacgccactacggacctcgccgcccggctccgtgctctctccgccgacctcgctgccgttgctcccatcgccccagatgaggagctcttggaacaagaagcagctggcatacctgcccacaaaattgatgagaatttgtggaagaaccgagaacaaatggaagaaattcttttcttgattaacacatcccatcgtcctgtggctcttcaacagaagtccaccccagaagatgctgagatagtttgtacacttgatgatatagaagctaaattgaaggatatgttgaagaacttagaacaatttcagttgaaaaatgctgacaatgttttcaatacagttatgacatacatgccccaagattttcggggtactctaatcaggcaacagcgagaacgctcagagagaaataagcaagcagaggtagatgctctggttagtgctggtggaagcattcatgatcgatatgcattgttatggaaacagcaaatggaaaggagggtgcaattagcacagcttggttctgcaacaggtgtatataagactcttgttaggtatttggtcggtgttccacaggttttattggattttattcgacaaataaatgacgataatgggcctatggaagaacaaagagaacgttatggtccagccctttacacccttacaaaactggtgcttgcaattcggttgtatttgcatgtctctttggcacgatatggacaaaggaaaatagagaaggatgacgctgctgtgttgcagcaagctgtggttatctacaccaaggagtttttgaagttcactgaattcattggtgaggtctttgtgaatgcaccattctttatatctgctgaggatgcaggtgccgtggatgcaagtgatgagtacaaagaaactattattccagctggaaagacacatgaggtcattttgagtgttgaagctgtaaactcatacatcgcatgggacttttccttgcaacaaggggccctcaacatggacattggctttcatgtggagtacattagcccttcaggggagaaaactttaattcttccataccgacgatatgaagctgaccaaggtaatttttgcactgtttcatcgggatcatacaaacttgtgtgggacaattcatattcttcattcttcaaaaaggtccttcggtacaaggtggatgctgtgccaccggttgttgagccggccttgtcagccacggaactctgaagaggtctgtcttaatataatgatgtaacgagggccgatgcatgcccgagtatagctgtacaaatgtttctgaaggccccacacggtgctgttactgattattccatcgaatgctttgcggtgttctgatcgcagcattccctgatagctcgctgtcagagcgcatggatatgtactttgtgtgcacatggctgcggccacttgtcaccgacgaatgcctgaatataacagaaatgtattatatcgaccaataagagcatgtctgattggaagctgtcgtggtttgtttttattttttttctcgaatacggagagctgtgtgtcattgcaccaggaagaggaagagctgtggacgtgctccctggaaagagcatcccctttggctaccaattgttgaatttgccagtccatattttagcgcttcggatctgctcagatcccgattctgtttggatgaattgagctttgctttccccaacgaaaatacagaagcacggtattttctgttagtgttttatgggcttggcctatataaatatttactaattctaaaaatatatattagatagcctagcggttaaggcttct

SEQ ID NO: 59254 - DNA, 1991 bp, Zea Mays
cgatgacaacgaaaataaacacgctctttggttgatgcttgcttgttcgtcctctaaaccacaccgcccggtgaaggcactaggcgcccaattctctcccgctctcccctctgctgcaagtctgcaaccgcagcagcacgtccatttcacgtgccctttcctccctccctttcccctgcccccacgccacctccgttcgccgccgcccgccgcgccggcgatggcgatgaccgaagggcttgtgcctattacgcggacctacctcgcgcgctactacgacaagtacccgctgcccccgctgcccgacgccactacggacctcgccgcccggctccgtgctctctccgccgacctcgctgccgttgctcccatcgccccagatgaggagctcttggaacaagaagcagctggcatacctgcccacaaaattgatgagaatttgtggaagaaccgagaacaaatggaagaaattcttttcttgattaacacatcccatcgtcctgtggctcttcaacagaagtccaccccagaagatgctgagatagtttgtacacttgatgatatagaagctaaattgaaggatatgttgaagaacttagaacaatttcagttgaaaaatgctgacaatgttttcaatacagttatgacatacatgccccaagattttcggggtactctaatcaggcaacagcgagaacgctcagagagaaataagcaagcagaggtagatgctctggttagtgctggtggaagcattcatgatcgatatgcattgttatggaaacagcaaatggaaaggagggtgcaattagcacagcttggttctgcaacaggtgtatataagactcttgttaggtatttggtcggtgttccacaggttttattggattttattcgacaaataaatgacgataatgggcctatggaagaacaaagagaacgttatggtccagccctttacacccttacaaaactggtgcttgcaattcggttgtatttgcatgtctctttggcacgatatggacaaaggaaaatagagaaggatgacgctgctgtgttgcagcaagctgtggttatctacaccaaggagtttttgaagttcactgaattcattggtgaggtctttgtgaatgcaccattctttatatctgctgaggatgcaggtgccgtggatgcaaggaaaagtgatgagtacaaagaaactattattccagctggaaagacacatgaggtcattttgagtgttgaagctgtaaactcatacatcgcatgggacttttccttgcaacaaggggccctcaacatggacattggctttcatgtggagtacattagcccttcaggggagaaaactttaattcttccataccgacgatatgaagctgaccaaggtaatttttgcactgtttcatcgggatcatacaaacttgtgtgggacaattcatattcttcattcttcaaaaaggtccttcggtacaaggtggatgctgtgccaccggttgttgagccggccttgtcagccacggaactctgaagagcattccctgatagctcgctgtcagagcgcatggatatgtactttgtgtgcacatggctgcggccacttgtcaccgacgaatgcctgaatataacagaaatgtattatatcgaccaataagagcatgtctgattggaagctgtcgtggtttgtttttattttttttctcgaatacggagagctgtgtgtcattgcaccaggaagaggaagagctgtggacgtgctccctggaaagagcatcccctttggctaccaattgttgaatttgccagtccatattttagcgcttcggatctgctcagatcccgattctgtttggatgaattgagctttgctttccccaacgaaaatacagaagcacggtattttctgttagtgttttatgggcttggcctatataaatatttactaattctaaaaatatatattagatagcctagcggttaaggcttct

SEQ ID NO: 59255 - DNA, 2121 bp, Zea Mays
aacgaaaataaacacgctctttggttgatgcttgcttgttcgtcctctaaaccacaccgcccggtgaaggcactaggcgcccaattctctcccgctctcccctctgctgcaagtctgcaaccgcagcagcacgtccatttcacgtgccctttcctccctccctttcccctgcccccacgccacctccgttcgccgccgcccgccgcgccggcgatggcgatgaccgaagggcttgtgcctattacgcggacctacctcgcgcgctactacgacaagtacccgctgcccccgctgcccgacgccactacggacctcgccgcccggctccgtgctctctccgccgacctcgctgccgttgctcccatcgccccagatgaggagctcttggaacaagaagcagctggcatacctgcccacaaaattgatgagaatttgtggaagaaccgagaacaaatggaagaaattcttttcttgattaacacatcccatcgtcctgtggctcttcaacagaagtccaccccagaagatgctgagatagtttgtacacttgatgatatagaagctaaattgaaggatatgttgaagaacttagaacaatttcagttgaaaaatgctgacaatgttttcaatacagttatgacatacatgccccaagattttcggggtactctaatcaggcaacagcgagaacgctcagagagaaataagcaagcagaggtagatgctctggttagtgctggtggaagcattcatgatcgatatgcattgttatggaaacagcaaatggaaaggagggtgcaattagcacagcttggttctgcaacaggtgtatataagactcttgttaggtatttggtcggtgttccacaggttttattggattttattcgacaaataaatgacgataatgggcctatggaagaacaaagagaacgttatggtccagccctttacacccttacaaaactggtgcttgcaattcggttgtatttgcatgtctctttggcacgatatggacaaaggaaaatagagaaggatgacgctgctgtgttgcagcaagctgtggttatctacaccaaggagtttttgaagttcactgaattcattggtgaggtctttgtgaatgcaccattctttatatctgctgaggatgcaggtgccgtggatgcaaggaaaagtgatgagtacaaagaaactattattccagctggaaagacacatgaggtcattttgagtgttgaagctgtaaactcatacatcgcatgggacttttccttgcaacaaggggccctcaacatggtattggacattggctttcatgtggagtacattagcccttcaggggagaaaactttaattcttccataccgacgatatgaagctgaccaaggtaatttttgcactgtttcatcgggatcatacaaacttgtgtgggacaattcatattcttcattcttcaaaaaggtccttcggtacaaggtggatgctgtgccaccggttgttgagccggccttgtcagccacggaactctgaagaggtctgtcttaatataatgatgtaacgagggccgatgcatgcccgagtatagctgtacaaatgtttctgaaggccccacacggtgctgttactgattattccatcgaatgctttgcggtgttctgatcgcagcattccctgatagctcgctgtcagagcgcatggatatgtactttgtgtgcacatggctgcggccacttgtcaccgacgaatgcctgaatataacagaaatgtattatatcgaccaataagagcatgtctgattggaagctgtcgtggtttgtttttattttttttctcgaatacggagagctgtgtgtcattgcaccaggaagaggaagagctgtggacgtgctccctggaaagagcatcccctttggctaccaattgttgaatttgccagtccatattttagcgcttcggatctgctcagatcccgattctgtttggatgaattgagctttgctttccccaacgaaaatacagaagcacggtattttctgttagtgttttatgggcttggcctatataaatatttactaattctaaaaatatatattagatagcctagcggttaaggcttct

SEQ ID NO: 59256 - DNA, 2031 bp, Zea Mays
ctctttggttgatgcttgcttgttcgtcctctaaaccacaccgcccggtgaaggcactaggcgcccaattctctcccgctctcccctctgctgcaagtctgcaaccgcagcagcacgtccatttcacgtgccctttcctccctccctttcccctgcccccacgccacctccgttcgccgccgcccgccgcgccggcgatggcgatgaccgaagggcttgtgcctattacgcggacctacctcgcgcgctactacgacaagtacccgctgcccccgctgcccgacgccactacggacctcgccgcccggctccgtgctctctccgccgacctcgctgccgttgctcccatcgccccagatgaggagctcttggaacaagaagcagctggcatacctgcccacaaaattgatgagaatttgtggaagaaccgagaacaaatggaagaaattcttttcttgattaacacatcccatcgtcctgtggctcttcaacagaagtccaccccagaagatgctgagatagtttgtacacttgatgatatagaagctaaattgaaggatatgttgaagaacttagaacaatttcagttgaaaaatgctgacaatgttttcaatacagttatgacatacatgccccaagattttcggggtactctaatcaggcaacagcgagaacgctcagagagaaataagcaagcagaggagggtgcaattagcacagcttggttctgcaacaggtgtatataagactcttgttaggtatttggtcggtgttccacaggttttattggattttattcgacaaataaatgacgataatgggcctatggaagaacaaagagaacgttatggtccagccctttacacccttacaaaactggtgcttgcaattcggttgtatttgcatgtctctttggcacgatatggacaaaggaaaatagagaaggatgacgctgctgtgttgcagcaagctgtggttatctacaccaaggagtttttgaagttcactgaattcattggtgaggtctttgtgaatgcaccattctttatatctgctgaggatgcaggtgccgtggatgcaaggaaaagtgatgagtacaaagaaactattattccagctggaaagacacatgaggtcattttgagtgttgaagctgtaaactcatacatcgcatgggacttttccttgcaacaaggggccctcaacatggtattggacattggctttcatgtggagtacattagcccttcaggggagaaaactttaattcttccataccgacgatatgaagctgaccaaggtaatttttgcactgtttcatcgggatcatacaaacttgtgtgggacaattcatattcttcattcttcaaaaaggtccttcggtacaaggtggatgctgtgccaccggttgttgagccggccttgtcagccacggaactctgaagaggtctgtcttaatataatgatgtaacgagggccgatgcatgcccgagtatagctgtacaaatgtttctgaaggccccacacggtgctgttactgattattccatcgaatgctttgcggtgttctgatcgcagcattccctgatagctcgctgtcagagcgcatggatatgtactttgtgtgcacatggctgcggccacttgtcaccgacgaatgcctgaatataacagaaatgtattatatcgaccaataagagcatgtctgattggaagctgtcgtggtttgtttttattttttttctcgaatacggagagctgtgtgtcattgcaccaggaagaggaagagctgtggacgtgctccctggaaagagcatcccctttggctaccaattgttgaatttgccagtccatattttagcgcttcggatctgctcagatcccgattctgtttggatgaattgagctttgctttccccaacgaaaatacagaagcacggtattttctgttagtgttttatgggcttggcctatataaatatttactaattctaaaaatatatattagatagcctagcggttaaggcttct

SEQ ID NO: 59257 - DNA, 1260 bp, Zea Mays
ttgatgcttgcttgttcgtcctctaaaccacaccgcccggtgaaggcactaggcgcccaattctctcccgctctcccctctgctgcaagtctgcaaccgcagcagcacgtccatttcacgtgccctttcctccctccctttcccctgcccccacgccacctccgttcgccgccgcccgccgcgccggcgatggcgatgaccgaagggcttgtgcctattacgcggacctacctcgcgcgctactacgacaagtacccgctgcccccgctgcccgacgccactacggacctcgccgcccggctccgtgctctctccgccgacctcgctgccgttgctcccatcgccccagatgaggagctcttggaacaagaagcagctggcatacctgcccacaaaattgatgagaatttgtggaagaaccgagaacaaatggaagaaattcttttcttgattaacacatcccatcgtcctgtggctcttcaacagaagtccaccccagaagatgctgagatagtttgtacacttgatgatatagaagctaaattgaaggatatgttgaagaacttagaacaatttcagttgaaaaatgctgacaatgttttcaatacagttatgacatacatgccccaagattttcggggtactctaatcaggcaacagcgagaacgctcagagagaaataagcaagcagaggtagatgctctggttagtgctggtggaagcattcatgatcgatatgcattgttatggaaacagcaaatggaaaggagggtgcaattagcacagcttggttctgcaacaggtgtatataagactcttgttaggtatttggtcggtgttccacaggttttattggattttattcgacaaataaatgacgataatgggcctatggaagaacaaagagaacgttatggtccagccctttacacccttacaaaactggtgcttgcaattcggttgtatttgcatgtctctttggcacgatatggacaaaggaaaattgaggtctttgtgaatgcaccattctttatatctgctgaggatgcaggtgccgtggatgcaaggaaaagtgatgagtacaaagaaactattattccagctggaaagacacatgaggtcattttgagtgttgaagctgtaaactcatacatcgcatgggacttttccttgcaacaaggggccctcaacatggacattggctttcatgtggagtacattagcccttcaggggagaaaactagtggagtttgaatatgg

SEQ ID NO: 59258 - DNA, 2004 bp, Zea Mays
cttgcttgttcgtcctctaaaccacaccgcccggtgaaggcactaggcgcccaattctctcccgctctcccctctgctgcaagtctgcaaccgcagcagcacgtccatttcacgtgccctttcctccctccctttcccctgcccccacgccacctccgttcgccgccgcccgccgcgccggcgatggcgatgaccgaagggcttgtgcctattacgcggacctacctcgcgcgctactacgacaagtacccgctgcccccgctgcccgacgccactacggacctcgccgcccggctccgtgctctctccgccgacctcgctgccgttgctcccatcgccccagatgaggagctcttggaacaagaagcagctggcatacctgcccacaaaattgatgagaatttgtggaagaaccgagaacaaatggaagaaattcttttcttgattaacacatcccatcgtcctgtggctcttcaacagaagtccaccccagaagatgctgagatagtttgtacacttgatgatatagaagctaaattgaaggatatgttgaagaacttagaacaatttcagttgaaaaatgctgacaatgttttcaatacagttatgacatacatgccccaagattttcggggtactctaatcaggcaacagcgagaacgctcagagagaaataagcaagcagaggtagatgctctggttagtgctggtggaagcattcatgatcgatatgcattgttatggaaacagcaaatggaaaggagggtgcaattagcacagcttggttctgcaacaggtgtatataagactcttgttaggtatttggtcggtgttccacaggttttattggattttattcgacaaataaatgacgataatgggcctatggaagaacaaagagaacgttatggtccagccctttacacccttacaaaactggtgcttgcaattcggttgtatttgcatgtctctttggcacgatatggacaaaggaaaattgaggtctttgtgaatgcaccattctttatatctgctgaggatgcaggtgccgtggatgcaaggaaaagtgatgagtacaaagaaactattattccagctggaaagacacatgaggtcattttgagtgttgaagctgtaaactcatacatcgcatgggacttttccttgcaacaaggggccctcaacatggacattggctttcatgtggagtacattagcccttcaggggagaaaactttaattcttccataccgacgatatgaagctgaccaaggtaatttttgcactgtttcatcgggatcatacaaacttgtgtgggacaattcatattcttcattcttcaaaaaggtccttcggtacaaggtggatgctgtgccaccggttgttgagccggccttgtcagccacggaactctgaagaggtctgtcttaatataatgatgtaacgagggccgatgcatgcccgagtatagctgtacaaatgtttctgaaggccccacacggtgctgttactgattattccatcgaatgctttgcggtgttctgatcgcagcattccctgatagctcgctgtcagagcgcatggatatgtactttgtgtgcacatggctgcggccacttgtcaccgacgaatgcctgaatataacagaaatgtattatatcgaccaataagagcatgtctgattggaagctgtcgtggtttgtttttattttttttctcgaatacggagagctgtgtgtcattgcaccaggaagaggaagagctgtggacgtgctccctggaaagagcatcccctttggctaccaattgttgaatttgccagtccatattttagcgcttcggatctgctcagatcccgattctgtttggatgaattgagctttgctttccccaacgaaaatacagaagcacggtattttctgttagtgttttatgggcttggcctatataaatatttactaattctaaaaatatatattagatagcctagcggttaaggcttct

SEQ ID NO: 59259 - DNA, 1841 bp, Zea Mays
gcccggtgaaggcactaggcgcccaattctctcccgctctcccctctgctgcaagtctgcaaccgcagcagcacgtccatttcacgtgccctttcctccctccctttcccctgcccccacgccacctccgttcgccgccgcccgccgcgccggcgatggcgatgaccgaagggcttgtgcctattacgcggacctacctcgcgcgctactacgacaagtacccgctgcccccgctgcccgacgccactacggacctcgccgcccggctccgtgctctctccgccgacctcgctgccgttgctcccatcgccccagatgaggagctcttggaacaagaagcagctggcatacctgcccacaaaattgatgagaatttgtggaagaaccgagaacaaatggaagaaattcttttcttgattaacacatcccatcgtcctgtggctcttcaacagaagtccaccccagaagatgctgagatagtttgtacacttgatgatatagaagctaaattgaaggatatgttgaagaacttagaacaatttcagttgaaaaatgctgacaatgttttcaatacagttatgacatacatgccccaagattttcggggtactctaatcaggcaacagcgagaacgctcagagagaaataagcaagcagaggttttattggattttattcgacaaataaatgacgataatgggcctatggaagaacaaagagaacgttatggtccagccctttacacccttacaaaactggtgcttgcaattcggttgtatttgcatgtctctttggcacgatatggacaaaggaaaatagagaaggatgacgctgctgtgttgcagcaagctgtggttatctacaccaaggagtttttgaagttcactgaattcattgggaaaagtgatgagtacaaagaaactattattccagctggaaagacacatgaggtcattttgagtgttgaagctgtaaactcatacatcgcatgggacttttccttgcaacaaggggccctcaacatggacattggctttcatgtggagtacattagcccttcaggggagaaaactttaattcttccataccgacgatatgaagctgaccaaggtaatttttgcactgtttcatcgggatcatacaaacttgtgtgggacaattcatattcttcattcttcaaaaaggtccttcggtacaaggtggatgctgtgccaccggttgttgagccggccttgtcagccacggaactctgaagaggtctgtcttaatataatgatgtaacgagggccgatgcatgcccgagtatagctgtacaaatgtttctgaaggccccacacggtgctgttactgattattccatcgaatgctttgcggtgttctgatcgcagcattccctgatagctcgctgtcagagcgcatggatatgtactttgtgtgcacatggctgcggccacttgtcaccgacgaatgcctgaatataacagaaatgtattatatcgaccaataagagcatgtctgattggaagctgtcgtggtttgtttttattttttttctcgaatacggagagctgtgtgtcattgcaccaggaagaggaagagctgtggacgtgctccctggaaagagcatcccctttggctaccaattgttgaatttgccagtccatattttagcgcttcggatctgctcagatcccgattctgtttggatgaattgagctttgctttccccaacgaaaatacagaagcacggtattttctgttagtgttttatgggcttggcctatataaatatttactaattctaaaaatatatattagatagcctagcggttaaggcttct

SEQ ID NO: 59260 - DNA, 1354 bp, Zea Mays
ccggtgaaggcactaggcgcccaattctctcccgctctcccctctgctgcaagtctgcaaccgcagcagcacgtccatttcacgtgccctttcctccctccctttcccctgcccccacgccacctccgttcgccgccgcccgccgcgccggcgatggcgatgaccgaagggcttgtgcctattacgcggacctacctcgcgcgctactacgacaagtacccgctgcccccgctgcccgacgccactacggacctcgccgcccggctccgtgctctctccgccgacctcgctgccgttgctcccatcgccccagatgaggagctcttggaacaagaagcagctggcatacctgcccacaaaattgatgagaatttgtggaagaaccgagaacaaatggaagaaattcttttcttgattaacacatcccatcgtcctgtggctcttcaacagaagtccaccccagaagatgctgagatagtttgtacacttgatgatatagaagctaaattgaaggatatgttgaagaacttagaacaatttcagttgaaaaatgctgacaatgttttcaatacagttatgacatacatgccccaagattttcggggtactctaatcaggcaacagcgagaacgctcagagagaaataagcaagcagaggtagatgctctggttagtgctggtggaagcattcatgatcgatatgcattgttatggaaacagcaaatggaaaggagggtgcaattagcacagcttggttctgcaacaggtgtatataagactcttgttaggtatttggtcggtgttccacaggttttattggattttattcgacaaataaatgacgataatgggcctatggaagaacaaagagaacgttatggtccagccctttacacccttacaaaactggtgcttgcaattcggttgtatttgcatgtctctttggcacgatatggacaaaggaaaatagagaaggatgacgctgctgtgttgcagcaagctgtggttatctacaccaaggagtttttgaagttcactgaattcattggtgaggtctttgtgaatgcaccattctttatatctgctgaggatgcaggtgccgtggatgcaaggaaaagtgatgagtacaaagaaactattattccagctggaaagacacatgaggtcattttgagtgttgaagctgtaaactcatacatcgcatgggacttttccttgcaacaaggggccctcaacatggtattggacattggctttcatgtggagtacattagcccttcaggggagaaaactttaattcttccataccgacgatatgaagctgaccaacggtgggccctgcagtggaggaggg

SEQ ID NO: 59261 - DNA, 1978 bp, Zea Mays
ggcgcccaattctctcccgctctcccctctgctgcaagtctgcaaccgcagcagcacgtccatttcacgtgccctttcctccctccctttcccctgcccccacgccacctccgttcgccgccgcccgccgcgccggcgatggcgatgaccgaagggcttgtgcctattacgcggacctacctcgcgcgctactacgacaagtacccgctgcccccgctgcccgacgccactacggacctcgccgcccggctccgtgctctctccgccgacctcgctgccgttgctcccatcgccccagatgaggagctcttggaacaagaagcagctggcatacctgcccacaaaattgatgagaatttgtggaagaaccgagaacaaatggaagaaattcttttcttgattaacacatcccatcgtcctgtggctcttcaacagaagtccaccccagaagatgctgagatagtttgtacacttgatgatatagaagctaaattgaaggatatgttgaagaacttagaacaatttcagttgaaaaatgctgacaatgttttcaatacagttatgacatacatgccccaagattttcggggtactctaatcaggcaacagcgagaacgctcagagagaaataagcaagcagaggtagatgctctggagggtgcaattagcacagcttggttctgcaacaggtgtatataagactcttgttaggtatttggtcggtgttccacaggttttattggattttattcgacaaataaatgacgataatgggcctatggaagaacaaagagaacgttatggtccagccctttacacccttacaaaactggtgcttgcaattcggttgtatttgcatgtctctttggcacgatatggacaaaggaaaatagagaaggatgacgctgctgtgttgcagcaagctgtggttatctacaccaaggagtttttgaagttcactgaattcattggtgaggtctttgtgaatgcaccattctttatatctgctgaggatgcaggtgccgtggatgcaaggaaaagtgatgagtacaaagaaactattattccagctggaaagacacatgaggtcattttgagtgttgaagctgtaaactcatacatcgcatgggacttttccttgcaacaaggggccctcaacatggacattggctttcatgtggagtacattagcccttcaggggagaaaactttaattcttccataccgacgatatgaagctgaccaaggtaatttttgcactgtttcatcgggatcatacaaacttgtgtgggacaattcatattcttcattcttcaaaaaggtccttcggtacaaggtggatgctgtgccaccggttgttgagccggccttgtcagccacggaactctgaagaggtctgtcttaatataatgatgtaacgagggccgatgcatgcccgagtatagctgtacaaatgtttctgaaggccccacacggtgctgttactgattattccatcgaatgctttgcggtgttctgatcgcagcattccctgatagctcgctgtcagagcgcatggatatgtactttgtgtgcacatggctgcggccacttgtcaccgacgaatgcctgaatataacagaaatgtattatatcgaccaataagagcatgtctgattggaagctgtcgtggtttgtttttattttttttctcgaatacggagagctgtgtgtcattgcaccaggaagaggaagagctgtggacgtgctccctggaaagagcatcccctttggctaccaattgttgaatttgccagtccatattttagcgcttcggatctgctcagatcccgattctgtttggatgaattgagctttgctttccccaacgaaaatacagaagcacggtattttctgttagtgttttatgggcttggcctatataaatatttactaattctaaaaatatatattagatagcctagcggttaaggcttct

SEQ ID NO: 59262 - DNA, 1929 bp, Zea Mays
ggcgcccaattctctcccgctctcccctctgctgcaagtctgcaaccgcagcagcacgtccatttcacgtgccctttcctccctccctttcccctgcccccacgccacctccgttcgccgccgcccgccgcgccggcgatggcgatgaccgaagggcttgtgcctattacgcggacctacctcgcgcgctactacgacaagtacccgctgcccccgctgcccgacgccactacggacctcgccgcccggctccgtgctctctccgccgacctcgctgccgttgctcccatcgccccagatgaggagctcttggaacaagaagcagctggcatacctgcccacaaaattgatgagaatttgtggaagaaccgagaacaaatggaagaaattcttttcttgattaacacatcccatcgtcctgtggctcttcaacagaagtccaccccagaagatgctgagatagtttgtacacttgatgatatagaagctaaattgaaggatatgttgaagaacttagaacaatttcagttgaaaaatgctgacaatgttttcaatacagttatgacatacatgccccaagattttcggggtactctaatcaggcaacagcgagaacgctcagagagaaataagcaagcagaggtagatgctctggttagtgctggtggaagcattcatgatcgatatgcattgttatggaaacagcaaatggaaaggagggtgcaattagcacagcttggttctgcaacaggtgtatataagactcttgttaggtatttggtcggtgttccacaggttttattggattttattcgacaaataaatgacgataatggagagaaggatgacgctgctgtgttgcagcaagctgtggttatctacaccaaggagtttttgaagttcactgaattcattggtgaggtctttgtgaatgcaccattctttatatctgctgaggatgcaggtgccgtggatgcaaggaaaagtgatgagtacaaagaaactattattccagctggaaagacacatgaggtcattttgagtgttgaagctgtaaactcatacatcgcatgggacttttccttgcaacaaggggccctcaacatggtattggacattggctttcatgtggagtacattagcccttcaggggagaaaactttaattcttccataccgacgatatgaagctgaccaaggtaatttttgcactgtttcatcgggatcatacaaacttgtgtgggacaattcatattcttcattcttcaaaaaggtccttcggtacaaggtggatgctgtgccaccggttgttgagccggccttgtcagccacggaactctgaagaggtctgtcttaatataatgatgtaacgagggccgatgcatgcccgagtatagctgtacaaatgtttctgaaggccccacacggtgctgttactgattattccatcgaatgctttgcggtgttctgatcgcagcattccctgatagctcgctgtcagagcgcatggatatgtactttgtgtgcacatggctgcggccacttgtcaccgacgaatgcctgaatataacagaaatgtattatatcgaccaataagagcatgtctgattggaagctgtcgtggtttgtttttattttttttctcgaatacggagagctgtgtgtcattgcaccaggaagaggaagagctgtggacgtgctccctggaaagagcatcccctttggctaccaattgttgaatttgccagtccatattttagcgcttcggatctgctcagatcccgattctgtttggatgaattgagctttgctttccccaacgaaaatacagaagcacggtattttctgttagtgttttatgggcttggcctatataaatatttactaattctaaaaatatatattagatagcctagcggttaaggcttct

SEQ ID NO: 59263 - DNA, 1703 bp, Zea Mays
aagaaagaggatgatgatgatgcatagggtctacatatgaggagctcttggaacaagaagcagctggcatacctgcccacaaaattgatgagaatttgtggaagaaccgagaacaaatggaagaaattcttttcttgattaacacatcccatcgtcctgtggctcttcaacagaagtccaccccagaagatgctgagatagtttgtacacttgatgatatagaagctaaattgaaggatatgttgaagaacttagaacaatttcagttgaaaaatgctgacaatgttttcaatacagttatgacatacatgccccaagattttcggggtactctaatcaggcaacagcgagaacgctcagagagaaataagcaagcagaggtagatgctctggttagtgctggtggaagcattcatgatcgatatgcattgttatggaaacagcaaatggaaaggagggtgcaattagcacagcttggttctgcaacaggtgtatataagactcttgttaggtatttggtcggtgttccacaggttttattggattttattcgacaaataaatgacgataatgggcctatggaagaacaaagagaacgttatggtccagccctttacacccttacaaaactggtgcttgcaattcggttgtatttgcatgtctctttggcacgatatggacaaaggaaaattgaggtctttgtgaatgcaccattctttatatctgctgaggatgcaggtgccgtggatgcaaggaaaagtgatgagtacaaagaaactattattccagctggaaagacacatgaggtcattttgagtgttgaagctgtaaactcatacatcgcatgggacttttccttgcaacaaggggccctcaacatggtattggacattggctttcatgtggagtacattagcccttcaggggagaaaactttaattcttccataccgacgatatgaagctgaccaaggtaatttttgcactgtttcatcgggatcatacaaacttgtgtgggacaattcatattcttcattcttcaaaaaggtccttcggtacaaggtggatgctgtgccaccggttgttgagccggccttgtcagccacggaactctgaagaggtctgtcttaatataatgatgtaacgagggccgatgcatgcccgagtatagctgtacaaatgtttctgaaggccccacacggtgctgttactgattattccatcgaatgctttgcggtgttctgatcgcagcattccctgatagctcgctgtcagagcgcatggatatgtactttgtgtgcacatggctgcggccacttgtcaccgacgaatgcctgaatataacagaaatgtattatatcgaccaataagagcatgtctgattggaagctgtcgtggtttgtttttattttttttctcgaatacggagagctgtgtgtcattgcaccaggaagaggaagagctgtggacgtgctccctggaaagagcatcccctttggctaccaattgttgaatttgccagtccatattttagcgcttcggatctgctcagatcccgattctgtttggatgaattgagctttgctttccccaacgaaaatacagaagcacggtattttctgttagtgttttatgggcttggcctatataaatatttactaattctaaaaatatatattagatagcctagcggttaaggcttct

SEQ ID NO: 59264 - DNA, 919 bp, Zea Mays
tcaatgccgtctctctacatatgcaggggtcattttgagtgttgaagctgtaaactcatacatcgcatgggacttttccttgcaacaaggggccctcaacatggacattggctttcatgtggagtacattagcccttcaggggagaaaactttaattcttccataccgacgatatgaagctgaccaaggtaatttttgcactgtttcatcgggatcatacaaacttgtgtgggacaattcatattcttcattcttcaaaaaggtccttcggtacaaggtggatgctgtgccaccggttgttgagccggccttgtcagccacggaactctgaagaggtctgtcttaatataatgatgtaacgagggccgatgcatgcccgagtatagctgtacaaatgtttctgaaggccccacacggtgctgttactgattattccatcgaatgctttgcggtgttctgatcgcagcattccctgatagctcgctgtcagagcgcatggatatgtactttgtgtgcacatggctgcggccacttgtcaccgacgaatgcctgaatataacagaaatgtattatatcgaccaataagagcatgtctgattggaagctgtcgtggtttgtttttattttttttctcgaatacggagagctgtgtgtcattgcaccaggaagaggaagagctgtggacgtgctccctggaaagagcatcccctttggctaccaattgttgaatttgccagtccatattttagcgcttcggatctgctcagatcccgattctgtttggatgaattgagctttgctttccccaacgaaaatacagaagcacggtattttctgttagtgttttatgggcttggcctatataaatatttactaattctaaaaatatatattagatagcctagcggttaaggcttct

SEQ ID NO: 59265 - DNA, 3728 bp, Zea Mays
cgcactgaggagaaggctccagagctccttcatgaacttcactgtgttcttttccatgaaccctgtcagctggatctgaatatttatttaataccaatttgatagtttactgttctaaaaaatgctatggattcctaaaaaagtctatccaaaggagtggccaaaaaaatcttggtggggattgttacatatagtcagttataagcctaacagacaacagacaaaacacacaaatgggagttccaaggaaatagatattcatcacgcggaggttaatatacagatagaaaaggatctggatcacctaaataatagaatctctgttgccacaaaaacgagcatatctctgttgccatctgagatctctaattttttcaaaaaagaagatacataatagaataaactgacagccatacttttgcaaagttcagttagtcattggttgtggaacaaacaaacaagacaaagcttagaaacctaaaacatcagtatgagaatgacaaccataaggtagcaaaaattatggtaggaaaacaggtgtcaagaaagtctcatgcaccaagataaatcataaatggcacagttatcattattttgatcataaggatacattcaatcagtcacattgaaattcaaatattagaatcatgctttccagaagtaatcttccattatatagaatatttctagtaaaagttccatttcagctttcagcatcatatatagaaaaaactgagatctcctaattagacggtttcattagctgattaaaaatggagtactttggacaaagaaaaatcgagactacaaacccaatattttttattgactcactattttcctaaatgaactcatcaggtggtaaatcacacagccataggtatccatctagcatatgcatctcgataatcatgttttcattaagagttgccatagaactaacaatttgattagtttaacacaaatagggccaggttgcaatcaggtggctgcatgtaattcatgttggtgaggtcattactcattaagaacacaacttgttttctagaatctagactcaatcaaggggagggacatcgccttgacttcaccttaaagtaggggcccactgaactctagaaagcaggcaggaacctcacatgtgcttgcttctttggcggtcacggaaccatctgttctgttacaaaccagagaggtgggcacacgacccacacagcgccagggctcgagcccaggtgcggagtgccgcacctaggtgctcaaccatcgcgctgttagcatgtctgctgacaacttgcttttctatttagcttttttggtggctgataaagtagtgagagcatgaatatgatgctcaattgcagcaagggacagcaaagacgtgtttgcatatgtaaatacaaaatgctaaattgcagtgcaattagtttgtgttgcaatactttgctgaattaggcaaaaaaattagaagcaagatgggaggtggggcttaaaatgacttacaatcagcagccacaacacaccatccataaggagatttaaggcatatgatactcgtatcacatcacaaaacatataaatagtcaagtataactgacttaaattaattataaacttataatacttgcgaaatgctttcaataatgttgtacaacaagaaccaggagcataggatgatggcaactcttatagagcatgttgaagaggcatcccaaacaatacatttagtgagaaacaataatcaattattcatgatatatagagcatcaaaaaatatgaaactgcaattgtatgggtacctttacacattcaccaacactgagcatcttcatctgctggaaactcggtccttcctggtaaggaattgaaatgatacgtagactaatcaacaaaatgaggccatactaacacaagaatggagtttaaaaaaaatataacctaagttcttagcatcactgtcaaatttggtaggatcttcctgtacatgaagtgcaaagtcctacaaaattgtgtgaagctggagacccacagtttatattttctcttatatgatatataaaaactatagcaacgcacaggacttgtatgttttttttgtaaatatgcatcaggagcatgttacattggtacatgcgagagtggactcaaggatgggcatggtatgttttataaaccaagaagtaaaatgccttgtaaccttgaagtgtctaagtgtgtaacagaccacgatgtttcaagtaccctcagcaaaacaatttgtcacaagattcatctagcttactcttggcaactggtgtagaggccaagctagtggaggttgataaagtattggtctatggaagagaatatgtacagggaatacttatctcggagaagccaaaacacaatatagttgttgcctgtgaccgaatggccgaaacacctcatgtcaaaatgaccaaaacattatatgatagaatggcaaaaacactctgtgtgaacatgtctgcatccacaagttaagtgcccatgcattgctacaacttattttccctatttttcaaatcttatattatgtttgagtatatattataaaacataaaaaaaatatgtatgttctgctggataggtgggtgtgaatctatttggagccaacgatcgatgttcaaatctccacttgtgcataattttaatttatttttaccgtttaagtagggagtggagaggggtaacacacgaatggagtggagaaagtctccctttatattagtatagatttaatgaatatatgtgggaaaaaggaaaacatggagaatagaactccatgtttctaccatacaagaaaaacaagacatgagatgtgaactatacacatgttcaagtaatttagctatccttgcaaaaaagaaacaaagcaaaactacaatagcttcttttgccgcataaatgtgtgttatctagaattaaactactggacccgcatgttgatcatcaataattctgtagtgccacaatacgatgggatgaaagaacatccatgctgcttgtaatataagacaagcaaataatgaaaaccatcgaaaaacgcaccattcgcctcacaataatgtggaaattgcataatgctacttacccatgtagtctgactcctcattgtgctgttgtacatcatgatcaatcctgcaaggtaaacttccttcgagattatggttattattatgttctgtcagtacctcaaccttcaaaacactataaggccacttgttcagttgaaaaccaaatgattttgcacctaagtaaactaaattttgcttacatgtagtacacgcacacatggatgcatgtatatatgtttgtcatatgaaacaaaaaacatcccaagtaaatttcaagaactgcagactgttctcatataatatctccacagctgcttcaaaaaatgacactcttgaaaagctaggagcaaagcaaccagtataaaatttgagcttttaaactcccagtgctgtcacacaacactcttgaaataactataagctaacagtaaccaattttatagccaaattcaactttgtttatatgaaatttacagttcatggagaaagagtgaagcaaaaggagctacatatcactctagtaacagcaacaagaaaacacttactttagcttcaatttgtccactaaagcaatagcaatgcagtcctagataatagtagaaaaccaatgccatatgcagagatggacctgca

SEQ ID NO: 59266 - DNA, 1780 bp, Zea Mays
gggtctggaccgtccgtttggcgatatatgggcagcagtgagaggcacacccgctgaaaaaccctgcttctctcaagtctcaacgccgtcattctcatgtcttcctggtcgccggccgccgccgccgccgccgccgtagcgaaggcggctaagccactgcaccggagcgtgtcctcaactcctgtatccccccacctctctatgtcctcttctcaccgcactccacctctcgcgatggcggccggtggaagcggcgcggtggccccttcctcacttctcgtcgccgaccagggccaccgcgagtccgtgctgcttgctgcacgcgcctccatggggaactgcctcggagagacccgcctcgacctctcggtgtcagggctccgccttgctgccaagggcaaggttcttaatgagacaagcctttggtggttcaatcagacacggcacattactccaaatgcagtagtgtcttctcctgataagaatgtaacaatcgccaaaagatgcacagtttttccagttgaatttgttgttaggggatttgttacaggaagcactgatacatctttatggacagtttataataagggtgtaagaaattattgtggaaatgttcttcctgacggtatggtaaagaatgagaagctatcttcaaatatattgacaccaactactaaagctgcagaccatgatgtccctgtcactccagatgagataatcgagtcagggttgatgtcgaaggaagattttcatgaggcaggaagcaaagccttaagcttgtttgcatatggacagaaagtggccttagagaatggattaattctggttgacactaagtatgagtttggaaaaacacctgatggaacaattgtgttgattgatgaggttcatactcctgactctagcagatattggattgctaattcatacgaagatagattcaaatctggccttgaacctgaaaatgttgataaggagtttttaaggctttggttcaagaacaactgcaacccatatgaagacgcggttctgccagaagctccagaagagttggtttgtgagctggcctggcgatacattttcctgtttgaaacaatcacgaagacaaaattcgagatcctagaagcgcaggaaccaattcatgaaaggatatcaaggaatgtcgctcaagccttacgggacctatgattgctgatagaggatctggggcagagtttgagtgcatttctggaaccaattcatgaaaccatctgatagggttttgggtgcatttctggcactaatattcccgtgcgaatagcaagtagtctgcgcagatgccatatatccgtcctgtgagggttgccattgcgtcttgatgaagcagaactatccaccacatttcttcatgatctgtgatataatgtggtaataaactcaaccgccatgctccgctggtgagatttgccgtgtttggagcagggggggagacaaactgagaaatttaacaagcatgagaccgacagatgctgtattcatacaggccttcctcagatttctttgtgttagtgtaacgttgtcaggtggtttgagtcgggcagccatcacacgctgtcttctgaaacgaaaaggataaatttgcaaataacaagttcattatgttctagcgtaattgggcttttcctctaagagcaactccaagaggccaaatcgttttgtaaaagtaaatttgggtattgctagaagaaaaacaactccaatagactctataaatgactcctccccattcctccaaatttgg

SEQ ID NO: 59267 - DNA, 1663 bp, Zea Mays
gggtctggaccgtccgtttggcgatatatgggcagcagtgagaggcacacccgctgaaaaaccctgcttctctcaagtctcaacgccgtcattctcatgtcttcctggtcgccggccgccgccgccgccgccgccgtagcgaaggcggctaagccactgcaccggagcgtgtcctcaactcctgtgagggacgtgtacgagagcgggcagcacctggtgctggtgaccaccgacaggcagagcgcgttcgatcgcgtgcttgcttccatcccgtttaaagggcaggttcttaatgagacaagcctttggtggttcaatcagacacggcacattactccaaatgcagtagtgtcttctcctgataagaatgtaacaatcgccaaaagatgcacagtttttccagttgaatttgttgttaggggatttgttacaggaagcactgatacatctttatggacagtttataataagggtgtaagaaattattgtggaaatgttcttcctgacggtatggtaaagaatgagaagctatcttcaaatatattgacaccaactactaaagctgcagaccatgatgtccctgtcactccagatgagataatcgagtcagggttgatgtcgaaggaagattttcatgaggcaggaagcaaagccttaagcttgtttgcatatggacagaaagtggccttagagaatggattaattctggttgacactaagtatgagtttggaaaaacacctgatggaacaattgtgttgattgatgaggttcatactcctgactctagcagatattggattgctaattcatacgaagatagattcaaatctggccttgaacctgaaaatgttgataaggagtttttaaggctttggttcaagaacaactgcaacccatatgaagacgcggttctgccagaagctccagaagagttggtttgtgagctggcctggcgatacattttcctgtttgaaacaatcacgaagacaaaattcgagatcctagaagcgcaggaaccaattcatgaaaggatatcaaggaatgtcgctcaagccttacgggacctatgattgctgatagaggatctggggcagagtttgagtgcatttctggaaccaattcatgaaaccatctgatagggttttgggtgcatttctggcactaatattcccgtgcgaatagcaagtagtctgcgcagatgccatatatccgtcctgtgagggttgccattgcgtcttgatgaagcagaactatccaccacatttcttcatgatctgtgatataatgtggtaataaactcaaccgccatgctccgctggtgagatttgccgtgtttggagcagggggggagacaaactgagaaatttaacaagcatgagaccgacagatgctgtattcatacaggccttcctcagatttctttgtgttagtgtaacgttgtcaggtggtttgagtcgggcagccatcacacgctgtcttctgaaacgaaaaggataaatttgcaaataacaagttcattatgttctagcgtaattgggcttttcctctaagagcaactccaagaggccaaatcgttttgtaaaagtaaatttgggtattgctagaagaaaaacaactccaatagactctataaatgactcctccccattcctccaaatttgg

SEQ ID NO: 59268 - DNA, 1864 bp, Zea Mays
gggtctggaccgtccgtttggcgatatatgggcagcagtgagaggcacacccgctgaaaaaccctgcttctctcaagtctcaacgccgtcattctcatgtcttcctggtcgccggccgccgccgccgccgccgccgtagcgaaggcggctaagccactgcaccggagcgtgtcctcaactcctgtatccccccacctctctatgtcctcttctcaccgcactccacctctcgcgatggcggccggtggaagcggcgcggtggccccttcctcacttctcgtcgccgaccagggccaccgcgagtccgtgctgcttgctgcacgcgcctccatggggaactgcctcggagagacccgcctcgacctctcggtgtcagggctccgccttgctgccaagggcaaggtgagggacgtgtacgagagcgggcagcacctggtgctggtgaccaccgacaggcagagcgcgttcgatcgcgtgcttgcttccatcccgtttaaagggcaggttcttaatgagacaagcctttggtggttcaatcagacacggcacattactccaaatgcagtagtgtcttctcctgataagaatgtaacaatcgccaaaagatgcacagtttttccagttgaatttgttggaagcactgatacatctttatggacagtttataataagggtgtaagaaattattgtggaaatgttcttcctgacggtatggtaaagaatgagaagctatcttcaaatatattgacaccaactactaaagctgcagaccatgatgtccctgtcactccagatgagataatcgagtcagggttgatgtcgaaggaagattttcatgaggcaggaagcaaagccttaagcttgtttgcatatggacagaaagtggccttagagaatggattaattctggttgacactaagtatgagtttggaaaaacacctgatggaacaattgtgttgattgatgaggttcatactcctgactctagcagatattggattgctaattcatacgaagatagattcaaatctggccttgaacctgaaaatgttgataaggagtttttaaggctttggttcaagaacaactgcaacccatatgaagacgcggttctgccagaagctccagaagagttggtttgtgagctggcctggcgatacattttcctgtttgaaacaatcacgaagacaaaattcgagatcctagaagcgcaggaaccaattcatgaaaggatatcaaggaatgtcgctcaagccttacgggacctatgattgctgatagaggatctggggcagagtttgagtgcatttctggaaccaattcatgaaaccatctgatagggttttgggtgcatttctggcactaatattcccgtgcgaatagcaagtagtctgcgcagatgccatatatccgtcctgtgagggttgccattgcgtcttgatgaagcagaactatccaccacatttcttcatgatctgtgatataatgtggtaataaactcaaccgccatgctccgctggtgagatttgccgtgtttggagcagggggggagacaaactgagaaatttaacaagcatgagaccgacagatgctgtattcatacaggccttcctcagatttctttgtgttagtgtaacgttgtcaggtggtttgagtcgggcagccatcacacgctgtcttctgaaacgaaaaggataaatttgcaaataacaagttcattatgttctagcgtaattgggcttttcctctaagagcaactccaagaggccaaatcgttttgtaaaagtaaatttgggtattgctagaagaaaaacaactccaatagactctataaatgactcctccccattcctccaaatttgg

SEQ ID NO: 59269 - DNA, 1446 bp, Zea Mays
ctttcttcgttcctcggactcaagggcggtctgctcagtacattttgtaaaagaaatgtcaacgttaggttcttaatgagacaagcctttggtggttcaatcagacacggcacattactccaaatgcagtagtgtcttctcctgataagaatgtaacaatcgccaaaagatgcacagtttttccagttgaatttgttgttaggggatttgttacaggaagcactgatacatctttatggacagtttataataagggtgtaagaaattattgtggaaatgttcttcctgacggtatggtaaagaatgagaagctatcttcaaatatattgacaccaactactaaagctgcagaccatgatgtccctgtcactccagatgagataatcgagtcagggttgatgtcgaaggaagattttcatgaggcaggaagcaaagccttaagcttgtttgcatatggacagaaagtggccttagagaatggattaattctggttgacactaagtatgagtttggaaaaacacctgatggaacaattgtgttgattgatgaggttcatactcctgactctagcagatattggattgctaattcatacgaagatagattcaaatctggccttgaacctgaaaatgttgataaggagtttttaaggctttggttcaagaacaactgcaacccatatgaagacgcggttctgccagaagctccagaagagttggtttgtgagctggcctggcgatacattttcctgtttgaaacaatcacgaagacaaaattcgagatcctagaagcgcaggaaccaattcatgaaaggatatcaaggaatgtcgctcaagccttacgggacctatgattgctgatagaggatctggggcagagtttgagtgcatttctggaaccaattcatgaaaccatctgatagggttttgggtgcatttctggcactaatattcccgtgcgaatagcaagtagtctgcgcagatgccatatatccgtcctgtgagggttgccattgcgtcttgatgaagcagaactatccaccacatttcttcatgatctgtgatataatgtggtaataaactcaaccgccatgctccgctggtgagatttgccgtgtttggagcagggggggagacaaactgagaaatttaacaagcatgagaccgacagatgctgtattcatacaggccttcctcagatttctttgtgttagtgtaacgttgtcaggtggtttgagtcgggcagccatcacacgctgtcttctgaaacgaaaaggataaatttgcaaataacaagttcattatgttctagcgtaattgggcttttcctctaagagcaactccaagaggccaaatcgttttgtaaaagtaaatttgggtattgctagaagaaaaacaactccaatagactctataaatgactcctccccattcctccaaatttgg

SEQ ID NO: 59270 - DNA, 1108 bp, Zea Mays
attacacgcacacagcaagctggatcctaacctggccgtgggtgagagatagagctcagggatcggagctgtcgccgtcgacggcggccaccaccgtccgcagtaacacgaaggcgcgccgcccggcccgtgcagcaacgtgtagaccgtggtgcatggcgtcgccactcgcccgcccgccgggagccgggaggagcaccagcagcgacgcacggccccacccgagaccccgcggcccggccgggggttgctaataagttcgtcgttcatgctgctccactccaggctgggatggacggacgctaaacatggccgccgccgtgattggcgcaccccccgggagaaggagtgcctggctggcctgccgcgtccgtccagtcgtccacccacgatgccgaaagcgcagacggcctgtttttcggtcacgcgtataaactgaaccgctttttttttttttttgcttttttgggtcccagaccacgcaccacgcatgcagcagtacgtggttcctttttccagtcgaaaacgagtgcgggcggcagaggccacgtggtaggggcaggggcgcagggcaggcccggccggcaacaaaggatcgccggggatcttgtcagccgtgcctctgtccgtccgtcgtcagcctgcccagcccaactggctgccatagtggctgtggcatgggcgcatggccacaagggacatttaagttgtactactaggtgcagattccagacaggtaaggtacaaagtggttcccaagtccaaaaaaaatatgcaatttttactcgtggatagtaataatttagtcgtccgtcgatcccctatgttgtgccacagaccctacgcagaagcttgaattttttccccctccatcttttacttgcccagaagataggagtcggatcacatgacccgaccaagtacggtacaggcaatgctgcgttccatttgttcatgtgcagtaagtggagagcgagatggatggactcacctggctctgatgatgatgccccgcgacgaacgccacgccaggccgggactcactcactcaccgacgagtcgacgacgcggcgcgcggcagtgctcctggtcttgaggggcaccggag

SEQ ID NO: 59271 - DNA, 479 bp, Zea Mays
cagccgttggcgtttgaaaagccccgaagcggcagtcgcactggccgcccgtatggctcagattcacatcgattccgacatcccaaccgtccttgcccctccgctccgtgcttcttcagttcttcctctctgtcacccagtcaccctaccccgttcgttggcctccgctgcgaaatttaaaacctcccaagcagagcgacgcccagagaagccaagaccctatttccccatattattaataaaattggctttggtggaaaaaagccttcccttttggcctgcgcaattcgagattccggaggaccacggcggcggccggatcggggtggcggcgcggttcggtcgccgctgagcggagctgatgcgccgcgcctcctgtgagacaatggccacttctccccaagcgaaaaaaatctgctagaagaccttagagggttttaacattgggatggatatttgggcccttaccttgctttaag

SEQ ID NO: 59272 - DNA, 3329 bp, Zea Mays
ctcagattcacatcgattccgacatcccaaccgtccttgcccctccgctccgtgcttcttcagttcttcctctctgtcacccagtcaccctaccccgttcgttggcctccgctgcgaaatttaaaacctcccaagcagagcgacgcccagagaagccaagaccctatttccccatattattaataaaattggctttggtggaaaaaagccttcccttttggcctgcgcaattcgagattccggaggaccacggcggcggccggatcggggtggcggcgcggttcggtcgccgctgagcggagctgatgcgccgcgcctcctgtgaggaggacaactggtccagcacgccgctcatccaagggcaactggactctagaagaggatgacatacttcgcaaagctgttgaaacctacaagggaaaaaattggaaaaagatagctgaatgttttccaggtaggactgatgttcaatgtttgcatagatggcagaaggttttgaaccctgagcttgttaaagggccttggtcgaaagaagaagatgagatcattactcagatggtaaataaacttgggccaaagaaatggtcgaccattgcccaagctcttcctggacgtattggaaagcaatgtcgggaaagatggcacaaccatcttaatcctgggatcaataaggacgcatggacacaagacgaggaaatcaggctcatccatgctcatcaaacttatggaaacaaatgggctgaattgacaaagtttttaccaggaaggacagacaatgcaattaaaaatcattggcacagctcggtgaagaagaaagttgattcatacagatcatctggtttactggctcaatcccagggcttcacacctgttgaatacactgctggtggtttaaatgttgattcttcatctgcaataaccaatcaaattagcgaaggcagtggttttaatgtttttcgggaggctgaagattcgatggagttaagtcagtcttcgtttgccaagggttcttgctctcaggaggagcaaaatgatgtgactttgggatctcatttgcatgtgcatgaatctttgtgtccagatggttccactaatgatggcaatggtgcttctggtttacctgacattcatcaccgcttatgcacttctgacatggatcaagataaacacttgcaggaaggaatggatttggataaacacttgcagcatgaattctctcaaggaacggatttgcatcttgatgtagatgaagtgccaaacaactttgtgataaaaggtagccagtcatctaatgagcttgcagttcaatttcatgacacagagattatgaatagttcaaaaaatgatggagtgtctttggtaccacatgctataacaccatgtgttcccatcttacctagtgtttctggatgtgtgcataacataaatgtgatatacgaaatgggcataaaaaatgataattgtttccaatctgaaaagtgccaggatatttccattcaatcaggtgcatactcgtctgaagctgcaggcagctttttagcaccactttacccattgcagacatctgaaccagcaataatgatgggtggccctgtgtactatcagagttctgtaatgtcattaccaccaggctttatttcttctgatggtgcttctaatgcatctggtgtcaaatctgagacaagttactatcctgtttctcgccaaaatttggagattaaaacttgccacaatgcttctggtgatcctgaacaaaattcatatattagcagcgaagatgacagaaacaagacttctgaacctatgggcagaatatcagaatctgaaaagaaacagcaagttgatgttgaacaatcatgtttggagcctgcagcctgcattggaaaggaagcattatctagtcatggtgacaccatattaagtaaaaaggaggatgctggagctctatgctatgaacctccttgctttcggagttttgaatttccctttgtcagctgtgagcttgtaaactccagcgatctcccagaatatagtcctcttggcattcgagagttgatgaggacatccttgaacttccctaccccagtaagattgtggggctcccctactagggatggtagccctgatgctgtgctaaagaatgctgccaaaagattcatgtgcaccccgtccataatgaaaaaaaggcacagagatcttttatctccagtttctgatataagaactgacaagaaaccaaatactgaaagggattttatgagctcaggcatatcctctacaagagttgggaaatcttgcatggatagcgctgatgattcagctgatttagtttcaccgaaagagagtgcatttcaaaagaagctgaagctttgtcacgaaaacaaagaaaatttgaatgaaattgctgatcaaggagaaaatgaagccaatgcaaagcattcttcagggattcttactccgagcagtgttgacaaccataatacacataagcatggtccaaattttcgaattcaggagctaaataccactgtacaggctttgtctaactctaaagacataatattttctagatcaaagccatcagaacatgttgaaaaatctgcagcctgcattgatgcagattacgagtatttgaacatattggctgatactccaggtattaaaagaggcttagaatctccttctgcctggaagtctcctgtgttcacaccattccaggatgcatacttcatgagcccagcaagcagagcttttgatgccttaggattggtgaagcagattaatgagcagagtgcttctgctgtggaggaagcacatgaagttctggcaaatggaagcccatggaaacaacataacaaggaaaactctgacaaagaaaatatagaaaatacagctttgaagcatgagcatgtcacaagcaaacctccatcgatactcatggtagaggcacgggtgctcgatttcaatgaatgctccacacctgtgaggaagaaagacgataagaaagtggaaatagttttaggaggacctgcaacatcccctgttacttcctcgcatctttggataaatatgcggtagccctttgaggtgggtgggcgtggggatgcttcgcctatgctgttcagtatgtacatgtctgttattcccataatttccaccgttttgaaatacacattccaattagtactttattctttgtgcttggtaccctaaatgtcaattctaaatggaaatacatttttttgtagtgttaagatttgtaatgtgtcatttgattatgttaaatattaaacaaggcaatatatttaaattcagagtatattatgaaa

SEQ ID NO: 59273 - DNA, 3467 bp, Zea Mays
ctcagattcacatcgattccgacatcccaaccgtccttgcccctccgctccgtgcttcttcagttcttcctctctgtcacccagtcaccctaccccgttcgttggcctccgctgcgaaatttaaaacctcccaagcagagcgacgcccagagaagccaagaccctatttccccatattattaataaaattggctttggtggaaaaaagccttcccttttggcctgcgcaattcgagattccggaggaccacggcggcggccggatcggggtggcggcgcggttcggtcgccgctgagcggagctgatgcgccgcgcctcctgtgaggaggacaactggtccagcacgccgctcatccaagggcaactggactctagaagaggatgacatacttcgcaaagctgttgaaacctacaagggaaaaaattggaaaaagatagctgaatgttttccaggtaggactgatgttcaatgtttgcatagatggcagaaggttttgaaccctgagcttgttaaagggccttggtcgaaagaagaagatgagatcattactcagatggtaaataaacttgggccaaagaaatggtcgaccattgcccaagctcttcctggacgtattggaaagcaatgtcgggaaagatggcacaaccatcttaatcctgggatcaataaggacgcatggacacaagacgaggaaatcaggctcatccatgctcatcaaacttatggaaacaaatgggctgaattgacaaagtttttaccaggaaggacagacaatgcaattaaaaatcattggcacagctcggtgaagaagaaagttgattcatacagatcatctggtttactggctcaatcccagggcttcacacctgttgaatacactgctggtggtttaaatgttgattcttcatctgcaataaccaatcaaattagcgaaggcagtggttttaatgtttttcgggaggctgaagattcgatggagttaagtcagtcttcgtttgccaagggttcttgctctcaggaggagcaaaatgatgtgactttgggatctcatttgcatgtgcatgaatctttgtgtccagatggttccactaatgatggcaatggtgcttctggtttacctgacattcatcaccgcttatgcacttctgacatggatcaagataaacacttgcaggaaggaatggatttggataaacacttgcagcatgaattctctcaaggaacggatttgcatcttgatgtagatgaagtgccaaacaactttgtgataaaaggtagccagtcatctaatgagcttgcagttcaatttcatgacacagagattatgaatagttcaaaaaatgatggagtgtctttggtaccacatgctataacaccatgtgttcccatcttacctagtgtttctggatgtgtgcataacataaatgtgatatacgaaatgggcataaaaaatgataattgtttccaatctgaaaagtgccaggatatttccattcaatcaggtgcatactcgtctgaagctgcaggcagctttttagcaccactttacccattgcagacatctgaaccagcaataatgatgggtggccctgtgtactatcagagttctgtaatgtcattaccaccaggctttatttcttctgatggtgcttctaatgcatctggtgtcaaatctgagacaagttactatcctgtttctcgccaaaatttggagattaaaacttgccacaatgcttctggtgatcctgaacaaaattcatatattagcagcgaagatgacagaaacaagacttctgaacctatgggcagaatatcagaatctgaaaagaaacagcaagttgatgttgaacaatcatgtttggagcctgcagcctgcattggaaaggaagcattatctagtcatggtgacaccatattaagtaaaaaggaggatgctggagctctatgctatgaacctccttgctttcggagttttgaatttccctttgtcagctgtgagcttgtaaactccagcgatctcccagaatatagtcctcttggcattcgagagttgatgaggacatccttgaacttccctaccccagtaagattgtggggctcccctactagggatggtagccctgatgctgtgctaaagaatgctgccaaaagattcatgtgcaccccgtccataatgaaaaaaaggcacagagatcttttatctccagtttctgatataagaactgacaagaaaccaaatactgaaagggattttatgagctcaggcatatcctctacaagagttgggaaatcttgcatggatagcgctgatgattcagctgatttagtttcaccgaaagagagtgcatttcaaaagaagctgaagctttgtcacgaaaacaaagaaaatttgaatgaaattgctgatcaaggagaaaatgaagccaatgcaaagcattcttcagggattcttactccgagcagtgttgacaaccataatacacataagcatggtccaaattttcgaattcaggagctaaataccactgtacaggctttgtctaactctaaagacataatattttctagatcaaagccatcagaacatgttgaaaaatctgcagcctgcattgatgcagattacgagtatttgaacatattggctgatactccaggtattaaaagaggcttagaatctccttctgcctggaagtctcctgtgttcacaccattccaggatgcatacttcatgagcccagcaagcagagcttttgatgccttaggattggtgaagcagattaatgagcagagtgcttctgctgtggaggaagcacatgaagttctggcaaatggaagcccatggaaacaacataacaaggaaaactctgacaaagaaaatatagaaaatacagctttgaagcatgagcatgtcacaagcaaacctccatcgatactcatggtagaggcacgggtgctcgatttcaatgaatgctccacacctgtgaggaagaaagacgataagaaagtggaaatagttttaggaggacctgcaacatcccctgttacttcctcgcatctttggataaatatgcggtagccctttgaggttgcgacatcgcctggcgctggttgcaagtcaccatgggcagcatgccgatgccgcgccgacgctcccttccccagtccctatcgccacgccggtgtcaccaccgtccgttgggattagggttgcgtgtgcgtcatgtcgcacgtcaggcgtgcagagaggcaacaaccctccaatcaggctaaagattgttgggtccgatgggccacatgatagagaaagaggctggttgatatgaaattttggtccaaatagctataaaacattgttgttttttatgtttttacaatattttagtgtgtatacattgcatatacatgtttacataatttgtttcaccaaaaataattggtattcaaatgaatacctttgattcaata

SEQ ID NO: 59274 - DNA, 2635 bp, Zea Mays
atggcggtagcgccggtggtgcgccagcagagccttacagagggattgatttcctgtaggactgatgttcaatgtttgcatagatggcagaaggttttgaaccctgagcttgttaaagggccttggtcgaaagaaataactactgatgtgaaacatttcgatgtgacatcttcatttagatggcacaaccatcttaatcctgggatcaataaggacgcatggacacaagacgaggaaatcaggctcatccatgctcatcaaacttatggaaacaaatgggctgaattgacaaagtttttaccaggaaggacagacaatgcaattaaaaatcattggcacagctcggtgaagaagaaagttgattcatacagatcatctggtttactggctcaatcccagggcttcacacctgttgaatacactgctggtggtttaaatgttgattcttcatctgcaataaccaatcaaattagcgaaggcagtggttttaatgtttttcgggaggctgaagattcgatggagttaagtcagtcttcgtttgccaagggttcttgctctcaggaggagcaaaatgatgtgactttgggatctcatttgcatgtgcatgaatctttgtgtccagatggttccactaatgatggcaatggtgcttctggtttacctgacattcatcaccgcttatgcacttctgacatggatcaagataaacacttgcaggaaggaatggatttggataaacacttgcagcatgaattctctcaaggaacggatttgcatcttgatgtagatgaagtgccaaacaactttgtgataaaaggtagccagtcatctaatgagcttgcagttcaatttcatgacacagagattatgaatagttcaaaaaatgatggagtgtctttggtaccacatgctataacaccatgtgttcccatcttacctagtgtttctggatgtgtgcataacataaatgtgatatacgaaatgggcataaaaaatgataattgtttccaatctgaaaagtgccaggatatttccattcaatcaggtgcatactcgtctgaagctgcaggcagctttttagcaccactttacccattgcagacatctgaaccagcaataatgatgggtggccctgtgtactatcagagttctgtaatgtcattaccaccaggctttatttcttctgatggtgcttctaatgcatctggtgtcaaatctgagacaagttactatcctgtttctcgccaaaatttggagattaaaacttgccacaatgcttctggtgatcctgaacaaaattcatatattagcagcgaagatgacagaaacaagacttctgaacctatgggcagaatatcagaatctgaaaagaaacagcaagttgatgttgaacaatcatgtttggagcctgcagcctgcattggaaaggaagcattatctagtcatggtgacaccatattaagtaaaaaggaggatgctggagctctatgctatgaacctccttgctttcggagttttgaatttccctttgtcagctgtgagcttgtaaactccagcgatctcccagaatatagtcctcttggcattcgagagttgatgaggacatccttgaacttccctaccccagtaagattgtggggctcccctactagggatggtagccctgatgctgtgctaaagaatgctgccaaaagattcatgtgcaccccgtccataatgaaaaaaaggcacagagatcttttatctccagtttctgatataagaactgacaagaaaccaaatactgaaagggattttatgagctcaggcatatcctctacaagagttgggaaatcttgcatggatagcgctgatgattcagctgatttagtttcaccgaaagagagtgcatttcaaaagaagctgaagctttgtcacgaaaacaaagaaaatttgaatgaaattgctgatcaaggagaaaatgaagccaatgcaaagcattcttcagggattcttactccgagcagtgttgacaaccataatacacataagcatggtccaaattttcgaattcaggagctaaataccactgtacaggctttgtctaactctaaagacataatattttctagatcaaagccatcagaacatgttgaaaaatctgcagcctgcattgatgcagattacgagtatttgaacatattggctgatactccaggtattaaaagaggcttagaatctccttctgcctggaagtctcctgtgttcacaccattccaggatgcatacttcatgagcccagcaagcagagcttttgatgccttaggattggtgaagcagattaatgagcagagtgcttctgctgtggaggaagcacatgaagttctggcaaatggaagcccatggaaacaacataacaaggaaaactctgacaaagaaaatatagaaaatacagctttgaagcatgagcatgtcacaagcaaacctccatcgatactcatgcctagttccagtctccggctgttagaaataagcaacaaggattatggatgctaatgcaaattctcagtggcaaactggcaataatctaagcctatcagtagacatcagttttgcatggaacatcaaattctagtggacatatcaattagatcag

SEQ ID NO: 59275 - DNA, 2865 bp, Zea Mays
atggcggtagcgccggtggtgcgccagcagagccttacagagggattgatttcctgtaggactgatgttcaatgtttgcatagatggcagaaggttttgaaccctgagcttgttaaagggccttggtcgaaagaaataactactgatgtgaaacatttcgatgtgacatcttcatttagatggcacaaccatcttaatcctgggatcaataaggacgcatggacacaagacgaggaaatcaggctcatccatgctcatcaaacttatggaaacaaatgggctgaattgacaaagtttttaccaggaagacaatgcaattaaaaatcattggcacagctcggtgaagaagaaagttgattcatacagatcatctggtttactggctcaatcccagggcttcacacctgttgaatacactgctggtggtttaaatgttgattcttcatctgcaataaccaatcaaattagcgaaggcagtggttttaatgtttttcgggaggctgaagattcgatggagttaagtcagtcttcgtttgccaagggttcttgctctcaggaggagcaaaatgatgtgactttgggatctcatttgcatgtgcatgaatctttgtgtccagatggttccactaatgatggcaatggtgcttctggtttacctgacattcatcaccgcttatgcacttctgacatggatcaagataaacacttgcaggaaggaatggatttggataaacacttgcagcatgaattctctcaaggaacggatttgcatcttgatgtagatgaagtgccaaacaactttgtgataaaaggtagccagtcatctaatgagcttgcagttcaatttcatgacacagagattatgaatagttcaaaaaatgatggagtgtctttggtaccacatgctataacaccatgtgttcccatcttacctagtgtttctggatgtgtgcataacataaatgtgatatacgaaatgggcataaaaaatgataattgtttccaatctgaaaagtgccaggatatttccattcaatcaggtgcatactcgtctgaagctgcaggcagctttttagcaccactttacccattgcagacatctgaaccagcaataatgatgggtggccctgtgtactatcagagttctgtaatgtcattaccaccaggctttatttcttctgatggtgcttctaatgcatctggtgtcaaatctgagacaagttactatcctgtttctcgccaaaatttggagattaaaacttgccacaatgcttctggtgatcctgaacaaaattcatatattagcagcgaagatgacagaaacaagacttctgaacctatgggcagaatatcagaatctgaaaagaaacagcaagttgatgttgaacaatcatgtttggagcctgcagcctgcattggaaaggaagcattatctagtcatggtgacaccatattaagtaaaaaggaggatgctggagctctatgctatgaacctccttgctttcggagttttgaatttccctttgtcagctgtgagcttgtaaactccagcgatctcccagaatatagtcctcttggcattcgagagttgatgaggacatccttgaacttccctaccccagtaagattgtggggctcccctactagggatggtagccctgatgctgtgctaaagaatgctgccaaaagattcatgtgcaccccgtccataatgaaaaaaaggcacagagatcttttatctccagtttctgatataagaactgacaagaaaccaaatactgaaagggattttatgagctcaggcatatcctctacaagagttgggaaatcttgcatggatagcgctgatgattcagctgatttagtttcaccgaaagagagtgcatttcaaaagaagctgaagctttgtcacgaaaacaaagaaaatttgaatgaaattgctgatcaaggagaaaatgaagccaatgcaaagcattcttcagggattcttactccgagcagtgttgacaaccataatacacataagcatggtccaaattttcgaattcaggagctaaataccactgtacaggctttgtctaactctaaagacataatattttctagatcaaagccatcagaacatgttgaaaaatctgcagcctgcattgatgcagattacgagtatttgaacatattggctgatactccaggtattaaaagaggcttagaatctccttctgcctggaagtctcctgtgttcacaccattccaggatgcatacttcatgagcccagcaagcagagcttttgatgccttaggattggtgaagcagattaatgagcagagtgcttctgctgtggaggaagcacatgaagttctggcaaatggaagcccatggaaacaacataacaaggaaaactctgacaaagaaaatatagaaaatacagctttgaagcatgagcatgtcacaagcaaacctccatcgatactcatggtagaggcacgggtgctcgatttcaatgaatgctccacacctgtgaggaagaaagacgataagaaagtggaaatagttttaggaggacctgcaacatcccctgttacttcctcgcatctttggataaatatgcggtagccctttgaggtgggtgggcgtggggatgcttcgcctatgctgttcagtatgtacatgtctgttattcccataatttccaccgttttgaaatacacattccaattagtactttattctttgtgcttggtaccctaaatgtcaattctaaatggaaatacatttttttgtagtgttaagatttgtaatgtgtcatttgattatgttaaatattaaacaaggcaatatatttaaattcagagtatattatgaaa

SEQ ID NO: 59276 - DNA, 2930 bp, Zea Mays
atggcggtagcgccggtggtgcgccagcagagccttacagagggattgatttcctgtaggactgatgttcaatgtttgcatagatggcagaaggttttgaaccctgagcttgttaaagggccttggtcgaaagaagaagatgagatcattactcagatggtaaataaacttgggccaaagaaatggtcgaccattgcccaagctcttcctggacgtattggaaagcaatgtcgggaaagatggcacaaccatcttaatcctgggatcaataaggacgcatggacacaagacgaggaaatcaggctcatccatgctcatcaaacttatggaaacaaatgggctgaattgacaaagtttttaccaggaaggacagacaatgcaattaaaaatcattggcacagctcggtgaagaagaaagttgattcatacagatcatctggtttactggctcaatcccagggcttcacacctgttgaatacactgctggtggtttaaatgttgattcttcatctgcaataaccaatcaaattagcgaaggcagtggttttaatgtttttcgggaggctgaagattcgatggagttaagtcagtcttcgtttgccaagggttcttgctctcaggaggagcaaaatgatgtgactttgggatctcatttgcatgtgcatgaatctttgtgtccagatggttccactaatgatggcaatggtgcttctggtttacctgacattcatcaccgcttatgcacttctgacatggatcaagataaacacttgcaggaaggaatggatttggataaacacttgcagcatgaattctctcaaggaacggatttgcatcttgatgtagatgaagtgccaaacaactttgtgataaaaggtagccagtcatctaatgagcttgcagttcaatttcatgacacagagattatgaatagttcaaaaaatgatggagtgtctttggtaccacatgctataacaccatgtgttcccatcttacctagtgtttctggatgtgtgcataacataaatgtgatatacgaaatgggcataaaaaatgataattgtttccaatctgaaaagtgccaggatatttccattcaatcaggtgcatactcgtctgaagctgcaggcagctttttagcaccactttacccattgcagacatctgaaccagcaataatgatgggtggccctgtgtactatcagagttctgtaatgtcattaccaccaggctttatttcttctgatggtgcttctaatgcatctggtgtcaaatctgagacaagttactatcctgtttctcgccaaaatttggagattaaaacttgccacaatgcttctggtgatcctgaacaaaattcatatattagcagcgaagatgacagaaacaagacttctgaacctatgggcagaatatcagaatctgaaaagaaacagcaagttgatgttgaacaatcatgtttggagcctgcagcctgcattggaaaggaagcattatctagtcatggtgacaccatattaagtaaaaaggaggatgctggagctctatgctatgaacctccttgctttcggagttttgaatttccctttgtcagctgtgagcttgtaaactccagcgatctcccagaatatagtcctcttggcattcgagagttgatgaggacatccttgaacttccctaccccagtaagattgtggggctcccctactagggatggtagccctgatgctgtgctaaagaatgctgccaaaagattcatgtgcaccccgtccataatgaaaaaaaggcacagagatcttttatctccagtttctgatataagaactgacaagaaaccaaatactgaaagggattttatgagctcaggcatatcctctacaagagttgggaaatcttgcatggatagcgctgatgattcagctgatttagtttcaccgaaagagagtgcatttcaaaagaagctgaagctttgtcacgaaaacaaagaaaatttgaatgaaattgctgatcaaggagaaaatgaagccaatgcaaagcattcttcagggattcttactccgagcagtgttgacaaccataatacacataagcatggtccaaattttcgaattcaggagctaaataccactgtacaggctttgtctaactctaaagacataatattttctagatcaaagccatcagaacatgttgaaaaatctgcagcctgcattgatgcagattacgagtatttgaacatattggctgatactccaggtattaaaagaggcttagaatctccttctgcctggaagtctcctgtgttcacaccattccaggatgcatacttcatgagcccagcaagcagagcttttgatgccttaggattggtgaagcagattaatgagcagagtgcttctgctgtggaggaagcacatgaagttctggcaaatggaagcccatggaaacaacataacaaggaaaactctgacaaagaaaatatagaaaatacagctttgaagcatgagcatgtcacaagcaaacctccatcgatactcatggtagaggcacgggtgctcgatttcaatgaatgctccacacctgtgaggaagaaagacgataagaaagtggaaatagttttaggaggacctgcaacatcccctgttacttcctcgcatctttggataaatatgcggtagccctttgaggtgggtgggcgtggggatgcttcgcctatgctgttcagtatgtacatgtctgttattcccataatttccaccgttttgaaatacacattccaattagtactttattctttgtgcttggtaccctaaatgtcaattctaaatggaaatacatttttttgtagtgttaagatttgtaatgtgtcatttgattatgttaaatattaaacaaggcaatatatttaaattcagagtatattatgaaa

SEQ ID NO: 59277 - DNA, 2796 bp, Zea Mays
atggcggtagcgccggtggtgcgccagcagagccttacagagggattgatttcctgtaggactgatgttcaatgtttgcatagatggcagaaggttttgaaccctgagcttgttaaagggccttggtcgaaagaagaagatgagatcattactcagatggtaaataaacttgggccaaagaaatggtcgaccattgcccaagctcttcctggacgtattggaaagcaatgtcgggaaagatggcacaaccatcttaatcctgggatcaataaggacgcatggacacaagacgaggaaatcaggctcatccatgctcatcaaacttatggaaacaaatgggctgaattgacaaagtttttaccaggaaggacagacaatgcaattaaaaatcattggcacagctcggtgaagaagaaagttgattcatacagatcatctggtttactggctcaatcccagggcttcacacctgttgaatacactgctggtggtttaaatgttgattcttcatctgcaataaccaatcaaattagcgaaggcagtggttttaatgtttttcgggaggctgaagattcgatggagttaagtcagtcttcgtttgccaagggttcttgctctcaggaggagcaaaatgatgtgactttgggatctcatttgcatgtgcatgaatctttgtgtccagatggttccactaatgatggcaatggtgcttctggtttacctgacattcatcaccgcttatgcacttctgacatggatcaagataaacacttgcaggaaggaatggatttggataaacacttgcagcatgaattctctcaaggaacggatttgcatcttgatgtagatgaagtgccaaacaactttgtgataaaaggtagccagtcatctaatgagcttgcagttcaatttcatgacacagagattatgaatagttcaaaaaatgatggagtgtctttggtaccacatgctataacaccatgtgttcccatcttacctagtgtttctggatgtgtgcataacataaatgtgatatacgaaatgggcataaaaaatgataattgtttccaatctgaaaagtgccaggatatttccattcaatcaggtgcatactcgtctgaagctgcaggcagctttttagcaccactttacccattgcagacatctgaaccagcaataatgatgggtggccctgtgtactatcagagttctgtaatgtcattaccaccaggctttatttcttctgatggtgcttctaatgcatctggtgtcaaatctgagacaagttactatcctgtttctcgccaaaatttggagattaaaacttgccacaatgcttctggtgatcctgaacaaaattcatatattagcagcgaagatgacagaaacaagacttctgaacctatgggcagaatatcagaatctgaaaagaaacagcaagttgatgttgaacaatcatgtttggagcctgcagcctgcattggaaaggaagcattatctagtcatggtgacaccatattaagtaaaaaggaggatgctggagctctatgctatgaacctccttgctttcggagttttgaatttccctttgtcagctgtgagcttgtaaactccagcgatctcccagaatatagtcctcttggcattcgagagttgatgaggacatccttgaacttccctaccccagtaagattgtggggctcccctactagggatggtagccctgatgctgtgctaaagaatgctgccaaaagattcatgtgcaccccgtccataatgaaaaaaaggcacagagatcttttatctccagtttctgatataagaactgacaagaaaccaaatactgaaagggattttatgagctcaggcatatcctctacaagagttgggaaatcttgcatggatagcgctgatgattcagctgatttagtttcaccgaaagagagtgcatttcaaaagaagctgaagctttgtcacgaaaacaaagaaaatttgaatgaaattgctgatcaaggagaaaatgaagccaatgcaaagatcaaagccatcagaacatgttgaaaaatctgcagcctgcattgatgcagattacgagtatttgaacatattggctgatactccaggtattaaaagaggcttagaatctccttctgcctggaagtctcctgtgttcacaccattccaggatgcatacttcatgagcccagcaagcagagcttttgatgccttaggattggtgaagcagattaatgagcagagtgcttctgctgtggaggaagcacatgaagttctggcaaatggaagcccatggaaacaacataacaaggaaaactctgacaaagaaaatatagaaaatacagctttgaagcatgagcatgtcacaagcaaacctccatcgatactcatggtagaggcacgggtgctcgatttcaatgaatgctccacacctgtgaggaagaaagacgataagaaagtggaaatagttttaggaggacctgcaacatcccctgttacttcctcgcatctttggataaatatgcggtagccctttgaggtgggtgggcgtggggatgcttcgcctatgctgttcagtatgtacatgtctgttattcccataatttccaccgttttgaaatacacattccaattagtactttattctttgtgcttggtaccctaaatgtcaattctaaatggaaatacatttttttgtagtgttaagatttgtaatgtgtcatttgattatgttaaatattaaacaaggcaatatatttaaattcagagtatattatgaaa

SEQ ID NO: 59278 - DNA, 3003 bp, Zea Mays
atggcggtagcgccggtggtgcgccagcagagccttacagagggattgatttcctgtaggactgatgttcaatgtttgcatagatggcagaaggttttgaaccctgagcttgttaaagggccttggtcgaaagaaataactactgatgtgaaacatttcgatgtgacatcttcatttagatggcacaaccatcttaatcctgggatcaataaggacgcatggacacaagacgaggaaatcaggctcatccatgctcatcaaacttatggaaacaaatgggctgaattgacaaagtttttaccaggaagacaatgcaattaaaaatcattggcacagctcggtgaagaagaaagttgattcatacagatcatctggtttactggctcaatcccagggcttcacacctgttgaatacactgctggtggtttaaatgttgattcttcatctgcaataaccaatcaaattagcgaaggcagtggttttaatgtttttcgggaggctgaagattcgatggagttaagtcagtcttcgtttgccaagggttcttgctctcaggaggagcaaaatgatgtgactttgggatctcatttgcatgtgcatgaatctttgtgtccagatggttccactaatgatggcaatggtgcttctggtttacctgacattcatcaccgcttatgcacttctgacatggatcaagataaacacttgcaggaaggaatggatttggataaacacttgcagcatgaattctctcaaggaacggatttgcatcttgatgtagatgaagtgccaaacaactttgtgataaaaggtagccagtcatctaatgagcttgcagttcaatttcatgacacagagattatgaatagttcaaaaaatgatggagtgtctttggtaccacatgctataacaccatgtgttcccatcttacctagtgtttctggatgtgtgcataacataaatgtgatatacgaaatgggcataaaaaatgataattgtttccaatctgaaaagtgccaggatatttccattcaatcaggtgcatactcgtctgaagctgcaggcagctttttagcaccactttacccattgcagacatctgaaccagcaataatgatgggtggccctgtgtactatcagagttctgtaatgtcattaccaccaggctttatttcttctgatggtgcttctaatgcatctggtgtcaaatctgagacaagttactatcctgtttctcgccaaaatttggagattaaaacttgccacaatgcttctggtgatcctgaacaaaattcatatattagcagcgaagatgacagaaacaagacttctgaacctatgggcagaatatcagaatctgaaaagaaacagcaagttgatgttgaacaatcatgtttggagcctgcagcctgcattggaaaggaagcattatctagtcatggtgacaccatattaagtaaaaaggaggatgctggagctctatgctatgaacctccttgctttcggagttttgaatttccctttgtcagctgtgagcttgtaaactccagcgatctcccagaatatagtcctcttggcattcgagagttgatgaggacatccttgaacttccctaccccagtaagattgtggggctcccctactagggatggtagccctgatgctgtgctaaagaatgctgccaaaagattcatgtgcaccccgtccataatgaaaaaaaggcacagagatcttttatctccagtttctgatataagaactgacaagaaaccaaatactgaaagggattttatgagctcaggcatatcctctacaagagttgggaaatcttgcatggatagcgctgatgattcagctgatttagtttcaccgaaagagagtgcatttcaaaagaagctgaagctttgtcacgaaaacaaagaaaatttgaatgaaattgctgatcaaggagaaaatgaagccaatgcaaagcattcttcagggattcttactccgagcagtgttgacaaccataatacacataagcatggtccaaattttcgaattcaggagctaaataccactgtacaggctttgtctaactctaaagacataatattttctagatcaaagccatcagaacatgttgaaaaatctgcagcctgcattgatgcagattacgagtatttgaacatattggctgatactccaggtattaaaagaggcttagaatctccttctgcctggaagtctcctgtgttcacaccattccaggatgcatacttcatgagcccagcaagcagagcttttgatgccttaggattggtgaagcagattaatgagcagagtgcttctgctgtggaggaagcacatgaagttctggcaaatggaagcccatggaaacaacataacaaggaaaactctgacaaagaaaatatagaaaatacagctttgaagcatgagcatgtcacaagcaaacctccatcgatactcatggtagaggcacgggtgctcgatttcaatgaatgctccacacctgtgaggaagaaagacgataagaaagtggaaatagttttaggaggacctgcaacatcccctgttacttcctcgcatctttggataaatatgcggtagccctttgaggttgcgacatcgcctggcgctggttgcaagtcaccatgggcagcatgccgatgccgcgccgacgctcccttccccagtccctatcgccacgccggtgtcaccaccgtccgttgggattagggttgcgtgtgcgtcatgtcgcacgtcaggcgtgcagagaggcaacaaccctccaatcaggctaaagattgttgggtccgatgggccacatgatagagaaagaggctggttgatatgaaattttggtccaaatagctataaaacattgttgttttttatgtttttacaatattttagtgtgtatacattgcatatacatgtttacataatttgtttcaccaaaaataattggtattcaaatgaatacctttgattcaata

SEQ ID NO: 59279 - DNA, 3068 bp, Zea Mays
atggcggtagcgccggtggtgcgccagcagagccttacagagggattgatttcctgtaggactgatgttcaatgtttgcatagatggcagaaggttttgaaccctgagcttgttaaagggccttggtcgaaagaagaagatgagatcattactcagatggtaaataaacttgggccaaagaaatggtcgaccattgcccaagctcttcctggacgtattggaaagcaatgtcgggaaagatggcacaaccatcttaatcctgggatcaataaggacgcatggacacaagacgaggaaatcaggctcatccatgctcatcaaacttatggaaacaaatgggctgaattgacaaagtttttaccaggaaggacagacaatgcaattaaaaatcattggcacagctcggtgaagaagaaagttgattcatacagatcatctggtttactggctcaatcccagggcttcacacctgttgaatacactgctggtggtttaaatgttgattcttcatctgcaataaccaatcaaattagcgaaggcagtggttttaatgtttttcgggaggctgaagattcgatggagttaagtcagtcttcgtttgccaagggttcttgctctcaggaggagcaaaatgatgtgactttgggatctcatttgcatgtgcatgaatctttgtgtccagatggttccactaatgatggcaatggtgcttctggtttacctgacattcatcaccgcttatgcacttctgacatggatcaagataaacacttgcaggaaggaatggatttggataaacacttgcagcatgaattctctcaaggaacggatttgcatcttgatgtagatgaagtgccaaacaactttgtgataaaaggtagccagtcatctaatgagcttgcagttcaatttcatgacacagagattatgaatagttcaaaaaatgatggagtgtctttggtaccacatgctataacaccatgtgttcccatcttacctagtgtttctggatgtgtgcataacataaatgtgatatacgaaatgggcataaaaaatgataattgtttccaatctgaaaagtgccaggatatttccattcaatcaggtgcatactcgtctgaagctgcaggcagctttttagcaccactttacccattgcagacatctgaaccagcaataatgatgggtggccctgtgtactatcagagttctgtaatgtcattaccaccaggctttatttcttctgatggtgcttctaatgcatctggtgtcaaatctgagacaagttactatcctgtttctcgccaaaatttggagattaaaacttgccacaatgcttctggtgatcctgaacaaaattcatatattagcagcgaagatgacagaaacaagacttctgaacctatgggcagaatatcagaatctgaaaagaaacagcaagttgatgttgaacaatcatgtttggagcctgcagcctgcattggaaaggaagcattatctagtcatggtgacaccatattaagtaaaaaggaggatgctggagctctatgctatgaacctccttgctttcggagttttgaatttccctttgtcagctgtgagcttgtaaactccagcgatctcccagaatatagtcctcttggcattcgagagttgatgaggacatccttgaacttccctaccccagtaagattgtggggctcccctactagggatggtagccctgatgctgtgctaaagaatgctgccaaaagattcatgtgcaccccgtccataatgaaaaaaaggcacagagatcttttatctccagtttctgatataagaactgacaagaaaccaaatactgaaagggattttatgagctcaggcatatcctctacaagagttgggaaatcttgcatggatagcgctgatgattcagctgatttagtttcaccgaaagagagtgcatttcaaaagaagctgaagctttgtcacgaaaacaaagaaaatttgaatgaaattgctgatcaaggagaaaatgaagccaatgcaaagcattcttcagggattcttactccgagcagtgttgacaaccataatacacataagcatggtccaaattttcgaattcaggagctaaataccactgtacaggctttgtctaactctaaagacataatattttctagatcaaagccatcagaacatgttgaaaaatctgcagcctgcattgatgcagattacgagtatttgaacatattggctgatactccaggtattaaaagaggcttagaatctccttctgcctggaagtctcctgtgttcacaccattccaggatgcatacttcatgagcccagcaagcagagcttttgatgccttaggattggtgaagcagattaatgagcagagtgcttctgctgtggaggaagcacatgaagttctggcaaatggaagcccatggaaacaacataacaaggaaaactctgacaaagaaaatatagaaaatacagctttgaagcatgagcatgtcacaagcaaacctccatcgatactcatggtagaggcacgggtgctcgatttcaatgaatgctccacacctgtgaggaagaaagacgataagaaagtggaaatagttttaggaggacctgcaacatcccctgttacttcctcgcatctttggataaatatgcggtagccctttgaggttgcgacatcgcctggcgctggttgcaagtcaccatgggcagcatgccgatgccgcgccgacgctcccttccccagtccctatcgccacgccggtgtcaccaccgtccgttgggattagggttgcgtgtgcgtcatgtcgcacgtcaggcgtgcagagaggcaacaaccctccaatcaggctaaagattgttgggtccgatgggccacatgatagagaaagaggctggttgatatgaaattttggtccaaatagctataaaacattgttgttttttatgtttttacaatattttagtgtgtatacattgcatatacatgtttacataatttgtttcaccaaaaataattggtattcaaatgaatacctttgattcaata

SEQ ID NO: 59280 - DNA, 2861 bp, Zea Mays
atggcggtagcgccggtggtgcgccagcagagccttacagagggattgatttcctgtaggactgatgttcaatgtttgcatagatggcagaaggttttgaaccctgagcttgttaaagggccttggtcgaaagaaataactactgatgtgaaacatttcgatgtgacatcttcatttagatggcacaaccatcttaatcctgggatcaataaggacgcatggacacaagacgaggaaatcaggctcatccatgctcatcaaacttatggaaacaaatgggctgaattgacaaagtttttaccaggaaggacagacaatgcaattaaaaatcattggcacagctcggtgaagaagaaagttgattcatacagatcatctggtttactggctcaatcccagggcttcacacctgttgaatacactgctggtggtttaaatgttgattcttcatctgcaataaccaatcaaattagcgaaggcagtggttttaatgtttttcgggaggctgaagattcgatggagttaagtcagtcttcgtttgccaagggttcttgctctcaggaggagcaaaatgatgtgactttgggatctcatttgcatgtgcatgaatctttgtgtccagatggttccactaatgatggcaatggtgcttctggtttacctgacattcatcaccgcttatgcacttctgacatggatcaagataaacacttgcaggaaggaatggatttggataaacacttgcagcatgaattctctcaaggaacggatttgcatcttgatgtagatgaagtgccaaacaactttgtgataaaaggtagccagtcatctaatgagcttgcagttcaatttcatgacacagagattatgaatagttcaaaaaatgatggagtgtctttggtaccacatgctataacaccatgtgttcccatcttacctagtgtttctggatgtgtgcataacataaatgtgatatacgaaatgggcataaaaaatgataattgtttccaatctgaaaagtgccaggatatttccattcaatcaggtgcatactcgtctgaagctgcaggcagctttttagcaccactttacccattgcagacatctgaaccagcaataatgatgggtggccctgtgtactatcagagttctgtaatgtcattaccaccaggctttatttcttctgatggtgcttctaatgcatctggtgtcaaatctgagacaagttactatcctgtttctcgccaaaatttggagattaaaacttgccacaatgcttctggtgatcctgaacaaaattcatatattagcagcgaagatgacagaaacaagacttctgaacctatgggcagaatatcagaatctgaaaagaaacagcaagttgatgttgaacaatcatgtttggagcctgcagcctgcattggaaaggaagcattatctagtcatggtgacaccatattaagtaaaaaggaggatgctggagctctatgctatgaacctccttgctttcggagttttgaatttccctttgtcagctgtgagcttgtaaactccagcgatctcccagaatatagtcctcttggcattcgagagttgatgaggacatccttgaacttccctaccccagtaagattgtggggctcccctactagggatggtagccctgatgctgtgctaaagaatgctgccaaaagattcatgtgcaccccgtccataatgaaaaaaaggcacagagatcttttatctccagtttctgatataagaactgacaagaaaccaaatactgaaagggattttatgagctcaggcatatcctctacaagagttgggaaatcttgcatggatagcgctgatgattcagctgatttagtttcaccgaaagagagtgcatttcaaaagaagctgaagctttgtcacgaaaacaaagaaaatttgaatgaaattgctgatcaaggagaaaatgaagccaatgcaaagcattcttcagggattcttactccgagcagtgttgacaaccataatacacataagcatggtccaaattttcgaattcaggagctaaataccactgtacaggctttgtctaactctaaagacataatattttctagatcaaagccatcagaacatgttgaaaaatctgcagcctgcattgatgcagattacgagtatttgaacatattggctgatactccaggtattaaaagaggcttagaatctccttctgcctggaagtctcctgtgttcacaccattccaggatgcatacttcatgagcccagcaagcagagcttttgatgccttaggattggtgaagcagattaatgagcagagtgcttctgctgtggaggaagcacatgaagttctggcaaatggaagcccatggaaacaacataacaaggaaaactctgacaaagaaaatatagaaaatacagctttgaagcatgagcatgtcacaagcaaacctccatcgatactcatggttgcgacatcgcctggcgctggttgcaagtcaccatgggcagcatgccgatgccgcgccgacgctcccttccccagtccctatcgccacgccggtgtcaccaccgtccgttgggattagggttgcgtgtgcgtcatgtcgcacgtcaggcgtgcagagaggcaacaaccctccaatcaggctaaagattgttgggtccgatgggccacatgatagagaaagaggctggttgatatgaaattttggtccaaatagctataaaacattgttgttttttatgtttttacaatattttagtgtgtatacattgcatatacatgtttacataatttgtttcaccaaaaataattggtattcaaatgaatacctttgattcaata

SEQ ID NO: 59281 - DNA, 3008 bp, Zea Mays
atggcggtagcgccggtggtgcgccagcagagccttacagagggattgatttcctgtaggactgatgttcaatgtttgcatagatggcagaaggttttgaaccctgagcttgttaaagggccttggtcgaaagaaataactactgatgtgaaacatttcgatgtgacatcttcatttagatggcacaaccatcttaatcctgggatcaataaggacgcatggacacaagacgaggaaatcaggctcatccatgctcatcaaacttatggaaacaaatgggctgaattgacaaagtttttaccaggaaggacagacaatgcaattaaaaatcattggcacagctcggtgaagaagaaagttgattcatacagatcatctggtttactggctcaatcccagggcttcacacctgttgaatacactgctggtggtttaaatgttgattcttcatctgcaataaccaatcaaattagcgaaggcagtggttttaatgtttttcgggaggctgaagattcgatggagttaagtcagtcttcgtttgccaagggttcttgctctcaggaggagcaaaatgatgtgactttgggatctcatttgcatgtgcatgaatctttgtgtccagatggttccactaatgatggcaatggtgcttctggtttacctgacattcatcaccgcttatgcacttctgacatggatcaagataaacacttgcaggaaggaatggatttggataaacacttgcagcatgaattctctcaaggaacggatttgcatcttgatgtagatgaagtgccaaacaactttgtgataaaaggtagccagtcatctaatgagcttgcagttcaatttcatgacacagagattatgaatagttcaaaaaatgatggagtgtctttggtaccacatgctataacaccatgtgttcccatcttacctagtgtttctggatgtgtgcataacataaatgtgatatacgaaatgggcataaaaaatgataattgtttccaatctgaaaagtgccaggatatttccattcaatcaggtgcatactcgtctgaagctgcaggcagctttttagcaccactttacccattgcagacatctgaaccagcaataatgatgggtggccctgtgtactatcagagttctgtaatgtcattaccaccaggctttatttcttctgatggtgcttctaatgcatctggtgtcaaatctgagacaagttactatcctgtttctcgccaaaatttggagattaaaacttgccacaatgcttctggtgatcctgaacaaaattcatatattagcagcgaagatgacagaaacaagacttctgaacctatgggcagaatatcagaatctgaaaagaaacagcaagttgatgttgaacaatcatgtttggagcctgcagcctgcattggaaaggaagcattatctagtcatggtgacaccatattaagtaaaaaggaggatgctggagctctatgctatgaacctccttgctttcggagttttgaatttccctttgtcagctgtgagcttgtaaactccagcgatctcccagaatatagtcctcttggcattcgagagttgatgaggacatccttgaacttccctaccccagtaagattgtggggctcccctactagggatggtagccctgatgctgtgctaaagaatgctgccaaaagattcatgtgcaccccgtccataatgaaaaaaaggcacagagatcttttatctccagtttctgatataagaactgacaagaaaccaaatactgaaagggattttatgagctcaggcatatcctctacaagagttgggaaatcttgcatggatagcgctgatgattcagctgatttagtttcaccgaaagagagtgcatttcaaaagaagctgaagctttgtcacgaaaacaaagaaaatttgaatgaaattgctgatcaaggagaaaatgaagccaatgcaaagcattcttcagggattcttactccgagcagtgttgacaaccataatacacataagcatggtccaaattttcgaattcaggagctaaataccactgtacaggctttgtctaactctaaagacataatattttctagatcaaagccatcagaacatgttgaaaaatctgcagcctgcattgatgcagattacgagtatttgaacatattggctgatactccaggtattaaaagaggcttagaatctccttctgcctggaagtctcctgtgttcacaccattccaggatgcatacttcatgagcccagcaagcagagcttttgatgccttaggattggtgaagcagattaatgagcagagtgcttctgctgtggaggaagcacatgaagttctggcaaatggaagcccatggaaacaacataacaaggaaaactctgacaaagaaaatatagaaaatacagctttgaagcatgagcatgtcacaagcaaacctccatcgatactcatggtagaggcacgggtgctcgatttcaatgaatgctccacacctgtgaggaagaaagacgataagaaagtggaaatagttttaggaggacctgcaacatcccctgttacttcctcgcatctttggataaatatgcggtagccctttgaggttgcgacatcgcctggcgctggttgcaagtcaccatgggcagcatgccgatgccgcgccgacgctcccttccccagtccctatcgccacgccggtgtcaccaccgtccgttgggattagggttgcgtgtgcgtcatgtcgcacgtcaggcgtgcagagaggcaacaaccctccaatcaggctaaagattgttgggtccgatgggccacatgatagagaaagaggctggttgatatgaaattttggtccaaatagctataaaacattgttgttttttatgtttttacaatattttagtgtgtatacattgcatatacatgtttacataatttgtttcaccaaaaataattggtattcaaatgaatacctttgattcaata

SEQ ID NO: 59282 - DNA, 2536 bp, Zea Mays
atggcggtagcgccggtggtgcgccagcagagccttacagagggattgatttcctgtaggactgatgttcaatgtttgcatagatggcagaaggttttgaaccctgagcttgttaaagggccttggtcgaaagaaataactactgatgtgaaacatttcgatgtgacatcttcatttagatggcacaaccatcttaatcctgggatcaataaggacgcatggacacaagacgaggaaatcaggctcatccatgctcatcaaacttatggaaacaaatgggctgaattgacaaagtttttaccaggaaggacagacaatgcaattaaaaatcattggcacagctcggtgaagaagaaagttgattcatacagatcatctggtttactggctcaatcccagggcttcacacctgttgaatacactgctggtggtttaaatgttgattcttcatctgcaataaccaatcaaattagcgaaggcagtggttttaatgtttttcgggaggctgaagattcgatggagttaagtcagtcttcgtttgccaagggttcttgctctcaggaggagcaaaatgatgtgactttgggatctcatttgcatgtgcatgaatctttgtgtccagatggttccactaatgatggcaatggtgcttctggtttacctgacattcatcaccgcttatgcacttctgacatggatcaagataaacacttgcaggaaggaatggatttggataaacacttgcagcatgaattctctcaaggaacggatttgcatcttgatgtagatgaagtgccaaacaactttgtgataaaaggtagccagtcatctaatgagcttgcagttcaatttcatgacacagagattatgaatagttcaaaaaatgatggagtgtctttggtaccacatgctataacaccatgtgttcccatcttacctagtgtttctggatgtgtgcataacataaatgtgatatacgaaatgggcataaaaaatgataattgtttccaatctgaaaagtgccaggatatttccattcaatcaggtgcatactcgtctgaagctgcaggcagctttttagcaccactttacccattgcagacatctgaaccagcaataatgatgggtggccctgtgtactatcagagttctgtaatgtcattaccaccaggctttatttcttctgatggtgcttctaatgcatctggtgtcaaatctgagacaagttactatcctgtttctcgccaaaatttggagattaaaacttgccacaatgcttctggtgatcctgaacaaaattcatatattagcagcgaagatgacagaaacaagacttctgaacctatgggcagaatatcagaatctgaaaagaaacagcaagttgatgttgaacaatcatgtttggagcctgcagcctgcattggaaaggaagcattatctagtcatggtgacaccatattaagtaaaaaggaggatgctggagctctatgctatgaacctccttgctttcggagttttgaatttccctttgtcagctgtgagcttgtaaactccagcgatctcccagaatatagtcctcttggcattcgagagttgatgaggacatccttgaacttccctaccccagtaagattgtggggctcccctactagggatggtagccctgatgctgtgctaaagaatgctgccaaaagattcatgtgcaccccgtccataatgaaaaaaaggcacagagatcttttatctccagtttctgatataagaactgacaagaaaccaaatactgaaagggattttatgagctcaggcatatcctctacaagagttgggaaatcttgcatggatagcgctgatgattcagctgatttagtttcaccgaaagagagtgcatttcaaaagaagctgaagctttgtcacgaaaacaaagaaaatttgaatgaaattgctgatcaaggagaaaatgaagccaatgcaaagcattcttcagggattcttactccgagcagtgttgacaaccataatacacataagcatggtccaaattttcgaattcaggagctaaataccactgtacaggctttgtctaactctaaagacataatattttctagatcaaagccatcagaacatgttgaaaaatctgcagcctgcattgatgcagattacgagtatttgaacatattggctgatactccaggtattaaaagaggcttagaatctccttctgcctggaagtctcctgtgttcacaccattccaggatgcatacttcatgagcccagcaagcagagcttttgatgccttaggattggtgaagcagattaatgagcagagtgcttctgctgtggaggaagcacatgaagttctggcaaatggaagcccatggaaacaacataacaaggaaaactctgacaaagaaaatatagaaaatacagctttgaagcatgagcatgtcacaagcaaacctccatcgatactcatggatgacgaagccgaagagcaagatgacgaagctgaagagtaagatgacgaagtcg

SEQ ID NO: 59283 - DNA, 2530 bp, Zea Mays
atggcggtagcgccggtggtgcgccagcagagccttacagagggattgatttcctgtaggactgatgttcaatgtttgcatagatggcagaaggttttgaaccctgagcttgttaaagggccttggtcgaaagaaataactactgatgtgaaacatttcgatgtgacatcttcatttagatggcacaaccatcttaatcctgggatcaataaggacgcatggacacaagacgaggaaatcaggctcatccatgctcatcaaacttatggaaacaaatgggctgaattgacaaagtttttaccaggaaggacagacaatgcaattaaaaatcattggcacagctcggtgaagaagaaagttgattcatacagatcatctggtttactggctcaatcccagggcttcacacctgttgaatacactgctggtggtttaaatgttgattcttcatctgcaataaccaatcaaattagcgaaggcagtggttttaatgtttttcgggaggctgaagattcgatggagttaagtcagtcttcgtttgccaagggttcttgctctcaggaggagcaaaatgatgtgactttgggatctcatttgcatgtgcatgaatctttgtgtccagatggttccactaatgatggcaatggtgcttctggtttacctgacattcatcaccgcttatgcacttctgacatggatcaagataaacacttgcaggaaggaatggatttggataaacacttgcagcatgaattctctcaaggaacggatttgcatcttgatgtagatgaagtgccaaacaactttgtgataaaaggtagccagtcatctaatgagcttgcagttcaatttcatgacacagagattatgaatagttcaaaaaatgatggagtgtctttggtaccacatgctataacaccatgtgttcccatcttacctagtgtttctggatgtgtgcataacataaatgtgatatacgaaatgggcataaaaaatgataattgtttccaatctgaaaagtgccaggatatttccattcaatcaggtgcatactcgtctgaagctgcaggcagctttttagcaccactttacccattgcagacatctgaaccagcaataatgatgggtggccctgtgtactatcagagttctgtaatgtcattaccaccaggctttatttcttctgatggtgcttctaatgcatctggtgtcaaatctgagacaagttactatcctgtttctcgccaaaatttggagattaaaacttgccacaatgcttctggtgatcctgaacaaaattcatatattagcagcgaagatgacagaaacaagacttctgaacctatgggcagaatatcagaatctgaaaagaaacagcaagttgatgttgaacaatcatgtttggagcctgcagcctgcattggaaaggaagcattatctagtcatggtgacaccatattaagtaaaaaggaggatgctggagctctatgctatgaacctccttgctttcggagttttgaatttccctttgtcagctgtgagcttgtaaactccagcgatctcccagaatatagtcctcttggcattcgagagttgatgaggacatccttgaacttccctaccccagtaagattgtggggctcccctactagggatggtagccctgatgctgtgctaaagaatgctgccaaaagattcatgtgcaccccgtccataatgaaaaaaaggcacagagatcttttatctccagtttctgatataagaactgacaagaaaccaaatactgaaagggattttatgagctcaggcatatcctctacaagagttgggaaatcttgcatggatagcgctgatgattcagctgatttagtttcaccgaaagagagtgcatttcaaaagaagctgaagctttgtcacgaaaacaaagaaaatttgaatgaaattgctgatcaaggagaaaatgaagccaatgcaaagggattcttactccgagcagtgttgacaaccataatacacataagcatggtccaaattttcgaattcaggagctaaataccactgtacaggctttgtctaactctaaagacataatattttctagatcaaagccatcagaacatgttgaaaaatctgcagcctgcattgatgcagattacgagtatttgaacatattggctgatactccaggtattaaaagaggcttagaatctccttctgcctggaagtctcctgtgttcacaccattccaggatgcatacttcatgagcccagcaagcagagcttttgatgccttaggattggtgaagcagattaatgagcagagtgcttctgctgtggaggaagcacatgaagttctggcaaatggaagcccatggaaacaacataacaaggaaaactctgacaaagaaaatatagaaaatacagctttgaagcatgagcatgtcacaagcaaacctccatcgatactcatgacgagcaagtaattgaggactccggtactcagcaggtggaaaactctgagtaggagctt

SEQ ID NO: 59284 - DNA, 2818 bp, Zea Mays
ctcctgatggaggagtcagcaaggaacctcaaaaaggggggagattatccaatgggaggacaactggtccagcacgccgctcatccaagggcaactggactctagaagaggatgacatacttcgcaaagctgttgaaacctacaagggaaaaaattggaaaaagatagctgaatgttttccaggtaggactgatgttcaatgtttgcatagatggcagaaggttttgaaccctgagcttgttaaagggccttggtcgaaagaagaagatgagatcattactcagatggtaaataaacttgggccaaagaaatggtcgaccattgcccaagctcttcctggacgtattggaaagcaatgtcgggaaagatggcacaaccatcttaatcctgggatcaataaggacgcatggacacaagacgaggaaatcaggctcatccatgctcatcaaacttatggaaacaaatgggctgaattgacaaagtttttaccaggaagacaatgcaattaaaaatcattggcacagctcggtgaagaagaaagttgattcatacagatcatctggtttactggctcaatcccagggcttcacacctgttgaatacactgctggtggtttaaatgttgattcttcatctgcaataaccaatcaaattagcgaaggcagtggttttaatgtttttcgggaggctgaagattcgatggagttaagtcagtcttcgtttgccaagggttcttgctctcaggaggagcaaaatgatgtgactttgggatctcatttgcatgtgcatgaatctttgtgtccagatggttccactaatgatggcaatggtgcttctggtttacctgacattcatcaccgcttatgcacttctgacatggatcaagataaacacttgcaggaaggaatggatttggataaacacttgcagcatgaattctctcaaggaacggatttgcatcttgatgtagatgaagtgccaaacaactttgtgataaaaggtagccagtcatctaatgagcttgcagttcaatttcatgacacagagattatgaatagttcaaaaaatgatggagtgtctttggtaccacatgctataacaccatgtgttcccatcttacctagtgtttctggatgtgtgcataacataaatgtgatatacgaaatgggcataaaaaatgataattgtttccaatctgaaaagtgccaggatatttccattcaatcaggtgcatactcgtctgaagctgcaggcagctttttagcaccactttacccattgcagacatctgaaccagcaataatgatgggtggccctgtgtactatcagagttctgtaatgtcattaccaccaggctttatttcttctgatggtgcttctaatgcatctggtgtcaaatctgagacaagttactatcctgtttctcgccaaaatttggagattaaaacttgccacaatgcttctggtgatcctgaacaaaattcatatattagcagcgaagatgacagaaacaagacttctgaacctatgggcagaatatcagaatctgaaaagaaacagcaagttgatgttgaacaatcatgtttggagcctgcagcctgcattggaaaggaagcattatctagtcatggtgacaccatattaagtaaaaaggaggatgctggagctctatgctatgaacctccttgctttcggagttttgaatttccctttgtcagctgtgagcttgtaaactccagcgatctcccagaatatagtcctcttggcattcgagagttgatgaggacatccttgaacttccctaccccagtaagattgtggggctcccctactagggatggtagccctgatgctgtgctaaagaatgctgccaaaagattcatgtgcaccccgtccataatgaaaaaaaggcacagagatcttttatctccagtttctgatataagaactgacaagaaaccaaatactgaaagggattttatgagctcaggcatatcctctacaagagttgggaaatcttgcatggatagcgctgatgattcagctgatttagtttcaccgaaagagagtgcatttcaaaagaagctgaagctttgtcacgaaaacaaagaaaatttgaatgaaattgctgatcaaggagaaaatgaagccaatgcaaagcattcttcagggattcttactccgagcagtgttgacaaccataatacacataagcatggtccaaattttcgaattcaggagctaaataccactgtacaggctttgtctaactctaaagacataatattttctagatcaaagccatcagaacatgttgaaaaatctgcagcctgcattgatgcagattacgagtatttgaacatattggctgatactccaggtattaaaagaggcttagaatctccttctgcctggaagtctcctgtgttcacaccattccaggatgcatacttcatgagcccagcaagcagagcttttgatgccttaggattggtgaagcagattaatgagcagagtgcttctgctgtggaggaagcacatgaagttctggcaaatggaagcccatggaaacaacataacaaggaaaactctgacaaagaaaatatagaaaatacagctttgaagcatgagcatgtcacaagcaaacctccatcgatactcatgcctagttccagtctccggctgttagaaataagcaacaaggattatggatgctaatgcaaattctcagtggcaaactggcaataatctaagcctatcagtagacatcagttttgcatggaacatcaaattctagtggacatatcaattagatcag

SEQ ID NO: 59285 - DNA, 3103 bp, Zea Mays
gggcaactggactctagaagaggatgacatacttcgcaaagctgttgaaacctacaagggaaaaaattggaaaaagatagctgaatgttttccaggtaggactgatgttcaatgtttgcatagatggcagaaggttttgaaccctgagcttgttaaagggccttggtcgaaagaagaagatgagatcattactcagatggtaaataaacttgggccaaagaaatggtcgaccattgcccaagctcttcctggacgtattggaaagcaatgtcgggaaagatggcacaaccatcttaatcctgggatcaataaggacgcatggacacaagacgaggaaatcaggctcatccatgctcatcaaacttatggaaacaaatgggctgaattgacaaagtttttaccaggaagacaatgcaattaaaaatcattggcacagctcggtgaagaagaaagttgattcatacagatcatctggtttactggctcaatcccagggcttcacacctgttgaatacactgctggtggtttaaatgttgattcttcatctgcaataaccaatcaaattagcgaaggcagtggttttaatgtttttcgggaggctgaagattcgatggagttaagtcagtcttcgtttgccaagggttcttgctctcaggaggagcaaaatgatgtgactttgggatctcatttgcatgtgcatgaatctttgtgtccagatggttccactaatgatggcaatggtgcttctggtttacctgacattcatcaccgcttatgcacttctgacatggatcaagataaacacttgcaggaaggaatggatttggataaacacttgcagcatgaattctctcaaggaacggatttgcatcttgatgtagatgaagtgccaaacaactttgtgataaaaggtagccagtcatctaatgagcttgcagttcaatttcatgacacagagattatgaatagttcaaaaaatgatggagtgtctttggtaccacatgctataacaccatgtgttcccatcttacctagtgtttctggatgtgtgcataacataaatgtgatatacgaaatgggcataaaaaatgataattgtttccaatctgaaaagtgccaggatatttccattcaatcaggtgcatactcgtctgaagctgcaggcagctttttagcaccactttacccattgcagacatctgaaccagcaataatgatgggtggccctgtgtactatcagagttctgtaatgtcattaccaccaggctttatttcttctgatggtgcttctaatgcatctggtgtcaaatctgagacaagttactatcctgtttctcgccaaaatttggagattaaaacttgccacaatgcttctggtgatcctgaacaaaattcatatattagcagcgaagatgacagaaacaagacttctgaacctatgggcagaatatcagaatctgaaaagaaacagcaagttgatgttgaacaatcatgtttggagcctgcagcctgcattggaaaggaagcattatctagtcatggtgacaccatattaagtaaaaaggaggatgctggagctctatgctatgaacctccttgctttcggagttttgaatttccctttgtcagctgtgagcttgtaaactccagcgatctcccagaatatagtcctcttggcattcgagagttgatgaggacatccttgaacttccctaccccagtaagattgtggggctcccctactagggatggtagccctgatgctgtgctaaagaatgctgccaaaagattcatgtgcaccccgtccataatgaaaaaaaggcacagagatcttttatctccagtttctgatataagaactgacaagaaaccaaatactgaaagggattttatgagctcaggcatatcctctacaagagttgggaaatcttgcatggatagcgctgatgattcagctgatttagtttcaccgaaagagagtgcatttcaaaagaagctgaagctttgtcacgaaaacaaagaaaatttgaatgaaattgctgatcaaggagaaaatgaagccaatgcaaagcattcttcagggattcttactccgagcagtgttgacaaccataatacacataagcatggtccaaattttcgaattcaggagctaaataccactgtacaggctttgtctaactctaaagacataatattttctagatcaaagccatcagaacatgttgaaaaatctgcagcctgcattgatgcagattacgagtatttgaacatattggctgatactccaggtattaaaagaggcttagaatctccttctgcctggaagtctcctgtgttcacaccattccaggatgcatacttcatgagcccagcaagcagagcttttgatgccttaggattggtgaagcagattaatgagcagagtgcttctgctgtggaggaagcacatgaagttctggcaaatggaagcccatggaaacaacataacaaggaaaactctgacaaagaaaatatagaaaatacagctttgaagcatgagcatgtcacaagcaaacctccatcgatactcatggtagaggcacgggtgctcgatttcaatgaatgctccacacctgtgaggaagaaagacgataagaaagtggaaatagttttaggaggacctgcaacatcccctgttacttcctcgcatctttggataaatatgcggtagccctttgaggttgcgacatcgcctggcgctggttgcaagtcaccatgggcagcatgccgatgccgcgccgacgctcccttccccagtccctatcgccacgccggtgtcaccaccgtccgttgggattagggttgcgtgtgcgtcatgtcgcacgtcaggcgtgcagagaggcaacaaccctccaatcaggctaaagattgttgggtccgatgggccacatgatagagaaagaggctggttgatatgaaattttggtccaaatagctataaaacattgttgttttttatgtttttacaatattttagtgtgtatacattgcatatacatgtttacataatttgtttcaccaaaaataattggtattcaaatgaatacctttgattcaata

SEQ ID NO: 59286 - DNA, 2964 bp, Zea Mays
ggcaactggactctagaagaggatgacatacttcgcaaagctgttgaaacctacaagggaaaaaattggaaaaagatagctgaatgttttccaggtaggactgatgttcaatgtttgcatagatggcagaaggttttgaaccctgagcttgttaaagggccttggtcgaaagaagaagatgagatcattactcagatggtaaataaacttgggccaaagaaatggtcgaccattgcccaagctcttcctggacgtattggaaagcaatgtcgggaaagatggcacaaccatcttaatcctgggatcaataaggacgcatggacacaagacgaggaaatcaggctcatccatgctcatcaaacttatggaaacaaatgggctgaattgacaaagtttttaccaggaagacaatgcaattaaaaatcattggcacagctcggtgaagaagaaagttgattcatacagatcatctggtttactggctcaatcccagggcttcacacctgttgaatacactgctggtggtttaaatgttgattcttcatctgcaataaccaatcaaattagcgaaggcagtggttttaatgtttttcgggaggctgaagattcgatggagttaagtcagtcttcgtttgccaagggttcttgctctcaggaggagcaaaatgatgtgactttgggatctcatttgcatgtgcatgaatctttgtgtccagatggttccactaatgatggcaatggtgcttctggtttacctgacattcatcaccgcttatgcacttctgacatggatcaagataaacacttgcaggaaggaatggatttggataaacacttgcagcatgaattctctcaaggaacggatttgcatcttgatgtagatgaagtgccaaacaactttgtgataaaaggtagccagtcatctaatgagcttgcagttcaatttcatgacacagagattatgaatagttcaaaaaatgatggagtgtctttggtaccacatgctataacaccatgtgttcccatcttacctagtgtttctggatgtgtgcataacataaatgtgatatacgaaatgggcataaaaaatgataattgtttccaatctgaaaagtgccaggatatttccattcaatcaggtgcatactcgtctgaagctgcaggcagctttttagcaccactttacccattgcagacatctgaaccagcaataatgatgggtggccctgtgtactatcagagttctgtaatgtcattaccaccaggctttatttcttctgatggtgcttctaatgcatctggtgtcaaatctgagacaagttactatcctgtttctcgccaaaatttggagattaaaacttgccacaatgcttctggtgatcctgaacaaaattcatatattagcagcgaagatgacagaaacaagacttctgaacctatgggcagaatatcagaatctgaaaagaaacagcaagttgatgttgaacaatcatgtttggagcctgcagcctgcattggaaaggaagcattatctagtcatggtgacaccatattaagtaaaaaggaggatgctggagctctatgctatgaacctccttgctttcggagttttgaatttccctttgtcagctgtgagcttgtaaactccagcgatctcccagaatatagtcctcttggcattcgagagttgatgaggacatccttgaacttccctaccccagtaagattgtggggctcccctactagggatggtagccctgatgctgtgctaaagaatgctgccaaaagattcatgtgcaccccgtccataatgaaaaaaaggcacagagatcttttatctccagtttctgatataagaactgacaagaaaccaaatactgaaagggattttatgagctcaggcatatcctctacaagagttgggaaatcttgcatggatagcgctgatgattcagctgatttagtttcaccgaaagagagtgcatttcaaaagaagctgaagctttgtcacgaaaacaaagaaaatttgaatgaaattgctgatcaaggagaaaatgaagccaatgcaaagcattcttcagggattcttactccgagcagtgttgacaaccataatacacataagcatggtccaaattttcgaattcaggagctaaataccactgtacaggctttgtctaactctaaagacataatattttctagatcaaagccatcagaacatgttgaaaaatctgcagcctgcattgatgcagattacgagtatttgaacatattggctgatactccaggtattaaaagaggcttagaatctccttctgcctggaagtctcctgtgttcacaccattccaggatgcatacttcatgagcccagcaagcagagcttttgatgccttaggattggtgaagcagattaatgagcagagtgcttctgctgtggaggaagcacatgaagttctggcaaatggaagcccatggaaacaacataacaaggaaaactctgacaaagaaaatatagaaaatacagctttgaagcatgagcatgtcacaagcaaacctccatcgatactcatggtagaggcacgggtgctcgatttcaatgaatgctccacacctgtgaggaagaaagacgataagaaagtggaaatagttttaggaggacctgcaacatcccctgttacttcctcgcatctttggataaatatgcggtagccctttgaggtgggtgggcgtggggatgcttcgcctatgctgttcagtatgtacatgtctgttattcccataatttccaccgttttgaaatacacattccaattagtactttattctttgtgcttggtaccctaaatgtcaattctaaatggaaatacatttttttgtagtgttaagatttgtaatgtgtcatttgattatgttaaatattaaacaaggcaatatatttaaattcagagtatattatgaaa

SEQ ID NO: 59287 - DNA, 2639 bp, Zea Mays
actggactctagaagaggatgacatacttcgcaaagctgttgaaacctacaagggaaaaaattggaaaaagatagctgaatgttttccaggtaggactgatgttcaatgtttgcatagatggcagaaggttttgaaccctgagcttgttaaagggccttggtcgaaagaagaagatgagatcattactcagatggtaaataaacttgggccaaagaaatggtcgaccattgcccaagctcttcctggacgtattggaaagcaatgtcgggaaagatggcacaaccatcttaatcctgggatcaataaggacgcatggacacaagacgaggaaatcaggctcatccatgctcatcaaacttatggaaacaaatgggctgaattgacaaagtttttaccaggaagggcttcacacctgttgaatacactgctggtggtttaaatgttgattcttcatctgcaataaccaatcaaattagcgaaggcagtggttttaatgtttttcgggaggctgaagattcgatggagttaagtcagtcttcgtttgccaagggttcttgctctcaggaggagcaaaatgatgtgactttgggatctcatttgcatgtgcatgaatctttgtgtccagatggttccactaatgatggcaatggtgcttctggtttacctgacattcatcaccgcttatgcacttctgacatggatcaagataaacacttgcaggaaggaatggatttggataaacacttgcagcatgaattctctcaaggaacggatttgcatcttgatgtagatgaagtgccaaacaactttgtgataaaaggtagccagtcatctaatgagcttgcagttcaatttcatgacacagagattatgaatagttcaaaaaatgatggagtgtctttggtaccacatgctataacaccatgtgttcccatcttacctagtgtttctggatgtgtgcataacataaatgtgatatacgaaatgggcataaaaaatgataattgtttccaatctgaaaagtgccaggatatttccattcaatcaggtgcatactcgtctgaagctgcaggcagctttttagcaccactttacccattgcagacatctgaaccagcaataatgatgggtggccctgtgtactatcagagttctgtaatgtcattaccaccaggctttatttcttctgatggtgcttctaatgcatctggtgtcaaatctgagacaagttactatcctgtttctcgccaaaatttggagattaaaacttgccacaatgcttctggtgatcctgaacaaaattcatatattagcagcgaagatgacagaaacaagacttctgaacctatgggcagaatatcagaatctgaaaagaaacagcaagttgatgttgaacaatcatgtttggagcctgcagcctgcattggaaaggaagcattatctagtcatggtgacaccatattaagtaaaaaggaggatgctggagctctatgctatgaacctccttgctttcggagttttgaatttccctttgtcagctgtgagcttgtaaactccagcgatctcccagaatatagtcctcttggcattcgagagttgatgaggacatccttgaacttccctaccccagtaagattgtggggctcccctactagggatggtagccctgatgctgtgctaaagaatgctgccaaaagattcatgtgcaccccgtccataatgaaaaaaaggcacagagatcttttatctccagtttctgatataagaactgacaagaaaccaaatactgaaagggattttatgagctcaggcatatcctctacaagagttgggaaatcttgcatggatagcgctgatgattcagctgatttagtttcaccgaaagagagtgcatttcaaaagaagctgaagctttgtcacgaaaacaaagaaaatttgaatgaaattgctgatcaaggagaaaatgaagccaatgcaaagcattcttcagggattcttactccgagcagtgttgacaaccataatacacataagcatggtccaaattttcgaattcaggagctaaataccactgtacaggctttgtctaactctaaagacataatattttctagatcaaagccatcagaacatgttgaaaaatctgcagcctgcattgatgcagattacgagtatttgaacatattggctgatactccaggtattaaaagaggcttagaatctccttctgcctggaagtctcctgtgttcacaccattccaggatgcatacttcatgagcccagcaagcagagcttttgatgccttaggattggtgaagcagattaatgagcagagtgcttctgctgtggaggaagcacatgaagttctggcaaatggaagcccatggaaacaacataacaaggaaaactctgacaaagaaaatatagaaaatacagctttgaagcatgagcatgtcacaagcaaacctccatcgatactcatgcctagttccagtctccggctgttagaaataagcaacaaggattatggatgctaatgcaaattctcagtggcaaactggcaataatctaagcctatcagtagacatcagttttgcatggaacatcaaattctagtggacatatcaattagatcag

SEQ ID NO: 59288 - DNA, 2729 bp, Zea Mays
ctggactctagaagaggatgacatacttcgcaaagctgttgaaacctacaagggaaaaaattggaaaaagatagctgaatgttttccaggtaggactgatgttcaatgtttgcatagatggcagaaggttttgaaccctgagcttgttaaagggccttggtcgaaagaagaagatgagatcattactcagatggtaaataaacttgggccaaagaaatggtcgaccattgcccaagctcttcctggacgtattggaaagcaatgtcgggaaagatggcacaaccatcttaatcctgggatcaataaggacgcatggacacaagacgaggaaatcaggctcatccatgctcatcaaacttatggaaacaaatgggctgaattgacaaagtttttaccaggaaggacagacaatgcaattaaaaatcattggcacagctcggtgaagaagaaagttgattcatacagatcatctggtttactggctcaatcccagggcttcacacctgttgaatacactgctggtggtttaaatgttgattcttcatctgcaataaccaatcaaattagcgaaggcagtggttttaatgtttttcgggaggctgaagattcgatggagttaagtcagtcttcgtttgccaagggttcttgctctcaggaggagcaaaatgatgtgactttgggatctcatttgcatgtgcatgaatctttgtgtccagatggttccactaatgatggcaatggtgcttctggtttacctgacattcatcaccgcttatgcacttctgacatggatcaagataaacacttgcaggaaggaatggatttggataaacacttgcagcatgaattctctcaaggaacggatttgcatcttgatgtagatgaagtgccaaacaactttgtgataaaaggtagccagtcatctaatgagcttgcagttcaatttcatgacacagagattatgaatagttcaaaaaatgatggagtgtctttggtaccacatgctataacaccatgtgttcccatcttacctagtgtttctggatgtgtgcataacataaatgtgatatacgaaatgggcataaaaaatgataattgtttccaatctgaaaagtgccaggatatttccattcaatcaggtgcatactcgtctgaagctgcaggcagctttttagcaccactttacccattgcagacatctgaaccagcaataatgatgggtggccctgtgtactatcagagttctgtaatgtcattaccaccaggctttatttcttctgatggtgcttctaatgcatctggtgtcaaatctgagacaagttactatcctgtttctcgccaaaatttggagattaaaacttgccacaatgcttctggtgatcctgaacaaaattcatatattagcagcgaagatgacagaaacaagacttctgaacctatgggcagaatatcagaatctgaaaagaaacagcaagttgatgttgaacaatcatgtttggagcctgcagcctgcattggaaaggaagcattatctagtcatggtgacaccatattaagtaaaaaggaggatgctggagctctatgctatgaacctccttgctttcggagttttgaatttccctttgtcagctgtgagcttgtaaactccagcgatctcccagaatatagtcctcttggcattcgagagttgatgaggacatccttgaacttccctaccccagtaagattgtggggctcccctactagggatggtagccctgatgctgtgctaaagaatgctgccaaaagattcatgtgcaccccgtccataatgaaaaaaaggcacagagatcttttatctccagtttctgatataagaactgacaagaaaccaaatactgaaagggattttatgagctcaggcatatcctctacaagagttgggaaatcttgcatggatagcgctgatgattcagctgatttagtttcaccgaaagagagtgcatttcaaaagaagctgaagctttgtcacgaaaacaaagaaaatttgaatgaaattgctgatcaaggagaaaatgaagccaatgcaaagcattcttcagggattcttactccgagcagtgttgacaaccataatacacataagcatggtccaaattttcgaattcaggagctaaataccactgtacaggctttgtctaactctaaagacataatattttctagatcaaagccatcagaacatgttgaaaaatctgcagcctgcattgatgcagattacgagtatttgaacatattggctgatactccaggtattaaaagaggcttagaatctccttctgcctggaagtctcctgtgttcacaccattccaggatgcatacttcatgagcccagcaagcagagcttttgatgccttaggattggtgaagcagattaatgagcagagtgcttctgctgtggaggaagcacatgaagttctggcaaatggaagcccatggaaacaacataacaaggaaaactctgacaaagaaaatatagaaaatacagctttgaagcatgagcatgtcacaagcaaacctccatcgatactcatgcctagttccagtctccggctgttagaaataagcaacaaggattatggatgctaatgcaaattctcagtggcaaactggcaataatctaagcctatcagtagacatcagttttgcatggaacatcaaattctagtggacatatcaattagatcag

SEQ ID NO: 59289 - DNA, 2931 bp, Zea Mays
tacttcgcaaagctgttgaaacctacaagggaaaaaattggaaaaagatagctgaatgttttccaggtaggactgatgttcaatgtttgcatagatggcagaaggttttgaaccctgagcttgttaaagggccttggtcgaaagaagaagatgagatcattactcagatggtaaataaacttgggccaaagaaatggtcgaccattgcccaagctcttcctggacgtattggaaagcaatgtcgggaaagatggcacaaccatcttaatcctgggatcaataaggacgcatggacacaagacgaggaaatcaggctcatccatgctcatcaaacttatggaaacaaatgggctgaattgacaaagtttttaccaggaaggacagacaatgcaattaaaaatcattggcacagctcggtgaagaagaaagttgattcatacagatcatctggtttactggctcaatcccagggcttcacacctgttgaatacactgctggtggtttaaatgttgattcttcatctgcaataaccaatcaaattagcgaaggcagtggttttaatgtttttcgggaggctgaagattcgatggagttaagtcagtcttcgtttgccaagggttcttgctctcaggaggagcaaaatgatgtgactttgggatctcatttgcatgtgcatgaatctttgtgtccagatggttccactaatgatggcaatggtgcttctggtttacctgacattcatcaccgcttatgcacttctgacatggatcaagataaacacttgcaggaaggaatggatttggataaacacttgcagcatgaattctctcaaggaacggatttgcatcttgatgtagatgaagtgccaaacaactttgtgataaaaggtagccagtcatctaatgagcttgcagttcaatttcatgacacagagattatgaatagttcaaaaaatgatggagtgtctttggtaccacatgctataacaccatgtgttcccatcttacctagtgtttctggatgtgtgcataacataaatgtgatatacgaaatgggcataaaaaatgataattgtttccaatctgaaaagtgccaggatatttccattcaatcaggtgcatactcgtctgaagctgcaggcagctttttagcaccactttacccattgcagacatctgaaccagcaataatgatgggtggccctgtgtactatcagagttctgtaatgtcattaccaccaggctttatttcttctgatggtgcttctaatgcatctggtgtcaaatctgagacaagttactatcctgtttctcgccaaaatttggagattaaaacttgccacaatgcttctggtgatcctgaacaaaattcatatattagcagcgaagatgacagaaacaagacttctgaacctatgggcagaatatcagaatctgaaaagaaacagcaagttgatgttgaacaatcatgtttggagcctgcagcctgcattggaaaggaagcattatctagtcatggtgacaccatattaagtaaaaaggaggatgctggagctctatgctatgaacctccttgctttcggagttttgaatttccctttgtcagctgtgagcttgtaaactccagcgatctcccagaatatagtcctcttggcattcgagagttgatgaggacatccttgaacttccctaccccagtaagattgtggggctcccctactagggatggtagccctgatgctgtgctaaagaatgctgccaaaagattcatgtgcaccccgtccataatgaaaaaaaggcacagagatcttttatctccagtttctgatataagaactgacaagaaaccaaatactgaaagggattttatgagctcaggcatatcctctacaagagttgggaaatcttgcatggatagcgctgatgattcagctgatttagtttcaccgaaagagagtgcatttcaaaagaagctgaagctttgtcacgaaaacaaagaaaatttgaatgaaattgctgatcaaggagaaaatgaagccaatgcaaagggattcttactccgagcagtgttgacaaccataatacacataagcatggtccaaattttcgaattcaggagctaaataccactgtacaggctttgtctaactctaaagacataatattttctagatcaaagccatcagaacatgttgaaaaatctgcagcctgcattgatgcagattacgagtatttgaacatattggctgatactccaggtattaaaagaggcttagaatctccttctgcctggaagtctcctgtgttcacaccattccaggatgcatacttcatgagcccagcaagcagagcttttgatgccttaggattggtgaagcagattaatgagcagagtgcttctgctgtggaggaagcacatgaagttctggcaaatggaagcccatggaaacaacataacaaggaaaactctgacaaagaaaatatagaaaatacagctttgaagcatgagcatgtcacaagcaaacctccatcgatactcatggtagaggcacgggtgctcgatttcaatgaatgctccacacctgtgaggaagaaagacgataagaaagtggaaatagttttaggaggacctgcaacatcccctgttacttcctcgcatctttggataaatatgcggtagccctttgaggtgggtgggcgtggggatgcttcgcctatgctgttcagtatgtacatgtctgttattcccataatttccaccgttttgaaatacacattccaattagtactttattctttgtgcttggtaccctaaatgtcaattctaaatggaaatacatttttttgtagtgttaagatttgtaatgtgtcatttgattatgttaaatattaaacaaggcaatatatttaaattcagagtatattatgaaa

SEQ ID NO: 59290 - DNA, 2606 bp, Zea Mays
acttcgcaaagctgttgaaacctacaagggaaaaaattggaaaaagatagctgaatgttttccaggtaggactgatgttcaatgtttgcatagatggcagaaggttttgaaccctgagcttgttaaagggccttggtcgaaagaagaagatgagatcattactcagatggtaaataaacttgggccaaagaaatggtcgaccattgcccaagctcttcctggacgtattggaaagcaatgtcgggaaagatggcacaaccatcttaatcctgggatcaataaggacgcatggacacaagacgaggaaatcaggctcatccatgctcatcaaacttatggaaacaaatgggctgaattgacaaagtttttaccaggaaggacagacaatgcaattaaaaatcattggcacagctcggtgaagaagaaagttgattcatacagatcatctggtttactggctcaatcccagggcttcacacctgttgaatacactgctggtggtttaaatgttgattcttcatctgcaataaccaatcaaattagcgaaggcagtggttttaatgtttttcgggaggctgaagattcgatggagttaagtcagtcttcgtttgccaagggttcttgctctcaggaggagcaaaatgatgtgactttgggatctcatttgcatgtgcatgaatctttgtgtccagatggttccactaatgatggcaatggtgcttctggtttacctgacattcatcaccgcttatgcacttctgacatggatcaagataaacacttgcaggaaggaatggatttggataaacacttgcagcatgaattctctcaaggaacggatttgcatcttgatgtagatgaagtgccaaacaactttgtgataaaaggtagccagtcatctaatgagcttgcagttcaatttcatgacacagagattatgaatagttcaaaaaatgatggagtgtctttggtaccacatgctataacaccatgtgttcccatcttacctagtgtttctggatgtgtgcataacataaatgtgatatacgaaatgggcataaaaaatgataattgtttccaatctgaaaagtgccaggatatttccattcaatcaggtgcatactcgtctgaagctgcaggcagctttttagcaccactttacccattgcagacatctgaaccagcaataatgatgggtggccctgtgtactatcagagttctgtaatgtcattaccaccaggctttatttcttctgatggtgcttctaatgcatctggtgtcaaatctgagacaagttactatcctgtttctcgccaaaatttggagattaaaacttgccacaatgcttctggtgatcctgaacaaaattcatatattagcagcgaagatgacagaaacaagacttctgaacctatgggcagaatatcagaatctgaaaagaaacagcaagttgatgttgaacaatcatgtttggagcctgcagcctgcattggaaaggaagcattatctagtcatggtgacaccatattaagtaaaaaggaggatgctggagctctatgctatgaacctccttgctttcggagttttgaatttccctttgtcagctgtgagcttgtaaactccagcgatctcccagaatatagtcctcttggcattcgagagttgatgaggacatccttgaacttccctaccccagtaagattgtggggctcccctactagggatggtagccctgatgctgtgctaaagaatgctgccaaaagattcatgtgcaccccgtccataatgaaaaaaaggcacagagatcttttatctccagtttctgatataagaactgacaagaaaccaaatactgaaagggattttatgagctcaggcatatcctctacaagagttgggaaatcttgcatggatagcgctgatgattcagctgatttagtttcaccgaaagagagtgcatttcaaaagaagctgaagctttgtcacgaaaacaaagaaaatttgaatgaaattgctgatcaaggagaaaatgaagccaatgcaaagcattcttcagggattcttactccgagcagtgttgacaaccataatacacataagcatggtccaaattttcgaattcaggagctaaataccactgtacaggctttgtctaactctaaagacataatattttctagatcaaagccatcagaacatgttgaaaaatctgcagcctgcattgatgcagattacgagtatttgaacatattggctgatactccaggtattaaaagaggcttagaatctccttctgcctggaagtctcctgtgttcacaccattccaggatgcatacttcatgagcccagcaagcagagcttttgatgccttaggattggtgaagcagattaatgagcagagtgcttctgctgtggaggaagcacatgaagttctggcaaatggaagcccatggaaacaacataacaaggaaaactctgacaaagaaaatatagaaaatacagctttgaagcatgagcatgtcacaagcaaacctccatcgatactcatggatgacgaagccgaagagcaagatgacgaagctgaagagtaagatgacgaagtcg

SEQ ID NO: 59291 - DNA, 2560 bp, Zea Mays
gagctgaatgttttccaggtaggactgatgttcaatgtttgcatagatggcagaaggttttgaaccctgagcttgttaaagggccttggtcgaaagaagtaagtgaagatgagatcattactcagatggtaaataaacttgggccaaagaaatggtcgaccattgcccaagctcttcctggacgtattggaaagcaatgtcgggaaagatggcacaaccatcttaatcctgggatcaataaggacgcatggacacaagacgaggaaatcaggctcatccatgctcatcaaacttatggaaacaaatgggctgaattgacaaagtttttaccaggaagacaatgcaattaaaaatcattggcacagctcggtgaagaagaaagttgattcatacagatcatctggtttactggctcaatcccagggcttcacacctgttgaatacactgctggtggtttaaatgttgattcttcatctgcaataaccaatcaaattagcgaaggcagtggttttaatgtttttcgggaggctgaagattcgatggagttaagtcagtcttcgtttgccaagggttcttgctctcaggaggagcaaaatgatgtgactttgggatctcatttgcatgtgcatgaatctttgtgtccagatggttccactaatgatggcaatggtgcttctggtttacctgacattcatcaccgcttatgcacttctgacatggatcaagataaacacttgcaggaaggaatggatttggataaacacttgcagcatgaattctctcaaggaacggatttgcatcttgatgtagatgaagtgccaaacaactttgtgataaaaggtagccagtcatctaatgagcttgcagttcaatttcatgacacagagattatgaatagttcaaaaaatgatggagtgtctttggtaccacatgctataacaccatgtgttcccatcttacctagtgtttctggatgtgtgcataacataaatgtgatatacgaaatgggcataaaaaatgataattgtttccaatctgaaaagtgccaggatatttccattcaatcaggtgcatactcgtctgaagctgcaggcagctttttagcaccactttacccattgcagacatctgaaccagcaataatgatgggtggccctgtgtactatcagagttctgtaatgtcattaccaccaggctttatttcttctgatggtgcttctaatgcatctggtgtcaaatctgagacaagttactatcctgtttctcgccaaaatttggagattaaaacttgccacaatgcttctggtgatcctgaacaaaattcatatattagcagcgaagatgacagaaacaagacttctgaacctatgggcagaatatcagaatctgaaaagaaacagcaagttgatgttgaacaatcatgtttggagcctgcagcctgcattggaaaggaagcattatctagtcatggtgacaccatattaagtaaaaaggaggatgctggagctctatgctatgaacctccttgctttcggagttttgaatttccctttgtcagctgtgagcttgtaaactccagcgatctcccagaatatagtcctcttggcattcgagagttgatgaggacatccttgaacttccctaccccagtaagattgtggggctcccctactagggatggtagccctgatgctgtgctaaagaatgctgccaaaagattcatgtgcaccccgtccataatgaaaaaaaggcacagagatcttttatctccagtttctgatataagaactgacaagaaaccaaatactgaaagggattttatgagctcaggcatatcctctacaagagttgggaaatcttgcatggatagcgctgatgattcagctgatttagtttcaccgaaagagagtgcatttcaaaagaagctgaagctttgtcacgaaaacaaagaaaatttgaatgaaattgctgatcaaggagaaaatgaagccaatgcaaagcattcttcagggattcttactccgagcagtgttgacaaccataatacacataagcatggtccaaattttcgaattcaggagctaaataccactgtacaggctttgtctaactctaaagacataatattttctagatcaaagccatcagaacatgttgaaaaatctgcagcctgcattgatgcagattacgagtatttgaacatattggctgatactccaggtattaaaagaggcttagaatctccttctgcctggaagtctcctgtgttcacaccattccaggatgcatacttcatgagcccagcaagcagagcttttgatgccttaggattggtgaagcagattaatgagcagagtgcttctgctgtggaggaagcacatgaagttctggcaaatggaagcccatggaaacaacataacaaggaaaactctgacaaagaaaatatagaaaatacagctttgaagcatgagcatgtcacaagcaaacctccatcgatactcatggatgacgaagccgaagagcaagatgacgaagctgaagagtaagatgacgaagtcg

SEQ ID NO: 59292 - DNA, 994 bp, Zea Mays
aaaataaaacacagcctcacgatccccgcactgcccggtgccccgcgagctgctcctctacacacgccagcgagaaccagcccaccccacctgctcgatcggcgcaccgtcccgcaggccgcagggccgtcgtcagccatgatccagctcctgttctcgctgctggccgcggaggccgcgctggtgctggcgctgctcttccccacgcccgtgcgccgcctggctctgctcgccatcgatcgcgccaagagggggcgcggacccgtcatggccaagaccatcgcgggcaccatgctcctcgtactagtctctgctttctacagcgtcgctaagatccgccgccgcgagggcgagctcggacagctcacgcccaccgaccagagagttgagaatgttgaggaaagacatggaggctgtaacagagcagggccggacactagaagcagcaaaatccggaagcactgacgagattcaaggataccagaaagaggttgcgagtttgaaggaacaagtgcaagagctccagaaccaatcacaaaagaaaacagagcgactaaaaaccgccgaagcaaattctgtagctttacagaaacaatcggaaggtttactcgctgaatatgaccgtctcattgcggagaacagggatttgagggaccaactgcagtcaattgacctccgcctgtcccattctggcggaaagaagaactcgtgaagcaagttctgcaattttgaagagcatgattttctgtagattttcttccaataggttaactgtactcggttttctctattatcataatcgcccatgtaattcagtagatggattttcctatgtaattcagtagatgcgtgcgtgtatgtatgagtggaccatttaatgctttatggactgggtggcatggactcagacccggcatttggccatagtttatggcctaacgtcttggttcagtgagatcaaataagaacctgcatcttcaaaggcagaatcaaa

SEQ ID NO: 59293 - DNA, 1363 bp, Zea Mays
ggcaactcaagttgtcaacaagtggtttctttgtcacaatttggattgctgcggtaatgttcaagtcgaacgatatattgaggaagcaaactgccttgaagggcgagagaaaaatatctgtactcattggtattacagtaatcttcatgattcatgtgtttggcgtatattggtggtacaggaatgatgatcttctcagacctttgttcatgcttcctccaaaagatataccaccattctggcatgcgatttttgtcatcatggtcaacgatacaatggttcgccaagctgcaatggctgtcaagtgcatgctgcttctgtactacaagaactgcagaggtcgtaactaccgtagacagggccaaatgttaacccttgtggagtaccttctgcttctttatcgtgctttgttgccaacttctgtttggtatcgtttctttctgaacaaggaatatgggagtctcttctcatctttaaccactggactgtatctgactttcaagttgacttcggtagttgaaaaggttcagtcattcttggccgcggtgaaagcactgtcacgtaaagatgtgcattatgggtcttatgcgactgcagaacaggtacttgctgctggtgatatgtgtgccatttgccaggagaagatgcatgtgcctgttctccttcgctgtaaacatattttctgtgaagactgtgtttccgaatggttcgagcgagagcggacttgccccttgtgcagagcattggtaaaacctgctgatatccggtcatttggtgatggttctacaagtctattcttccagttgttctagactgcaagcggtaaaatcctaacataacaatggacgagctattgcatgaaaactcgagtggaggtccttttaacgccatcatgtgaaaccatcttccgcaatgttgagatcaatgtgagaaggttcatgacagtcacgacagtgcagtcgttatttgtttatatattcaaccaaatagtttacagagctttttagttgcaacagaggcaaaatgtttccagcagactgctttcagagcctttagaactctgctggacaaacaatttgatcgttgaggtctgctgagccgacaaccgtatgcctcctgtaaaattctggtatttttttttaattttttttttgcatatgtgggcttacgtgggtgtaactgaaatttgaaagtaccgcttgcacagcaagaattgccggtgggggttgaaagtggtaaatgaatgtaactgtaaagcgttgttacatgaagacaaaaatttccacccgttgcaacatagtaaatgctgacagacgcgacttgtgtactgttttaagttgggttgattaggttttctaactat

SEQ ID NO: 59294 - DNA, 1367 bp, Zea Mays
ctttccaggcatttaatgtgtctgtcaggtttctttgtcacaatttggattgctgcggtaatgttcaagtcgaacgatatattgaggaagcaaactgccttgaagggcgagagaaaaatatctgtactcattggtattacagtaatcttcatgattcatgtgtttggcgtatattggtggtacaggaatgatgatcttctcagacctttgttcatgcttcctccaaaagatataccaccattctggcatgcgatttttgtcatcatggtcaacgatacaatggttcgccaagctgcaatggctgtcaagtgcatgctgcttctgtactacaagaactgcagaggtcgtaactaccgtagacagggccaaatgttaacccttgtggagtaccttctgcttctttatcgtgctttgttgccaacttctgtttggtatcgtttctttctgaacaaggaatatgggagtctcttctcatctttaaccactggactgtatctgactttcaagttgacttcggtagttgaaaaggttcagtcattcttggccgcggtgaaagcactgtcacgtaaagatgtgcattatgggtcttatgcgactgcagaacaggtacttgctgctggtgatatgtgtgccatttgccaggagaagatgcatgtgcctgttctccttcgctgtaaacatattttctgtgaagactgtgtttccgaatggttcgagcgagagcggacttgccccttgtgcagagcattggtaaaacctgctgatatccggtcatttggtgatggttctacaagtctattcttccagttgttctagactgcaagcggtaaaatcctaacataacaatggacgagctattgcatgaaaactcgagtggaggtccttttaacgccatcatgtgaaaccatcttccgcaatgttgagatcaatgtgagaaggttcatgacagtcacgacagtgcagtcgttatttgtttatatattcaaccaaatagtttacagagctttttagttgcaacagaggcaaaatgtttccagcagactgctttcagagcctttagaactctgctggacaaacaatttgatcgttgaggtctgctgagccgacaaccgtatgcctcctgtaaaattctggtatttttttttaattttttttttgcatatgtgggcttacgtgggtgtaactgaaatttgaaagtaccgcttgcacagcaagaattgccggtgggggttgaaagtggtaaatgaatgtaactgtaaagcgttgttacatgaagacaaaaatttccacccgttgcaacatagtaaatgctgacagacgcgacttgtgtactgttttaagttgggttgattaggttttctaactat

SEQ ID NO: 59295 - DNA, 820 bp, Zea Mays
tcgcgattcattaccacccctacgtgtgagttatcttaggacaaggtgcttcatgggggagcgaggggtgcttgacaggagtgaggtcaagccttgctaccctggagctgagagtgaaagagataaataagggcaagaccaacttgttcttgctttatttatggttcgagcgagagcggacttgccccttgtgcagagcattggtaaaacctgctgatatccggtcatttggtgatggttctacaagtctattcttccagttgttctagactgcaagcggtaaaatcctaacataacaatggacgagctattgcatgaaaactcgagtggaggtccttttaacgccatcatgtgaaaccatcttccgcaatgttgagatcaatgtgagaaggttcatgacagtcacgacagtgcagtcgttatttgtttatatattcaaccaaatagtttacagagctttttagttgcaacagaggcaaaatgtttccagcagactgctttcagagcctttagaactctgctggacaaacaatttgatcgttgaggtctgctgagccgacaaccgtatgcctcctgtaaaattctggtatttttttttaattttttttttgcatatgtgggcttacgtgggtgtaactgaaatttgaaagtaccgcttgcacagcaagaattgccggtgggggttgaaagtggtaaatgaatgtaactgtaaagcgttgttacatgaagacaaaaatttccacccgttgcaacatagtaaatgctgacagacgcgacttgtgtactgttttaagttgggttgattaggttttctaactat

SEQ ID NO: 59296 - DNA, 982 bp, Zea Mays
cagatctcggccttggcgactggaaagatgtcaccgacattgcgatggacggcaaaacaataaaggctcagatctgggacacagctgggcaggaaaggtaccgtgcaattacaagtgcttactaccgtggagccgtgggagcactgcttgtgtacgacatcacaaagaggcagagcttcgacaatgttcacaggtggcttcgtgaactccgcgaccatgctgactccagtattgtgatcatgatggtcggtaacaaatctgacctaatccacctgagagctatctctgaggatgaaggcaaagcgttggctgagaaggaggggttgttcttcctcgagacatcagctatggaggctataaacgtggagcaagccttccagactatcatgacggaggtctatggcattgtcaacaggaaagcgctggctgccaaagaagcagcagctgcaactgcttcgttgccctcccagggtaaaatcatcagcattgacagcactgcaggaaacacaaagagggcatgctgctctacctaaaaatgttcaaacaccacattatacagaaccttggagacaattgttggtagaaaatggagcatagtgatcacaaatggtgtggtggcaatatatactcctattctattctattcttttcttttctttattgtgtggacaaaatgggggtacatgcagtttagtttgttcagtgtgtgttagtcaaaagttagatattttcgttaggatccataccatttatcttctcaagttaaatgatactgcagtataactcagaatcatatagtcccaagttgctacagaattcaactgcgaatttgtgatttcatcatgcttacattctactctctgtatcttaaatattaagatatctttgtgcagcctactctgacaggagtttgttgcatgctggtacctaagccactcttgttccataactacagtaggtgttggaaccattgaataattag

SEQ ID NO: 59297 - DNA, 962 bp, Zea Mays
catcctgtctgtcagtagtgttagatggacggcaaaacaataaaggctcagatctgggacacagctgggcaggaaaggtaccgtgcaattacaagtgcttactaccgtggagccgtgggagcactgcttgtgtacgacatcacaaagaggcagagcttcgacaatgttcacaggtggcttcgtgaactccgcgaccatgctgactccagtattgtgatcatgatggtcggtaacaaatctgacctaatccacctgagagctatctctgaggatgaaggcaaagcgttggctgagaaggaggggttgttcttcctcgagacatcagctatggaggctataaacgtggagcaagccttccagactatcatgacggaggtctatggcattgtcaacaggaaagcgctggctgccaaagaagcagcagctgcaactgcttcgttgccctcccagggtaaaatcatcagcattgacagcactgcaggaaacacaaagagggcatgctgctctacctaaaaatgttcaaacaccacattatacagaaccttggagacaattgttggtagaaaatggagcatagtgatcacaaatggtgtggtggcaatatatactcctattctattctattcttttcttttctttattgtgtggacaaaatgggggtacatgcagtttagtttgttcagtgtgtgttagtcaaaagttagatattttcgttaggatccataccatttatcttctcaagttaaatgatactgcagtataactcagaatcatatagtcccaagttgctacagaattcaactgcgaatttgtgatttcatcatgcttacattctactctctgtatcttaaatattaagatatctttgtgcagcctactctgacaggagtttgttgcatgctggtacctaagccactcttgttccataactacagtaggtgttggaaccattgaataattag

SEQ ID NO: 59298 - DNA, 764 bp, Zea Mays
cggcctaggaaaaagagcggaaacgatcgagacgacgctgtggtcgatcgagtggggcatcgcggagctggtgaaccacccggccatccagtccaagctccgggaggagctgggctcggtcctgggcggcgccggcgtgcccgtgacggagccggacctcgagcgcctcccctacctccaggccgtcgtcaaggagacgctgcgcctgcgcatggccatcccgctgctggtcccgcacatgaacctcaacgacggcaagctcgccggctacgacatccccgccgagtccaagatcctcgtcaacgcctggttcctcgccaacgaccccaagaggtgggtgcgccccgacgagttccgccccgagcgcttcctggaggaggacaagtccgtggaggcccacggcaacgacttccgcttcgtcccgttcggggtcggccgccggagctgccccgggatcatcctcgcgctgcccatcatcggcatcaccctcgccagcctcgtgcagaacttccagctgctgccgccgcccggcctcgacaagatcgataccacggagaagcctggccagttcagcaaccagatcgccaagcacgccaccatcgtctgcaagcccctcaaggcctagaaatcacctgcacgcgcctcccgccacatcaagcactattgtaattttgtgcgtcttctctgttatgtgttgtgtccttgaaaacttctccaaaagttatagtgtcataaacttcaatttaatcaactctgttgcacaa

SEQ ID NO: 59299 - DNA, 4418 bp, Zea Mays
gtccttcgatgccaacccaaataccccgcgcaatcagcacaacagaggtccccaaaaccagctcccacgcgggcgggccgatggctgccgtcgcggagctggagcggcgggtgatggcggcggtgaaggcctccgctgagcgcggggacccgccgctcctccaggccgccgaggccgcgcgctgcatccgcgaggcccccgccttcactccgggcggcctcgcgctctcgcaggcgttggtggcgaacctgtgcttcgcgcacaacacagccgccatgtggaagctgctggaccaggccatgttgtcccgcctggtggaccctctccacacgctcgccctccttaccccgagggtggtgccgaaccggcgggagcagccggaggcgtacatgctctacctcgagcttctcggtcggtacgcggtggctcctgtttacccggagcgcatggagaataaggatatgttagccaaatctattgacggtgctatgcagctttcgcatagatttggttttcaacatttggattttggacatactgttattttgtttgtgttgagtcttgtcgacatgctgattgattgcatcttagacgattgtggattgcccgtcacctctgctgatgaacatggcaacagaaaagatatgaattttaatggcaaggggagatcatttgacaggggagatgaacaccgtgaacatctaaggagaaagaatatacttatgtctattgaagttgttgagaaggtcactgcaaacaaaattacccaagtctttctgcggcttgtcaaccgtaacacacctgaaaatttcaattatctacttcggaaacttcaccttattggtgctcttaaaaagaagaacgctttgtctccatgcaatctgctagatagcttgattgtgaatatacagaatgccataagcacgggctaccaattagacaggaaaaggcttctgggagttcctgttagcatacagccttgcagttcagctatttacagtatattcgtaactggaaagggatcttgttggattccttttgatatgtttatggagaatgcaatggatgggagacatcttcatactatatcatcagttgaatatctgacagaactatccaaaacacttcaagtgttgaatcgggcaacttggcaagagacctttcaggctttatggatttcggctttgcggctagtacagcgaggcccagatgcttcggaaggaccatttcctcatcttgattcacggatgtgcatgttgttggctattatccccttgtccattgcaactattgtgaaggaagaggcgggcaatctgaaaggggaaacaacctctgttataagaggacaattagtgtcttcacttcagattctgagacaattttttggtcttctttcaccacctccagcaactgtgcacttggcaaatgctgcagctagaaaagcagcagttgttctgtctaacctgaaaactgggagtgagaacatgtacagttctttcaaagacagttcctctattaaagcagttggaaatatgctacatcttatcgtggaagcctgtatcgcaaggaacttaatagatgcatctgcttatttctggcctggctatgtggttccacttaaagaatcctctccagttcaggcatctccatggtcatctttagtagaagggtctccacttatagaacttaaggatgcccttatggtcacacctgcttcgagtgtagaagagttggagaaattgtactcttttgcagtaagtgggtcaccggaggaaaagttggcagcttcgaagattttgtgtggtgcatcacttcttcgtggttggaacattcaggaacatgttgttcaaatggtgcttaagttgttatcgacattcctccctttggattctggatcagaagggcgatatgtacagcatatgcctatgctgcatgctcttgtatcaggaatttcttctattgacactgttcatattctctcactgtatggtctggtgccagaagtagcatctatgttaatgcctctctgtgagaattttggatctttacctccatctgatcataggagttgtaaacttgaagaggcttctgtgtactcagtattctcatgcgctttcctgtccctgcttcgcttgtggaaatttcatagaccacccattgagagtgctttatcaaggcgtggagtctctgtttggtcagagctccgtttggattttctcttgttattacgtaatagtcattcttctttgaaaaatctgtctaatgttactcaatcaagcatatttgaattagatccaccatttcaaaaaccattgtatattgattcatttccaaagctaagggcatggtacttccagaatcaagcttgcatagcttctacactttctagtgcttgcagcaggacaactgtcctccatgtggcaaacatgatactgaaaatcatatgccataataaagtgccaaaaggtggtgtcctgtctgtaaatcctcagtcaacagcaaattccactacgagtagttcacctgcaggcgtacaggaagatatgtgccagtggccaacacttccagcatgggaaattcttgaagctgttccttttgtgcttgaggctatgctaacttcatgcgctcatggaagactttcatcccgtgacttggttacaggtttaagagatcttgcagatttcttgcctgcttcacttgctgctattgtcagctacttctctgcagaagtcactagtggcatatggaagccagttatgttgaatggaatggactggccaagtccagctgcaactcttccagtagttgaatcggagataaaagaagctcttgcatttgctggtgttcatatcaatatctgtccacgtccacgttctgcgatgccaatgcttccattgccaatagcagcgctaatgagtttgtcaataacagtcaagatggaggaattcagccacctacacggcatcatttcccaaggaattgaaatttgtgcgacatctagttcatggcccactatgcaaattataggcgcattgtggtcccagaaggcacggcggtggcatgattttatcatcctgacttgttcgcagtcccccttcactcgagataacaccgcggtggcacaactgatcaggagctgcttctcgtctttcctggggcctttggttgatgggcgctcctgctccgtagcaaacagaggagttgcgaatctgctggggcagagttctgatgaaaaagcacacaggcttgctgtagctccagggtttctctacatgagatcctgccggttatttccaaacaacacctttgtttgtgaagagatcttggaggtggtcattgagagagcccatgcgctagcaaatgaccgcagttctgacagacctgcccgtttgaggtcagagtgtttgccgctatcagctgcgtcatccttggtagagcagatagcatcacttgcagcgactatgctttgccacgctggcggggtgaatctgattcgtctcctctacgagcagatcatgcccaccctgctgctttcaggtggagaagctaagctcggttccggtggtatggtatgcagcataatcgaaggatacacgctagcgtacgttctcctcttctcgggcgcaaccgtctggggagtcggagaaacgtcgccagcttacactttaatatacacatccaaaagacaacgggtcctcgacaggcacctggagttcatggccagggtgatggagggtaacattgtgctgggctgtggagatgccacgtggaggtcctacgttctgtgtttcgtcaacttgctggtcagcttcgtgcccgcgtgggtccctgaagtgaagctaaatacgctgcagaaactggcatctgggcttcggagatggcacgagggcgatcttgccctctctttgcttgagctagggggagccaagaccgtgacttcagtagttgaatctcttctgcggtgagctggtgctcaactgactgtatagttttctacgacaggttggtccatatacacattataacatgttaatgatctaaaaattcagtcatcagaaagatgaacagtacagttctaccgaagcttgattattcgtactgtcagtcagctaaagagatgtccagcagtttctatagtagttacatgatagtgtgtaattgatggaaatgtcatttactggcagtcgtccatttggagtgtataaaaatcatggaataattggaagaatgcagtattagaaaacagcattgctgggagccaggcgtctgttccatcggatgacccgtgcggatgtgccgttagccttgttgcttccatttggtaattcttgcgccgcctgttagcctttttacttccattgttttggttggtcgtgtcgactgatccacatagattactgtcttagagcatttccaag

SEQ ID NO: 59300 - DNA, 4385 bp, Zea Mays
gtccttcgatgccaacccaaataccccgcgcaatcagcacaacagaggtccccaaaaccagctcccacgcgggcgggccgatggctgccgtcgcggagctggagcggcgggtgatggcggcggtgaaggcctccgctgagcgcggggacccgccgctcctccaggccgccgaggccgcgcgctgcatccgcgaggcccccgccttcactccgggcggcctcgcgctctcgcaggcgttggtggcgaacctgtgcttcgcgcacaacacagccgccatgtggaagctgctggaccaggccatgttgtcccgcctggtggaccctctccacacgctcgccctccttaccccgagggtggtgccgaaccggcgggagcagccggaggcgtacatgctctacctcgagcttctcggtcggtacgcggtggctcctgtttacccggagcgcatggagaataaggatatgttagccaaatctattgacggtgctatgcagctttcgcatagatttggttttcaacatttggattttggacatactgttattttgtttgtgttgagtcttgtcgacatgctgattgattgcatcttagacgattgtggattgcccgtcacctctgctgatgaacatggcaacagaaaagatatgaattttaatggcaaggggagatcatttgacaggggagatgaacaccgtgaacatctaaggagaaagaatatacttatgtctattgaagttgttgagaaggtcactgcaaacaaaattacccaagtctttctgcggcttgtcaaccgtaacacgatagacctgaaaatttcaattatctacttcggaaacttcaccttattggtgctcttaaaaagaagaacgctttgtctccatgcaatctgctagatagcttgattgtgaatatacagaatgccataagcacgggctaccaattagacaggaaaaggcttctgggagttcctgttagcatacagccttgcagttcagctatttacagtatattcgtaactggaaagggatcttgttggattccttttgatatgtttatggagaatgcaatggatgggagacatcttcatactatatcatcagttgaatatctgacagaactatccaaaacacttcaagtgttgaatcgggcaacttggcaagagacctttcaggctttatggatttcggctttgcggctagtacagcgaggcccagatgcttcggaaggaccatttcctcatcttgattcacggatgtgcatgttgttggctattatccccttgtccattgcaactattgtgaaggaagaggcgggcaatctgaaaggggaaacaacctctgttataagaggacaattagtgtcttcacttcagattctgagacaattttttggtcttctttcaccacctccagcaactgtgcacttggcaaatgctgcagctagaaaagcagcagttgttctgtctaacctgaaaactgggagtgagaacatttggaaatatgctacatcttatcgtggaagcctgtatcgcaaggaacttaatagatgcatctgcttatttctggcctggctatgtggttccacttaaagaatcctctccagttcaggcatctccatggtcatctttagtagaagggtctccacttatagaacttaaggatgcccttatggtcacacctgcttcgagtgtagaagagttggagaaattgtactcttttgcagtaagtgggtcaccggaggaaaagttggcagcttcgaagattttgtgtggtgcatcacttcttcgtggttggaacattcaggaacatgttgttcaaatggtgcttaagttgttatcgacattcctccctttggattctggatcagaagggcgatatgtacagcatatgcctatgctgcatgctcttgtatcaggaatttcttctattgacactgttcatattctctcactgtatggtctggtgccagaagtagcatctatgttaatgcctctctgtgagaattttggatctttacctccatctgatcataggagttgtaaacttgaagaggcttctgtgtactcagtattctcatgcgctttcctgtccctgcttcgcttgtggaaatttcatagaccacccattgagagtgctttatcaaggcgtggagtctctgtttggtcagagctccgtttggattttctcttgttattacgtaatagtcattcttctttgaaaaatctgtctaatgttactcaatcaagcatatttgaattagatccaccatttcaaaaaccattgtatattgattcatttccaaagctaagggcatggtacttccagaatcaagcttgcatagcttctacactttctagtgcttgcagcaggacaactgtcctccatgtggcaaacatgatactgaaaatcatatgccataataaagtgccaaaaggtggtgtcctgtctgtaaatcctcagtcaacagcaaattccactacgagtagttcacctgcaggcgtacaggaagatatgtgccagtggccaacacttccagcatgggaaattcttgaagctgttccttttgtgcttgaggctatgctaacttcatgcgctcatggaagactttcatcccgtgacttggttacaggtttaagagatcttgcagatttcttgcctgcttcacttgctgctattgtcagctacttctctgcagaagtcactagtggcatatggaagccagttatgttgaatggaatggactggccaagtccagctgcaactcttccagtagttgaatcggagataaaagaagctcttgcatttgctggtgttcatatcaatatctgtccacgtccacgttctgcgatgccaatgcttccattgccaatagcagcgctaatgagtttgtcaataacagtcaagatggaggaattcagccacctacacggcatcatttcccaaggaattgaaatttgtgcgacatctagttcatggcccactatgcaaattataggcgcattgtggtcccagaaggcacggcggtggcatgattttatcatcctgacttgttcgcagtcccccttcactcgagataacaccgcggtggcacaactgatcaggagctgcttctcgtctttcctggggcctttggttgatgggcgctcctgctccgtagcaaacagaggagttgcgaatctgctggggcagagttctgatgaaaaagcacacaggcttgctgtagctccagggtttctctacatgagatcctgccggttatttccaaacaacacctttgtttgtgaagagatcttggaggtggtcattgagagagcccatgcgctagcaaatgaccgcagttctgacagacctgcccgtttgaggtcagagtgtttgccgctatcagctgcgtcatccttggtagagcagatagcatcacttgcagcgactatgctttgccacgctggcggggtgaatctgattcgtctcctctacgagcagatcatgcccaccctgctgctttcaggtggagaagctaagctcggttccggtggtatggtatgcagcataatcgaaggatacacgctagcgtacgttctcctcttctcgggcgcaaccgtctggggagtcggagaaacgtcgccagcttacactttaatatacacatccaaaagacaacgggtcctcgacaggcacctggagttcatggccagggtgatggagggtaacattgtgctgggctgtggagatgccacgtggaggtcctacgttctgtgtttcgtcaacttgctggtcagcttcgtgcccgcgtgggtccctgaagtgaagctaaatacgctgcagaaactggcatctgggcttcggagatggcacgagggcgatcttgccctctctttgcttgagctagggggagccaagaccgtgacttcagtagttgaatctcttctgcggtgagctggtgctcaactgactgtatagttttctacgacaggttggtccatatacacattataacatgttaatgatctaaaaattcagtcatcagaaagatgaacagtacagttctaccgaagcttgattattcgtactgtcagtcagctaaagagatgtccagcagtttctatagtagttacatgatagtgtgtaattgatggaaatgtcatttactggcagtcgtccatttggagtgtataaaaatcatggaataattggaagaatgcagtattagaaaacagcattgctgggagccaggcgtctgttccatcggatgacccgtgcggatgtgccgttagccttgttgcttccatttggtaattcttgcgccgcctgttagcctttttacttccattgttttggttggtcgtgtcgactgatccacatagattactgtcttagagcatttccaag

SEQ ID NO: 59301 - DNA, 4795 bp, Zea Mays
gtccttcgatgccaacccaaataccccgcgcaatcagcacaacagaggtccccaaaaccagctcccacgcgggcgggccgatggctgccgtcgcggagctggagcggcgggtgatggcggcggtgaaggcctccgctgagcgcggggacccgccgctcctccaggccgccgaggccgcgcgctgcatccgcgaggcccccgccttcactccgggcggcctcgcgctctcgcaggcgttggtggcgaacctgtgcttcgcgcacaacacagccgccatgtggaagctgctggaccaggccatgttgtcccgcctggtggaccctctccacacgctcgccctccttaccccgagggtggtgccgaaccggcgggagcagccggaggcgtacatgctctacctcgagcttctcggtcggtacgcggtggctcctgtttacccggagcgcatggagaataaggatatgttagccaaatctattgacggtgctatgcagctttcgcatagatttggttttcaacatttggattttggacatactgttattttgtttgtgttgagtcttgtcgacatgctgattgattgcatcttagacgattgtggattgcccgtcacctctgctgatgaacatggcaacagaaaagatatgaattttaatggcaaggggagatcatttgacaggggagatgaacaccgtgaacatctaaggagaaagaatatacttatgtctattgaagttgttgagaaggtcactgcaaacaaaattacccaagtctttctgcggcttgtcaaccgtaacacgtatgatgtgttatctttgtaattctactcttttctgccatgcaaatcttgatcgttaaaagatcctagatactcagctacgttttccccgaaaaaaataggtttttataaacattttttacataacaagcttggggttggggatgaaaatgaaattgatatattatcatgttatcagatggtaatagtacctttgaatttttggcggtatgtgcaatagtgctggctgctatctgcgttttgtcctagatgtgacatgttaacctggttgggattgagaacactattttgaccaataaaaaaagagaactttgatggtactcattttattagggagaacatatgggaagttggttcaagctacacatcatcttaggcactttcaaatgagtcaatttccagcttctcatgccatgtttggctctttcccagatatgaaactccataaaacttgtggctttgtcgtcactctaaacttcaagcgtatgatttcattttagaatgtaagtatccatgcatagtttgagagaactttggtacatacatatttgttggcatcaagcaagcgtaacaaataatcgctagaaagcttttggattgtgacccccctgcagacaactcaatcactgttcaaatgttctagtgtattctatatgttaaactgatagtacttccattcctttttgaatgtggtaggatagacctgaaaatttcaattatctacttcggaaacttcaccttattggtgctcttaaaaagaagaacgctttgtctccatgcaatctgctagatagcttgattgtgaatatacagaatgccataagcacgggctaccaattagacaggaaaaggcttctgggagttcctgttagcatacagccttgcagttcagctatttacagtatattcgtaactggaaagggatcttgttggattccttttgatatgtttatggagaatgcaatggatgggagacatcttcatactatatcatcagttgaatatctgacagctagaaaagcagcagttgttctgtctaacctgaaaactgggagtgagaacatgtacagttctttcaaagacagttcctctattaaagcagttggaaatatgctacatcttatcgtggaagcctgtatcgcaaggaacttaatagatgcatctgcttatttctggcctggctatgtggttccacttaaagaatcctctccagttcaggcatctccatggtcatctttagtagaagggtctccacttatagaacttaaggatgcccttatggtcacacctgcttcgagtgtagaagagttggagaaattgtactcttttgcagtaagtgggtcaccggaggaaaagttggcagcttcgaagattttgtgtggtgcatcacttcttcgtggttggaacattcaggaacatgttgttcaaatggtgcttaagttgttatcgacattcctccctttggattctggatcagaagggcgatatgtacagcatatgcctatgctgcatgctcttgtatcaggaatttcttctattgacactgttcatattctctcactgtatggtctggtgccagaagtagcatctatgttaatgcctctctgtgagaattttggatctttacctccatctgatcataggagttgtaaacttgaagaggcttctgtgtactcagtattctcatgcgctttcctgtccctgcttcgcttgtggaaatttcatagaccacccattgagagtgctttatcaaggcgtggagtctctgtttggtcagagctccgtttggattttctcttgttattacgtaatagtcattcttctttgaaaaatctgtctaatgttactcaatcaagcatatttgaattagatccaccatttcaaaaaccattgtatattgattcatttccaaagctaagggcatggtacttccagaatcaagcttgcatagcttctacactttctagtgcttgcagcaggacaactgtcctccatgtggcaaacatgatactgaaaatcatatgccataataaagtgccaaaaggtggtgtcctgtctgtaaatcctcagtcaacagcaaattccactacgagtagttcacctgcaggcgtacaggaagatatgtgccagtggccaacacttccagcatgggaaattcttgaagctgttccttttgtgcttgaggctatgctaacttcatgcgctcatggaagactttcatcccgtgacttggttacaggtttaagagatcttgcagatttcttgcctgcttcacttgctgctattgtcagctacttctctgcagaagtcactagtggcatatggaagccagttatgttgaatggaatggactggccaagtccagctgcaactcttccagtagttgaatcggagataaaagaagctcttgcatttgctggtgttcatatcaatatctgtccacgtccacgttctgcgatgccaatgcttccattgccaatagcagcgctaatgagtttgtcaataacagtcaagatggaggaattcagccacctacacggcatcatttcccaaggaattgaaatttgtgcgacatctagttcatggcccactatgcaaattataggcgcattgtggtcccagaaggcacggcggtggcatgattttatcatcctgacttgttcgcagtcccccttcactcgagataacaccgcggtggcacaactgatcaggagctgcttctcgtctttcctggggcctttggttgatgggcgctcctgctccgtagcaaacagaggagttgcgaatctgctggggcagagttctgatgaaaaagcacacaggcttgctgtagctccagggtttctctacatgagatcctgccggttatttccaaacaacacctttgtttgtgaagagatcttggaggtggtcattgagagagcccatgcgctagcaaatgaccgcagttctgacagacctgcccgtttgaggtcagagtgtttgccgctatcagctgcgtcatccttggtagagcagatagcatcacttgcagcgactatgctttgccacgctggcggggtgaatctgattcgtctcctctacgagcagatcatgcccaccctgctgctttcaggtggagaagctaagctcggttccggtggtatggtatgcagcataatcgaaggatacacgctagcgtacgttctcctcttctcgggcgcaaccgtctggggagtcggagaaacgtcgccagcttacactttaatatacacatccaaaagacaacgggtcctcgacaggcacctggagttcatggccagggtgatggagggtaacattgtgctgggctgtggagatgccacgtggaggtcctacgttctgtgtttcgtcaacttgctggtcagcttcgtgcccgcgtgggtccctgaagtgaagctaaatacgctgcagaaactggcatctgggcttcggagatggcacgagggcgatcttgccctctctttgcttgagctagggggagccaagaccgtgacttcagtagttgaatctcttctgcggtgagctggtgctcaactgactgtatagttttctacgacaggttggtccatatacacattataacatgttaatgatctaaaaattcagtcatcagaaagatgaacagtacagttctaccgaagcttgattattcgtactgtcagtcagctaaagagatgtccagcagtttctatagtagttacatgatagtgtgtaattgatggaaatgtcatttactggcagtcgtccatttggagtgtataaaaatcatggaataattggaagaatgcagtattagaaaacagcattgctgggagccaggcgtctgttccatcggatgacccgtgcggatgtgccgttagccttgttgcttccatttggtaattcttgcgccgcctgttagcctttttacttccattgttttggttggtcgtgtcgactgatccacatagattactgtcttagagcatttccaag

SEQ ID NO: 59302 - DNA, 4884 bp, Zea Mays
gtccttcgatgccaacccaaataccccgcgcaatcagcacaacagaggtccccaaaaccagctcccacgcgggcgggccgatggctgccgtcgcggagctggagcggcgggtgatggcggcggtgaaggcctccgctgagcgcggggacccgccgctcctccaggccgccgaggccgcgcgctgcatccgcgaggcccccgccttcactccgggcggcctcgcgctctcgcaggcgttggtggcgaacctgtgcttcgcgcacaacacagccgccatgtggaagctgctggaccaggccatgttgtcccgcctggtggaccctctccacacgctcgccctccttaccccgagggtggtgccgaaccggcgggagcagccggaggcgtacatgctctacctcgagcttctcggtcggtacgcggtggctcctgtttacccggagcgcatggagaataaggatatatctcttggcttccctgataaatggattcgttggattgtgtcaatcttaagctcaggttcctcggcagttcttctgaatggagtcccaggttagccaaatctattgacggtgctatgcagctttcgcatagatttggttttcaacatttggattttggacatactgttattttgtttgtgttgagtcttgtcgacatgctgattgattgcatcttagacgattgtggattgcccgtcacctctgctgatgaacatggcaacagaaaagatatgaattttaatggcaaggggagatcatttgacaggggagatgaacaccgtgaacatctaaggagaaagaatatacttatgtctattgaagttgttgagaaggtcactgcaaacaaaattacccaagtctttctgcggcttgtcaaccgtaacacgtatgatgtgttatctttgtaattctactcttttctgccatgcaaatcttgatcgttaaaagatcctagatactcagctacgttttccccgaaaaaaataggtttttataaacattttttacataacaagcttggggttggggatgaaaatgaaattgatatattatcatgttatcagatggtaatagtacctttgaatttttggcggtatgtgcaatagtgctggctgctatctgcgttttgtcctagatgtgacatgttaacctggttgggattgagaacactattttgaccaataaaaaaagagaactttgatggtactcattttattagggagaacatatgggaagttggttcaagctacacatcatcttaggcactttcaaatgagtcaatttccagcttctcatgccatgtttggctctttcccagatatgaaactccataaaacttgtggctttgtcgtcactctaaacttcaagcgtatgatttcattttagaatgtaagtatccatgcatagtttgagagaactttggtacatacatatttgttggcatcaagcaagcgtaacaaataatcgctagaaagcttttggattgtgacccccctgcagacaactcaatcactgttcaaatgttctagtgtattctatatgttaaactgatagtacttccattcctttttgaatgtggtaggatagacctgaaaatttcaattatctacttcggaaacttcaccttattggtgctcttaaaaagaagaacgctttgtctccatgcaatctgctagatagcttgattgtgaatatacagaatgccataagcacgggctaccaattagacaggaaaaggcttctgggagttcctgttagcatacagccttgcagttcagctatttacagtatattcgtaactggaaagggatcttgttggattccttttgatatgtttatggagaatgcaatggatgggagacatcttcatactatatcatcagttgaatatctgacagctagaaaagcagcagttgttctgtctaacctgaaaactgggagtgagaacatgtacagttctttcaaagacagttcctctattaaagcagttggaaatatgctacatcttatcgtggaagcctgtatcgcaaggaacttaatagatgcatctgcttatttctggcctggctatgtggttccacttaaagaatcctctccagttcaggcatctccatggtcatctttagtagaagggtctccacttatagaacttaaggatgcccttatggtcacacctgcttcgagtgtagaagagttggagaaattgtactcttttgcagtaagtgggtcaccggaggaaaagttggcagcttcgaagattttgtgtggtgcatcacttcttcgtggttggaacattcaggaacatgttgttcaaatggtgcttaagttgttatcgacattcctccctttggattctggatcagaagggcgatatgtacagcatatgcctatgctgcatgctcttgtatcaggaatttcttctattgacactgttcatattctctcactgtatggtctggtgccagaagtagcatctatgttaatgcctctctgtgagaattttggatctttacctccatctgatcataggagttgtaaacttgaagaggcttctgtgtactcagtattctcatgcgctttcctgtccctgcttcgcttgtggaaatttcatagaccacccattgagagtgctttatcaaggcgtggagtctctgtttggtcagagctccgtttggattttctcttgttattacgtaatagtcattcttctttgaaaaatctgtctaatgttactcaatcaagcatatttgaattagatccaccatttcaaaaaccattgtatattgattcatttccaaagctaagggcatggtacttccagaatcaagcttgcatagcttctacactttctagtgcttgcagcaggacaactgtcctccatgtggcaaacatgatactgaaaatcatatgccataataaagtgccaaaaggtggtgtcctgtctgtaaatcctcagtcaacagcaaattccactacgagtagttcacctgcaggcgtacaggaagatatgtgccagtggccaacacttccagcatgggaaattcttgaagctgttccttttgtgcttgaggctatgctaacttcatgcgctcatggaagactttcatcccgtgacttggttacaggtttaagagatcttgcagatttcttgcctgcttcacttgctgctattgtcagctacttctctgcagaagtcactagtggcatatggaagccagttatgttgaatggaatggactggccaagtccagctgcaactcttccagtagttgaatcggagataaaagaagctcttgcatttgctggtgttcatatcaatatctgtccacgtccacgttctgcgatgccaatgcttccattgccaatagcagcgctaatgagtttgtcaataacagtcaagatggaggaattcagccacctacacggcatcatttcccaaggaattgaaatttgtgcgacatctagttcatggcccactatgcaaattataggcgcattgtggtcccagaaggcacggcggtggcatgattttatcatcctgacttgttcgcagtcccccttcactcgagataacaccgcggtggcacaactgatcaggagctgcttctcgtctttcctggggcctttggttgatgggcgctcctgctccgtagcaaacagaggagttgcgaatctgctggggcagagttctgatgaaaaagcacacaggcttgctgtagctccagggtttctctacatgagatcctgccggttatttccaaacaacacctttgtttgtgaagagatcttggaggtggtcattgagagagcccatgcgctagcaaatgaccgcagttctgacagacctgcccgtttgaggtcagagtgtttgccgctatcagctgcgtcatccttggtagagcagatagcatcacttgcagcgactatgctttgccacgctggcggggtgaatctgattcgtctcctctacgagcagatcatgcccaccctgctgctttcaggtggagaagctaagctcggttccggtggtatggtatgcagcataatcgaaggatacacgctagcgtacgttctcctcttctcgggcgcaaccgtctggggagtcggagaaacgtcgccagcttacactttaatatacacatccaaaagacaacgggtcctcgacaggcacctggagttcatggccagggtgatggagggtaacattgtgctgggctgtggagatgccacgtggaggtcctacgttctgtgtttcgtcaacttgctggtcagcttcgtgcccgcgtgggtccctgaagtgaagctaaatacgctgcagaaactggcatctgggcttcggagatggcacgagggcgatcttgccctctctttgcttgagctagggggagccaagaccgtgacttcagtagttgaatctcttctgcggtgagctggtgctcaactgactgtatagttttctacgacaggttggtccatatacacattataacatgttaatgatctaaaaattcagtcatcagaaagatgaacagtacagttctaccgaagcttgattattcgtactgtcagtcagctaaagagatgtccagcagtttctatagtagttacatgatagtgtgtaattgatggaaatgtcatttactggcagtcgtccatttggagtgtataaaaatcatggaataattggaagaatgcagtattagaaaacagcattgctgggagccaggcgtctgttccatcggatgacccgtgcggatgtgccgttagccttgttgcttccatttggtaattcttgcgccgcctgttagcctttttacttccattgttttggttggtcgtgtcgactgatccacatagattactgtcttagagcatttccaag

SEQ ID NO: 59303 - DNA, 4418 bp, Zea Mays
gtccttcgatgccaacccaaataccccgcgcaatcagcacaacagaggtccccaaaaccagctcccacgcgggcgggccgatggctgccgtcgcggagctggagcggcgggtgatggcggcggtgaaggcctccgctgagcgcggggacccgccgctcctccaggccgccgaggccgcgcgctgcatccgcgaggcccccgccttcactccgggcggcctcgcgctctcgcaggcgttggtggcgaacctgtgcttcgcgcacaacacagccgccatgtggaagctgctggaccaggccatgttgtcccgcctggtggaccctctccacacgctcgccctccttaccccgagggtggtgccgaaccggcgggagcagccggaggcgtacatgctctacctcgagcttctcggtcggtacgcggtggctcctgtttacccggagcgcatggagaataaggatatgttagccaaatctattgacggtgctatgcagctttcgcatagatttggttttcaacatttggattttggacatactgttattttgtttgtgttgagtcttgtcgacatgctgattgattgcatcttagacgattgtggattgcccgtcacctctgctgatgaacatggcaacagaaaagatatgaattttaatggcaaggggagatcatttgacaggggagatgaacaccgtgaacatctaaggagaaagaatatacttatgtctattgaagttgttgagaaggtcactgcaaacaaaattacccaagtctttctgcggcttgtcaaccgtaacacgatagacctgaaaatttcaattatctacttcggaaacttcaccttattggtgctcttaaaaagaagaacgctttgtctccatgcaatctgctagatagcttgattgtgaatatacagaatgccataagcacgggctaccaattagacaggaaaaggcttctgggagttcctgttagcatacagccttgcagttcagctatttacagtatattcgtaactggaaagggatcttgttggattccttttgatatgtttatggagaatgcaatggatgggagacatcttcatactatatcatcagttgaatatctgacagaactatccaaaacacttcaagtgttgaatcgggcaacttggcaagagacctttcaggctttatggatttcggctttgcggctagtacagcgaggcccagatgcttcggaaggaccatttcctcatcttgattcacggatgtgcatgttgttggctattatccccttgtccattgcaactattgtgaaggaagaggcgggcaatctgaaaggggaaacaacctctgttataagaggacaattagtgtcttcacttcagattctgagacaattttttggtcttctttcaccacctccagcaactgtgcacttggcaaatgctgcagctagaaaagcagcagttgttctgtctaacctgaaaactgggagtgagaacatgtacagttctttcaaagacagttcctctattaaagcagttggaaatatgctacatcttatcgtggaagcctgtatcgcaaggaacttaatagatgcatctgcttatttctggcctggctatgtggttccacttaaagaatcctctccagttcaggcatctccatggtcatctttagtagaagggtctccacttatagaacttaaggatgcccttatggtcacacctgcttcgagaagagttggagaaattgtactcttttgcagtaagtgggtcaccggaggaaaagttggcagcttcgaagattttgtgtggtgcatcacttcttcgtggttggaacattcaggaacatgttgttcaaatggtgcttaagttgttatcgacattcctccctttggattctggatcagaagggcgatatgtacagcatatgcctatgctgcatgctcttgtatcaggaatttcttctattgacactgttcatattctctcactgtatggtctggtgccagaagtagcatctatgttaatgcctctctgtgagaattttggatctttacctccatctgatcataggagttgtaaacttgaagaggcttctgtgtactcagtattctcatgcgctttcctgtccctgcttcgcttgtggaaatttcatagaccacccattgagagtgctttatcaaggcgtggagtctctgtttggtcagagctccgtttggattttctcttgttattacgtaatagtcattcttctttgaaaaatctgtctaatgttactcaatcaagcatatttgaattagatccaccatttcaaaaaccattgtatattgattcatttccaaagctaagggcatggtacttccagaatcaagcttgcatagcttctacactttctagtgcttgcagcaggacaactgtcctccatgtggcaaacatgatactgaaaatcatatgccataataaagtgccaaaaggtggtgtcctgtctgtaaatcctcagtcaacagcaaattccactacgagtagttcacctgcaggcgtacaggaagatatgtgccagtggccaacacttccagcatgggaaattcttgaagctgttccttttgtgcttgaggctatgctaacttcatgcgctcatggaagactttcatcccgtgacttggttacaggtttaagagatcttgcagatttcttgcctgcttcacttgctgctattgtcagctacttctctgcagaagtcactagtggcatatggaagccagttatgttgaatggaatggactggccaagtccagctgcaactcttccagtagttgaatcggagataaaagaagctcttgcatttgctggtgttcatatcaatatctgtccacgtccacgttctgcgatgccaatgcttccattgccaatagcagcgctaatgagtttgtcaataacagtcaagatggaggaattcagccacctacacggcatcatttcccaaggaattgaaatttgtgcgacatctagttcatggcccactatgcaaattataggcgcattgtggtcccagaaggcacggcggtggcatgattttatcatcctgacttgttcgcagtcccccttcactcgagataacaccgcggtggcacaactgatcaggagctgcttctcgtctttcctggggcctttggttgatgggcgctcctgctccgtagcaaacagaggagttgcgaatctgctggggcagagttctgatgaaaaagcacacaggcttgctgtagctccagggtttctctacatgagatcctgccggttatttccaaacaacacctttgtttgtgaagagatcttggaggtggtcattgagagagcccatgcgctagcaaatgaccgcagttctgacagacctgcccgtttgaggtcagagtgtttgccgctatcagctgcgtcatccttggtagagcagatagcatcacttgcagcgactatgctttgccacgctggcggggtgaatctgattcgtctcctctacgagcagatcatgcccaccctgctgctttcaggtggagaagctaagctcggttccggtggtatggtatgcagcataatcgaaggatacacgctagcgtacgttctcctcttctcgggcgcaaccgtctggggagtcggagaaacgtcgccagcttacactttaatatacacatccaaaagacaacgggtcctcgacaggcacctggagttcatggccagggtgatggagggtaacattgtgctgggctgtggagatgccacgtggaggtcctacgttctgtgtttcgtcaacttgctggtcagcttcgtgcccgcgtgggtccctgaagtgaagctaaatacgctgcagaaactggcatctgggcttcggagatggcacgagggcgatcttgccctctctttgcttgagctagggggagccaagaccgtgacttcagtagttgaatctcttctgcggtgagctggtgctcaactgactgtatagttttctacgacaggttggtccatatacacattataacatgttaatgatctaaaaattcagtcatcagaaagatgaacagtacagttctaccgaagcttgattattcgtactgtcagtcagctaaagagatgtccagcagtttctatagtagttacatgatagtgtgtaattgatggaaatgtcatttactggcagtcgtccatttggagtgtataaaaatcatggaataattggaagaatgcagtattagaaaacagcattgctgggagccaggcgtctgttccatcggatgacccgtgcggatgtgccgttagccttgttgcttccatttggtaattcttgcgccgcctgttagcctttttacttccattgttttggttggtcgtgtcgactgatccacatagattactgtcttagagcatttccaag

SEQ ID NO: 59304 - DNA, 3633 bp, Zea Mays
gtcaatcttaagctcaggttcctcggcagttcttctgaatggagtcccaggttagccaaatctattgacggtgctatgcagctttcgcatagatttggttttcaacatttggattttggacatactgttattttgtttgtgttgagtcttgtcgacatgctgattgattgcatcttagacgattgtggattgcccgtcacctctgctgatgaacatggcaacagaaaagatatgaattttaatggcaaggggagatcatttgacaggggagatgaacaccgtgaacatctaaggagaaagaatatacttatgtctattgaagttgttgagaaggatagacctgaaaatttcaattatctacttcggaaacttcaccttattggtgctcttaaaaagaagaacgctttgtctccatgcaatctgctagatagcttgattgtgaatatacagaatgccataagcacgggctaccaattagacaggaaaaggcttctgggagttcctgttagcatacagccttgcagttcagctatttacagtatattcgtaactggaaagggatcttgttggattccttttgatatgtttatggagaatgcaatggatgggagacatcttcatactatatcatcagttgaatatctgacagctagaaaagcagcagttgttctgtctaacctgaaaactgggagtgagaacatgtacagttctttcaaagacagttcctctattaaagcagttggaaatatgctacatcttatcgtggaagcctgtatcgcaaggaacttaatagatgcatctgcttatttctggcctggctatgtggttccacttaaagaatcctctccagttcaggcatctccatggtcatctttagtagaagggtctccacttatagaacttaaggatgcccttatggtcacacctgcttcgagtgtagaagagttggagaaattgtactcttttgcagtaagtgggtcaccggaggaaaagttggcagcttcgaagattttgtgtggtgcatcacttcttcgtggttggaacattcaggaacatgttgttcaaatggtgcttaagttgttatcgacattcctccctttggattctggatcagaagggcgatatgtacagcatatgcctatgctgcatgctcttgtatcaggaatttcttctattgacactgttcatattctctcactgtatggtctggtgccagaagtagcatctatgttaatgcctctctgtgagaattttggatctttacctccatctgatcataggagttgtaaacttgaagaggcttctgtgtactcagtattctcatgcgctttcctgtccctgcttcgcttgtggaaatttcatagaccacccattgagagtgctttatcaaggcgtggagtctctgtttggtcagagctccgtttggattttctcttgttattacgtaatagtcattcttctttgaaaaatctgtctaatgttactcaatcaagcatatttgaattagatccaccatttcaaaaaccattgtatattgattcatttccaaagctaagggcatggtacttccagaatcaagcttgcatagcttctacactttctagtgcttgcagcaggacaactgtcctccatgtggcaaacatgatactgaaaatcatatgccataataaagtgccaaaaggtggtgtcctgtctgtaaatcctcagtcaacagcaaattccactacgagtagttcacctgcaggcgtacaggaagatatgtgccagtggccaacacttccagcatgggaaattcttgaagctgttccttttgtgcttgaggctatgctaacttcatgcgctcatggaagactttcatcccgtgacttggttacaggtttaagagatcttgcagatttcttgcctgcttcacttgctgctattgtcagctacttctctgcagaagtcactagtggcatatggaagccagttatgttgaatggaatggactggccaagtccagctgcaactcttccagtagttgaatcggagataaaagaagctcttgcatttgctggtgttcatatcaatatctgtccacgtccacgttctgcgatgccaatgcttccattgccaatagcagcgctaatgagtttgtcaataacagtcaagatggaggaattcagccacctacacggcatcatttcccaaggaattgaaatttgtgcgacatctagttcatggcccactatgcaaattataggcgcattgtggtcccagaaggcacggcggtggcatgattttatcatcctgacttgttcgcagtcccccttcactcgagataacaccgcggtggcacaactgatcaggagctgcttctcgtctttcctggggcctttggttgatgggcgctcctgctccgtagcaaacagaggagttgcgaatctgctggggcagagttctgatgaaaaagcacacaggcttgctgtagctccagggtttctctacatgagatcctgccggttatttccaaacaacacctttgtttgtgaagagatcttggaggtggtcattgagagagcccatgcgctagcaaatgaccgcagttctgacagacctgcccgtttgaggtcagagtgtttgccgctatcagctgcgtcatccttggtagagcagatagcatcacttgcagcgactatgctttgccacgctggcggggtgaatctgattcgtctcctctacgagcagatcatgcccaccctgctgctttcaggtggagaagctaagctcggttccggtggtatggtatgcagcataatcgaaggatacacgctagcgtacgttctcctcttctcgggcgcaaccgtctggggagtcggagaaacgtcgccagcttacactttaatatacacatccaaaagacaacgggtcctcgacaggcacctggagttcatggccagggtgatggagggtaacattgtgctgggctgtggagatgccacgtggaggtcctacgttctgtgtttcgtcaacttgctggtcagcttcgtgcccgcgtgggtccctgaagtgaagctaaatacgctgcagaaactggcatctgggcttcggagatggcacgagggcgatcttgccctctctttgcttgagctagggggagccaagaccgtgacttcagtagttgaatctcttctgcggtgagctggtgctcaactgactgtatagttttctacgacaggttggtccatatacacattataacatgttaatgatctaaaaattcagtcatcagaaagatgaacagtacagttctaccgaagcttgattattcgtactgtcagtcagctaaagagatgtccagcagtttctatagtagttacatgatagtgtgtaattgatggaaatgtcatttactggcagtcgtccatttggagtgtataaaaatcatggaataattggaagaatgcagtattagaaaacagcattgctgggagccaggcgtctgttccatcggatgacccgtgcggatgtgccgttagccttgttgcttccatttggtaattcttgcgccgcctgttagcctttttacttccattgttttggttggtcgtgtcgactgatccacatagattactgtcttagagcatttccaag

SEQ ID NO: 59305 - DNA, 4202 bp, Zea Mays
tctcagcatcaaccggactcaagattaattttaacaaatcttgtctcctgcctatcaatttggatcatcagaaaacaactcatttggcggcggtgtttggctgtcagattggaactttccctttcacatacttgggtcttccgttgggaatcacaaaaccaagaatcaaagattatctccctctcatcaacaaaattgaaagaacaaagaaggttggattccaccagcatctggctctctttggcaggttagccaaatctattgacggtgctatgcagctttcgcatagatttggttttcaacatttggattttggacatactgttattttgtttgtgttgagtcttgtcgacatgctgattgattgcatcttagacgattgtggattgcccgtcacctctgctgatgaacatggcaacagaaaagatatgaattttaatggcaaggggagatcatttgacaggggagatgaacaccgtgaacatctaaggagaaagaatatacttatgtctattgaagttgttgagaaggtcactgcaaacaaaattacccaagtctttctgcggcttgtcaaccgtaacacacctgaaaatttcaattatctacttcggaaacttcaccttattggtgctcttaaaaagaagaacgctttgtctccatgcaatctgctagatagcttgattgtgaatatacagaatgccataagcacgggctaccaattagacaggaaaaggcttctgggagttcctgttagcatacagccttgcagttcagctatttacagtatattcgtaactggaaagggatcttgttggattccttttgatatgtttatggagaatgcaatggatgggagacatcttcatactatatcatcagttgaatatctgacagaactatccaaaacacttcaagtgttgaatcgggcaacttggcaagagacctttcaggctttatggatttcggctttgcggctagtacagcgaggcccagatgcttcggaaggaccatttcctcatcttgattcacggatgtgcatgttgttggctattatccccttgtccattgcaactattgtgaaggaagaggcgggcaatctgaaaggggaaacaacctctgttataagaggacaattagtgtcttcacttcagattctgagacaattttttggtcttctttcaccacctccagcaactgtgcacttggcaaatgctgcagctagaaaagcagcagttgttctgtctaacctgaaaactgggagtgagaacatgtacagttctttcaaagacagttcctctattaaagcagttggaaatatgctacatcttatcgtggaagcctgtatcgcaaggaacttaatagatgcatctgcttatttctggcctggctatgtggttccacttaaagaatcctctccagttcaggcatctccatggtcatctttagtagaagggtctccacttatagaacttaaggatgcccttatggtcacacctgcttcgagtgtagaagagttggagaaattgtactcttttgcagtaagtgggtcaccggaggaaaagttggcagcttcgaagattttgtgtggtgcatcacttcttcgtggttggaacattcaggaacatgttgttcaaatggtgcttaagttgttatcgacattcctccctttggattctggatcagaagggcgatatgtacagcatatgcctatgctgcatgctcttgtatcaggaatttcttctattgacactgttcatattctctcactgtatggtctggtgccagaagtagcatctatgttaatgcctctctgtgagaattttggatctttacctccatctgatcataggagttgtaaacttgaagaggcttctgtgtactcagtattctcatgcgctttcctgtccctgcttcgcttgtggaaatttcatagaccacccattgagagtgctttatcaaggcgtggagtctctgtttggtcagagctccgtttggattttctcttgttattacgtaatagtcattcttctttgaaaaatctgtctaatgttactcaatcaagcatatttgaattagatccaccatttcaaaaaccattgtatattgattcatttccaaagctaagggcatggtacttccagaatcaagcttgcatagcttctacactttctagtgcttgcagcaggacaactgtcctccatgtggcaaacatgatactgaaaatcatatgccataataaagtgccaaaaggtggtgtcctgtctgtaaatcctcagtcaacagcaaattccactacgagtagttcacctgcaggcgtacaggaagatatgtgccagtggccaacacttccagcatgggaaattcttgaagctgttccttttgtgcttgaggctatgctaacttcatgcgctcatggaagactttcatcccgtgacttggttacaggtttaagagatcttgcagatttcttgcctgcttcacttgctgctattgtcagctacttctctgcagaagtcactagtggcatatggaagccagttatgttgaatggaatggactggccaagtccagctgcaactcttccagtagttgaatcggagataaaagaagctcttgcatttgctggtgttcatatcaatatctgtccacgtccacgttctgcgatgccaatgcttccattgccaatagcagcgctaatgagtttgtcaataacagtcaagatggaggaattcagccacctacacggcatcatttcccaaggaattgaaatttgtgcgacatctagttcatggcccactatgcaaattataggcgcattgtggtcccagaaggcacggcggtggcatgattttatcatcctgacttgttcgcagtcccccttcactcgagataacaccgcggtggcacaactgatcaggagctgcttctcgtctttcctggggcctttggttgatgggcgctcctgctccgtagcaaacagaggagttgcgaatctgctggggcagagttctgatgaaaaagcacacaggcttgctgtagctccagggtttctctacatgagatcctgccggttatttccaaacaacacctttgtttgtgaagagatcttggaggtggtcattgagagagcccatgcgctagcaaatgaccgcagttctgacagacctgcccgtttgaggtcagagtgtttgccgctatcagctgcgtcatccttggtagagcagatagcatcacttgcagcgactatgctttgccacgctggcggggtgaatctgattcgtctcctctacgagcagatcatgcccaccctgctgctttcaggtggagaagctaagctcggttccggtggtatggtatgcagcataatcgaaggatacacgctagcgtacgttctcctcttctcgggcgcaaccgtctggggagtcggagaaacgtcgccagcttacactttaatatacacatccaaaagacaacgggtcctcgacaggcacctggagttcatggccagggtgatggagggtaacattgtgctgggctgtggagatgccacgtggaggtcctacgttctgtgtttcgtcaacttgctggtcagcttcgtgcccgcgtgggtccctgaagtgaagctaaatacgctgcagaaactggcatctgggcttcggagatggcacgagggcgatcttgccctctctttgcttgagctagggggagccaagaccgtgacttcagtagttgaatctcttctgcggtgagctggtgctcaactgactgtatagttttctacgacaggttggtccatatacacattataacatgttaatgatctaaaaattcagtcatcagaaagatgaacagtacagttctaccgaagcttgattattcgtactgtcagtcagctaaagagatgtccagcagtttctatagtagttacatgatagtgtgtaattgatggaaatgtcatttactggcagtcgtccatttggagtgtataaaaatcatggaataattggaagaatgcagtattagaaaacagcattgctgggagccaggcgtctgttccatcggatgacccgtgcggatgtgccgttagccttgttgcttccatttggtaattcttgcgccgcctgttagcctttttacttccattgttttggttggtcgtgtcgactgatccacatagattactgtcttagagcatttccaag

SEQ ID NO: 59306 - DNA, 3774 bp, Zea Mays
aattacccaagtctttctgcggcttgtcaaccgtaacacacctgaaaatttcaattatctacttcggaaacttcaccttattggtgctcttaaaaagaagaacgctttgtctccatgcaatctgctagatagcttgattgtgaatatacagaatgccataagcacgggctaccaattagacaggaaaaggcttctgggagttcctgttagcatacagccttgcagttcagctatttacagtatattcgtaactggaaagggatcttgttggattccttttgatatgtttatggagaatgcaatggatgggagacatcttcatactatatcatcagttgaatatctgacagttggttgacagaactatccaaaacacttcaagtgttgaatcgggcaacttggcaagagacctttcaggctttatggatttcggctttgcggctagtacagcgaggcccagatgcttcggaaggaccatttcctcatcttgattcacggatgtgcatgttgttggctattatccccttgtccattgcaactattgtgaaggaagaggcgggcaatctgaaaggggaaacaacctctgttataagaggacaattagtgtcttcacttcagattctgagacaattttttggtcttctttcaccacctccagcaactgtgcacttggcaaatgctgcagctagaaaagcagcagttgttctgtctaacctgaaaactgggagtgagaacatgtacagttctttcaaagacagttcctctattaaagcagttggaaatatgctacatcttatcgtggaagcctgtatcgcaaggaacttaatagatgcatctgcttatttctggcctggctatgtggttccacttaaagaatcctctccagttcaggcatctccatggtcatctttagtagaagggtctccacttatagaacttaaggatgcccttatggtcacacctgcttcgaggtgataaatcataggaatatactaattttagagtttttttggttgtatgtctgttgactagcctgattcataatctcattcttattttggtttcttaattcttagtgtagaagagttggagaaattgtactcttttgcagtaagtgggtcaccggaggaaaagttggcagcttcgaagattttgtgtggtgcatcacttcttcgtggttggaacattcaggaacatgttgttcaaatggtgcttaagttgttatcgacattcctccctttggattctggatcagaagggcgatatgtacagcatatgcctatgctgcatgctcttgtatcaggaatttcttctattgacactgttcatattctctcactgtatggtctggtgccagaagtagcatctatgttaatgcctctctgtgagaattttggatctttacctccatctgatcataggagttgtaaacttgaagaggcttctgtgtactcagtattctcatgcgctttcctgtccctgcttcgcttgtggaaatttcatagaccacccattgagagtgctttatcaaggcgtggagtctctgtttggtcagagctccgtttggattttctcttgttattacgtaatagtcattcttctttgaaaaatctgtctaatgttactcaatcaagcatatttgaattagatccaccatttcaaaaaccattgtatattgattcatttccaaagctaagggcatggtacttccagaatcaagcttgcatagcttctacactttctagtgcttgcagcaggacaactgtcctccatgtggcaaacatgatactgaaaatcatatgccataataaagtgccaaaaggtggtgtcctgtctgtaaatcctcagtcaacagcaaattccactacgagtagttcacctgcaggcgtacaggaagatatgtgccagtggccaacacttccagcatgggaaattcttgaagctgttccttttgtgcttgaggctatgctaacttcatgcgctcatggaagactttcatcccgtgacttggttacaggtttaagagatcttgcagatttcttgcctgcttcacttgctgctattgtcagctacttctctgcagaagtcactagtggcatatggaagccagttatgttgaatggaatggactggccaagtccagctgcaactcttccagtagttgaatcggagataaaagaagctcttgcatttgctggtgttcatatcaatatctgtccacgtccacgttctgcgatgccaatgcttccattgccaatagcagcgctaatgagtttgtcaataacagtcaagatggaggaattcagccacctacacggcatcatttcccaaggaattgaaatttgtgcgacatctagttcatggcccactatgcaaattataggcgcattgtggtcccagaaggcacggcggtggcatgattttatcatcctgacttgttcgcagtcccccttcactcgagataacaccgcggtggcacaactgatcaggagctgcttctcgtctttcctggggcctttggttgatgggcgctcctgctccgtagcaaacagaggagttgcgaatctgctggggcagagttctgatgaaaaagcacacaggcttgctgtagctccagggtttctctacatgagatcctgccggttatttccaaacaacacctttgtttgtgaagagatcttggaggtggtcattgagagagcccatgcgctagcaaatgaccgcagttctgacagacctgcccgtttgaggtcagagtgtttgccgctatcagctgcgtcatccttggtagagcagatagcatcacttgcagcgactatgctttgccacgctggcggggtgaatctgattcgtctcctctacgagcagatcatgcccaccctgctgctttcaggtggagaagctaagctcggttccggtggtatggtatgcagcataatcgaaggatacacgctagcgtacgttctcctcttctcgggcgcaaccgtctggggagtcggagaaacgtcgccagcttacactttaatatacacatccaaaagacaacgggtcctcgacaggcacctggagttcatggccagggtgatggagggtaacattgtgctgggctgtggagatgccacgtggaggtcctacgttctgtgtttcgtcaacttgctggtcagcttcgtgcccgcgtgggtccctgaagtgaagctaaatacgctgcagaaactggcatctgggcttcggagatggcacgagggcgatcttgccctctctttgcttgagctagggggagccaagaccgtgacttcagtagttgaatctcttctgcggtgagctggtgctcaactgactgtatagttttctacgacaggttggtccatatacacattataacatgttaatgatctaaaaattcagtcatcagaaagatgaacagtacagttctaccgaagcttgattattcgtactgtcagtcagctaaagagatgtccagcagtttctatagtagttacatgatagtgtgtaattgatggaaatgtcatttactggcagtcgtccatttggagtgtataaaaatcatggaataattggaagaatgcagtattagaaaacagcattgctgggagccaggcgtctgttccatcggatgacccgtgcggatgtgccgttagccttgttgcttccatttggtaattcttgcgccgcctgttagcctttttacttccattgttttggttggtcgtgtcgactgatccacatagattactgtcttagagcatttccaag

SEQ ID NO: 59307 - DNA, 2044 bp, Zea Mays
gaactatccgacaattatccggtacctacccgaatagtatctattatccgtttcttacccgtctggattattacccggtctcgtcctatatccgtctcgaatcttaactacctgtatctaatcctgtatccgaaaaaaatatattaggctaggatatgagatgatcttgtatccggctatatccgtcccattttttcatcctactcagtccctctccctccacacgcggcaaggccgcaagaatcattttgtgaaaaaaaaaactaaaaaaaaatacaactaggttcatccactttagggcacctccctcacccgaagagctgatgctgacagctccaccgctcgccgccgccgcccgccgcgccgccacagctgccgcatgtggcgccgcccaccggctcctccttccagtttgctttctatcctccaacccctctgccccgagcactctcgtaccgcgccgccgcttcggccacatgtcgcaggagtgcatggccccgcgcgctcccctaccgccggtcggacggaactttgcggtggctgtgggggatgagatcctgtatggagatgccccggagctggttgtggtgtcgttctaccggttcgctgatttccccgaccatgctgcattccggctgccgcttaaggagctttgcgaggagctggtggcattatccttgcacctgagggaatcaatggtagtatatgtggaaccccagttgctgtggacaaaatcttaaactttattcaagaagacggtcgtttaaaaggattgagaatgatccagtcacctgttactccagaggatgaggccatacatcatggacataccagtcactcccctgttggtgctggggaagatgcaccattccgatgggatcatgtccgtgtcaaattgaaaaaggagatagtgacgtttggagacccaggtgttatgccaactaaaatcgttgggaaatatgttaagccaaaagactggaatgacttgataagtgatccagacactgtcatcattgatgtgcgtaacatgtatgagatacgcataggaaagtttaagaaagctgtcgatccacgtacaaactcattcagagagtttcctacttgggttgacgatcaatttcaattggttcaatcaggcaccctagggtcagggggagatgataatggaaccggtgaaccatcggcagaccttaatgccagcaaatccaaacagctaccaagagttgctatgtactgcactggtggtatccgatgtgagaaggcatcaagctttctcctcggcaagggctttaaagaggtttatcatttggaaggcgggatattgaagtatctggaggaaatcccaaaggccgaaagtttgtgggagggtgaatgctttgtgtttgacaagcgtgtctctgtggggcatggattggcccaaggcacccacaaactttgctacgggtgtaagcagccagtcagcgatgaggacatgttgtcgcctcactgggagtacggcgtctcttgcccgcattgcttcgcaacgaaatccgaggaggagaaggaacgggctagggctcggcagcggcagttcgagacctttggagtgataggtgggcctcatatgggcaagagtccgagagggtctgccgctaacaatgcagtggagttcatacagttgcccaagtcagtgtaactttaattatccatctgaaacttttagattgaagtgttgttgacaaagtgagggaatcaaccagattggcaatgattgccatattatgatcttttccgatgcttaagtttttgtcggaaaaagtggtgtcgataccatttgttttagattgtaacctcgctaactcccggagatgctaaggtcctgttcggttgtttagaattggagacccgaattaattcctagccggattatttctctaatttatatagattttgatgagctggaatgaatcctggcttattccggtacaaccgaacgggccctaaagaattttcaatgcagggggaacaaatataagcatgtttttcggattaaagtcagttgttc

SEQ ID NO: 59308 - DNA, 1787 bp, Zea Mays
aatatattaggctaggatatgagatgatcttgtatccggctatatccgtcccattttttcatcctactcagtccctctccctccacacgcggcaaggccgcaagaatcattttgtgaaaaaaaaaactaaaaaaaaatacaactaggttcatccactttagggcacctccctcacccgaagagctgatgctgacagctccaccgctcgccgccgccgcccgccgcgccgccacagctgccgcatgtggcgccgcccaccggctcctccttccagtttgctttctatcctccaacccctctgccccgagcactctcgtaccgcgccgccgcttcggccacatgtcgcaggagtgcatggccccgcgcgctcccctaccgccggtcggacggaactttgcggtggctgtgggggatgagatcctgtatggagatgccccggagctggttgtggtgtcgttctaccggttcgctgatttccccgaccatgctgcattccggctgccgcttaaggagctttgcgaggagctgcgtgtttcaggtggcattatccttgcacctgagggaatcaatggtagtatatgtggaaccccagttgctgtggacaaaatcttaaactttattcaagaagacggtcgtttaaaaggattgagaatgatccagtcacctgttactccagaggatgaggccatacatcatggacataccagtcactcccctgttggtgctggggaagatgcaccattccgatgggatcatgtccgtgtcaaattgaaaaaggagatagtgacgtttggagacccaggtgttatgccaactaaaatcgttgggaaatatgttaagccaaaagactggaatgacttgataagtgatccagacactgcaccctagggtcagggggagatgataatggaaccggtgaaccatcggcagaccttaatgccagcaaatccaaacagctaccaagagttgctatgtactgcactggtggtatccgatgtgagaaggcatcaagctttctcctcggcaagggctttaaagaggtttatcatttggaaggcgggatattgaagtatctggaggaaatcccaaaggccgaaagtttgtgggagggtgaatgctttgtgtttgacaagcgtgtctctgtggggcatggattggcccaaggcacccacaaactttgctacgggtgtaagcagccagtcagcgatgaggacatgttgtcgcctcactgggagtacggcgtctcttgcccgcattgcttcgcaacgaaatccgaggaggagaaggaacgggctagggctcggcagcggcagttcgagacctttggagtgataggtgggcctcatatgggcaagagtccgagagggtctgccgctaacaatgcagtggagttcatacagttgcccaagtcagtgtaactttaattatccatctgaaacttttagattgaagtgttgttgacaaagtgagggaatcaaccagattggcaatgattgccatattatgatcttttccgatgcttaagtttttgtcggaaaaagtggtgtcgataccatttgttttagattgtaacctcgctaactcccggagatgctaaggtcctgttcggttgtttagaattggagacccgaattaattcctagccggattatttctctaatttatatagattttgatgagctggaatgaatcctggcttattccggtacaaccgaacgggccctaaagaattttcaatgcagggggaacaaatataagcatgtttttcggattaaagtcagttgttc

SEQ ID NO: 59309 - DNA, 1682 bp, Zea Mays
ggccgcaagaatcattttgtgaaaaaaaaaactaaaaaaaaatacaactaggttcatccactttagggcacctccctcacccgaagagctgatgctgacagctccaccgctcgccgccgccgcccgccgcgccgccacagctgccgcatgtggcgccgcccaccggctcctccttccagtttgctttctatcctccaacccctctgccccgagcactctcgtaccgcgccgccgcttcggccacatgtcgcaggagtgcatggccccgcgcgctcccctaccgccggtcggacggaactttgcggtggctgtgggggatgagatcctgtatggagatgccccggagctggttgtggtgtcgttctaccggttcgctgatttccccgaccatgctgcattccggctgccgcttaaggagctttgcgaggagctggtggcattatccttgcacctgagggaatcaatggtagtatatgtggaaccccagttgctgtggacaaaatcttaaactttattcaagaagacggtcgtttaaaaggattgagaatgatccagtcacctgttactccagaggatgaggccatacatcatggacataccagtcactcccctgttggtgctggggaagatgcaccattccgatgggatcatgtccgtgtcaaattgaaaaaggagatagtgacgtttggagacccaggtgttatgccaactaaaatcgttgggaaatatgttaagccaaaagactggaatgacttgataagtgatccagacactgcaccctagggtcagggggagatgataatggaaccggtgaaccatcggcagaccttaatgccagcaaatccaaacagctaccaagagttgctatgtactgcactggtggtatccgatgtgagaaggcatcaagctttctcctcggcaagggctttaaagaggtttatcatttggaaggcgggatattgaagtatctggaggaaatcccaaaggccgaaagtttgtgggagggtgaatgctttgtgtttgacaagcgtgtctctgtggggcatggattggcccaaggcacccacaaactttgctacgggtgtaagcagccagtcagcgatgaggacatgttgtcgcctcactgggagtacggcgtctcttgcccgcattgcttcgcaacgaaatccgaggaggagaaggaacgggctagggctcggcagcggcagttcgagacctttggagtgataggtgggcctcatatgggcaagagtccgagagggtctgccgctaacaatgcagtggagttcatacagttgcccaagtcagtgtaactttaattatccatctgaaacttttagattgaagtgttgttgacaaagtgagggaatcaaccagattggcaatgattgccatattatgatcttttccgatgcttaagtttttgtcggaaaaagtggtgtcgataccatttgttttagattgtaacctcgctaactcccggagatgctaaggtcctgttcggttgtttagaattggagacccgaattaattcctagccggattatttctctaatttatatagattttgatgagctggaatgaatcctggcttattccggtacaaccgaacgggccctaaagaattttcaatgcagggggaacaaatataagcatgtttttcggattaaagtcagttgttc

SEQ ID NO: 59310 - DNA, 2038 bp, Zea Mays
cttcctacaagtgccgttggcgtggacgccgccgcctcctcgcgctctctgtggcggacatcaaatcctctcggagaacagccaaacgagccaccaaaatgtggcgctccgggcaggggaggtgctgtccaagttggcgtcgttcggggtgaaggtcctactggacgagcggagaggggagtcgtcatcggagaggaggcgcgccagggcggtggagttgcgcaccatcttcactaggctcggcccaaccttcgtcaaaattggacagggcctgtccacgcgccccgacctctgcccggccgagtacctcgaggagctcgccgagctgcaggaaggccaaaatgcaagaaggtttaagaaattatatgccgataagcaagatgtattagtgcctgatatattttgggattacacaagtgcaaaggttctaacaatggagtggattgagggtgtaaaattaaaccaacaagcagttattgaaagtcaaggattgaaggttctggatttggtcaacattggtatccagtgtagcttgagacagcttctggagtatggttactttcatgcagaccctcatcctggtaatatattagcaacacctgaggggaaactggcttttcttgattttggcatgatgagtgaaacaccagaggatgcgagggtagccattataggacatgttgtccacttagtcaacagggactacgaagcaatggctcgtgattattatgcactagatttcttggaacccgatgtagatgtttccccgattgtgcctgctctcaagaattttttcgatgatgcactaaatgcaacagtgagtgagttgaacttcaagacaatagttgatggcctaggtgctgttctctatcagtacccattcaatgtaccagcatactatgcattgatactgcgatcgctcaccgtactggaaggtttagcactctatgctgaccctgattttaaggtgcttgctgcatcatacccttactttgcgaaaaggctactgactgatcccaacccatatctcagagatgctttaattgagcttgtattcaaggatggaaaattcaggcaagtacctgctcatctgtatatattttatactcttcacagatcaaagcaccactcaggatagcgttgtttaatgttcacgtctctgcagatggaataggcttgaaaatcttcttgttcaagggcgccaagatagggagtttgcagccaaagatgcactgcagcctgttctaaagcttctccttggtcctggtggggaggaattgcgtgcgttagttgtgaaagaggcagttcgtgtgacagaagccatcgccattggaacactggtcgattcatacaatgcagctccatcatttttgaagccattaatttccagcggcaatctagctgaaccctttaagtttagtgagactgaacaagaacagatgatggagctccgagaccaggttttcagagtatggggtcttttgagatcctcaaataactttgatccgagccttttgcagccaatcgttcaggttctacaagaaccagaggcccgtgtcttgggttctcgtgtcgcaggtggtgtaacacagcgccttgcggcacgtctgctgcaacagcttctcaggacccctcctgctcctggatcttcttagcagatatatagatataggctcgtatgattgtatgaagcatgtaaattgacacgatatttttcacaggaaatgagaaggaagcacaacccagaattcgagtatatagctagtttcttggttctaagtggataaagacattgtgcatcgagctttgtccagcagaccgtgtatatagttgtgtaaaaaacattgttttgtgctgtagattacactgtttacggagtgaagattgaaatgataagacatggacgagtgagctgctaagatgtcacgcagcttagatccaccgctgttcaccctgtaaatcatgatacgcggaccaattatgcatttacgcgtatgtgtagccctaaaacttctacgtgtcaaaataaaagtacata

SEQ ID NO: 59311 - DNA, 2364 bp, Zea Mays
gtgccgttggcgtggacgccgccgcctcctcgcgctctctgtggcggacatcaaatcctctcggagaacagccaaacgagccaccaaaatgtggcgctccgggcaggggaggtgctgtccaagttggcgtcgttcggggtgaaggtcctactggacgagcggagaggggagtcgtcatcggagaggaggcgcgccagggcggtggagttgcgcaccatcttcactaggctcggcccaaccttcgtcaaaattggacagggcctgtccacgcgccccgacctctgcccggccgagtacctcgaggagctcgccgagctgcaggattcacttcccacatttccggatgaagaggcatttgcatgtattgagagagagcttggcttcacgcttgattcaatctactcgacaatttcaccttcccccattgcagcggctagtttaggtcaagtttataaagcacggttgaaatactctgggaagctggtagctgtgaaggtgcagagacccagtattgagaaagccattgggcttgatttttatctacttagaggacttggctttcttataaataagtatgttgacattgtaaccagcgatgttgttgccctcatcgatgaatttgctcgaagagtttttcaagagcttaattatgttcaggaaggccaaaatgcaagaaggtttaagaaattatatgccgataagcaagatgtattagtgcctgatatattttgggattacacaagtgcaaaggttctaacaatggagtggattgagggtgtaaaattaaaccaacaagcagttattgaaagtcaaggattgaaggttctggatttggtcaacattggtatccagtgtagcttgagacagcttctggagtatggttactttcatgcagaccctcatcctggtaatatattagcaacacctgaggggaaactggcttttcttgattttggcatgatgagtgaaacaccagaggatgcgagggtagccattataggacatgttgtccacttagtcaacagggactacgaagcaatggctcgtgattattatgcactagatttcttggaacccgatgtagatgtttccccgattgtgcctgctctcaagaattttttcgatgatgcactaaatgcaacagtgagtgagttgaacttcaagacaatagttgatggcctaggtgctgttctctatcagtacccattcaatgtaccagcatactatgcattgatactgcgatcgctcaccgtactggaaggtttagcactctatgctgaccctgattttaaggtgcttgctgcatcatacccttactttgcgaaaaggctactgactgatcccaacccatatctcagagatgctttaattgagcttgtattcaaggatggaaaattcaggcaagtacctgctcatctgtatatattttatactcttcacagatcaaagcaccactcaggatagcgttgtttaatgttcacgtctctgcagatggaataggcttgaaaatcttcttgttcaagggcgccaagatagggagtttgcagccaaagatgcactgcagcctgttctaaagcttctccttggtcctggtggggaggaattgcgtgcgttagttgtgaaagaggcagttcgtgtgacagaagccatcgccattggaacactggtcgattcatacaatgcagctccatcatttttgaagccattaatttccagcggcaatctagctgaaccctttaagtttagtgagactgaacaagaacagatgatggagctccgagaccaggttttcagagtatggggtcttttgagatcctcaaataactttgatccgagccttttgcagccaatcgttcaggttctacaagaaccagaggcccgtgtcttgggttctcgtgtcgcaggtggtgtaacacagcgccttgcggcacgtctgctgcaacagcttctcaggacccctcctgctcctggatcttcttagcagatatatagatataggctcgtatgattgtatgaagcatgtaaattgacacgatatttttcacaggaaatgagaaggaagcacaacccagaattcgagtatatagctagtttcttggttctaagtggataaagacattgtgcatcgagctttgtccagcagaccgtgtatatagttgtgtaaaaaacattgttttgtgctgtagattacactgtttacggagtgaagattgaaatgataagacatggacgagtgagctgctaagatgtcacgcagcttagatccaccgctgttcaccctgtaaatcatgatacgcggaccaattatgcatttacgcgtatgtgtagccctaaaacttctacgtgtcaaaataaaagtacata

SEQ ID NO: 59312 - DNA, 2666 bp, Zea Mays
gcgctctctgtggcggacatcaaatcctctcggagaacagccaaacgagccaccaaaatgtaagaaaacgcacgccccggcgctggccgctagtcaccccaaagctccgcctccgcaccttctctcactcgcccagccgcggctatggcggccaccacatccacggcggcggcggcagtatccttctccctcccctcaccaccgcactgccgcggggcccggcgccgccgcgcgccttccctcctccgtgccgcctccaccgccgcgcccccctcccccgacctctccatccagctctcgccccgcgcgtccccgcccgcgtctaccaacggcgccgccaccgcgcttggaccccccgtgtccgcctcctttgcccgtgaccgcgccgaggacctgcaggccgaggcccgcgcgatggcccgcgccgctggcgccacagtctacagtcccgagctcctcgccgcccgctacggctcccgccccttcaaggtggcgctccgggcaggggaggtgctgtccaagttggcgtcgttcggggtgaaggtcctactggacgagcggagaggggagtcgtcatcggagaggaggcgcgccagggcggtggagttgcgcaccatcttcactaggctcggcccaaccttcgtcaaaattggacagggcctgtccacgcgccccgacctctgcccggccgagtacctcgaggagctcgccgagctgcaggattcacttcccacatttccggatgaagaggcatttgcatgtattgagagagagcttggcttcacgcttgattcaatctactcgacaatttcaccttcccccattgcagcggctagtttaggtcaagtttataaagcacggttgaaatactctgggaagctggtagctgtgaaggtgcagagacccagtattgagaaagccattgggcttgatttttatctacttagaggacttggctttcttataaataagtatgttgacattgtaaccagcgatgttgttgccctcatcgatgaatttgctcgaagagtttttcaagagcttaattatgttcaggaaggccaaaatgcaagaaggtttaagaaattatatgccgataagcaagatgtattagtgcctgatatattttgggattacacaagtgcaaaggttctaacaatggagtggattgagggtgtaaaattaaaccaacaagcagttattgaaagtcaaggattgaaggttctggatttggtcaacattggtatccagtgtagcttgagacagcttctggagtatggttactttcatgcagaccctcatcctggtaatatattagcaacacctgaggggaaactggcttttcttgattttggcatgatgagtgaaacaccagaggatgcgagggtagccattataggacatgttgtccacttagtcaacagggactacgaagcaatggctcgtgattattatgcactagatttcttggaacccgatgtagatgtttccccgattgtgcctgctctcaagaattttttcgatgatgcactaaatgcaacagtgagtgagttgaacttcaagacaatagttgatggcctaggtgctgttctctatcagtacccattcaatgcatactatgcattgatactgcgatcgctcaccgtactggaaggtttagcactctatgctgaccctgattttaaggtgcttgctgcatcatacccttactttgcgaaaaggctactgactgatcccaacccatatctcagagatgctttaattgagcttgtattcaaggatggaaaattcagatggaataggcttgaaaatcttcttgttcaagggcgccaagatagggagtttgcagccaaagatgcactgcagcctgttctaaagcttctccttggtcctggtggggaggaattgcgtgcgttagttgtgaaagaggcagttcgtgtgacagaagccatcgccattggaacactggtcgattcatacaatgcagctccatcatttttgaagccattaatttccagcggcaatctagctgaaccctttaagtttagtgagactgaacaagaacagatgatggagctccgagaccaggttttcagagtatggggtcttttgagatcctcaaataactttgatccgagccttttgcagccaatcgttcaggttctacaagaaccagaggcccgtgtcttgggttctcgtgtcgcaggtggtgtaacacagcgccttgcggcacgtctgctgcaacagcttctcaggacccctcctgctcctggatcttcttagcagatatatagatataggctcgtatgattgtatgaagcatgtaaattgacacgatatttttcacaggaaatgagaaggaagcacaacccagaattcgagtatatagctagtttcttggttctaagtggataaagacattgtgcatcgagctttgtccagcagaccgtgtatatagttgtgtaaaaaacattgttttgtgctgtagattacactgtttacggagtgaagattgaaatgataagacatggacgagtgagctgctaagatgtcacgcagcttagatccaccgctgttcaccctgtaaatcatgatacgcggaccaattatgcatttacgcgtatgtgtagccctaaaacttctacgtgtcaaaataaaagtacata

SEQ ID NO: 59313 - DNA, 2666 bp, Zea Mays
gcgctctctgtggcggacatcaaatcctctcggagaacagccaaacgagccaccaaaatgtaagaaaacgcacgccccggcgctggccgctagtcaccccaaagctccgcctccgcaccttctctcactcgcccagccgcggctatggcggccaccacatccacggcggcggcggcagtatccttctccctcccctcaccaccgcactgccgcggggcccggcgccgccgcgcgccttccctcctccgtgccgcctccaccgccgcgcccccctcccccgacctctccatccagctctcgccccgcgcgtccccgcccgcgtctaccaacggcgccgccaccgcgcttggaccccccgtgtccgcctcctttgcccgtgaccgcgccgaggacctgcaggccgaggcccgcgcgatggcccgcgccgctggcgccacagtctacagtcccgagctcctcgccgcccgctacggctcccgccccttcaaggtggcgctccgggcaggggaggtgctgtccaagttggcgtcgttcggggtgaaggtcctactggacgagcggagaggggagtcgtcatcggagaggaggcgcgccagggcggtggagttgcgcaccatcttcactaggctcggcccaaccttcgtcaaaattggacagggcctgtccacgcgccccgacctctgcccggccgagtacctcgaggagctcgccgagctgcaggattcacttcccacatttccggatgaagaggcatttgcatgtattgagagagagcttggcttcacgcttgattcaatctactcgacaatttcaccttcccccattgcagcggctagtttaggtcaagtttataaagcacggttgaaatactctgggaagctggtagctgtgaaggtgcagagacccagtattgagaaagccattgggcttgatttttatctacttagaggacttggctttcttataaataagtatgttgacattgtaaccagcgatgttgttgccctcatcgatgaatttgctcgaagagtttttcaagagcttaattatgttcaggaaggccaaaatgcaagaaggtttaagaaattatatgccgataagcaagatgtattagtgcctgatatattttgggattacacaagtgcaaaggttctaacaatggagtggattgagggtgtaaaattaaaccaacaagcagttattgaaagtcaaggattgaaggttctggatttggtcaacattggtatccagtgtagcttgagacagcttctggagtatggttactttcatgcagaccctcatcctggtaatatattagcaacacctgaggggaaactggcttttcttgattttggcatgatgagtgaaacaccagaggatgcgagggtagccattataggacatgttgtccacttagtcaacagggactacgaagcaatggctcgtgattattatgcactagatttcttggaacccgatgtagatgtttccccgattgtgcctgctctcaagaattttttcgatgatgcactaaatgcaacagtgagtgagttgaacttcaagacaatagttgatggcctaggtgctgttctctatcagtacccattcaatgtaccagcatactatgcattgatactgcgatcgctcaccgtactggaaggtttagcactctatgctgaccctgattttaaggtgcttgctgcatcatacccttactttgcgaaaaggctactgactgatcccaacccatatctcagagatgctttaattgagcttgtattcaaggatggaaaattcagatggaataggcttgaaaatcttcttgttcaagggcgccaagatagggagtttgcagccaaagatgcactgcagcctgttctaaagcttctccttggtcctggtggggaggaattgcgtgcgttagttgtgaaagaggcagttcgtgtgacagaagccatcgccattggaacactggtcgattcatacaatgcagctccatcatttttgaagccattaatttccagcggcaatctagctgaaccctttaagtttagtgagactgaacaagaacagatgatggagctccgagaccaggttttcagagtatggggtcttttgagatcctcaaataactttgatccgagccttttgcagccaatcgttctacaagaaccagaggcccgtgtcttgggttctcgtgtcgcaggtggtgtaacacagcgccttgcggcacgtctgctgcaacagcttctcaggacccctcctgctcctggatcttcttagcagatatatagatataggctcgtatgattgtatgaagcatgtaaattgacacgatatttttcacaggaaatgagaaggaagcacaacccagaattcgagtatatagctagtttcttggttctaagtggataaagacattgtgcatcgagctttgtccagcagaccgtgtatatagttgtgtaaaaaacattgttttgtgctgtagattacactgtttacggagtgaagattgaaatgataagacatggacgagtgagctgctaagatgtcacgcagcttagatccaccgctgttcaccctgtaaatcatgatacgcggaccaattatgcatttacgcgtatgtgtagccctaaaacttctacgtgtcaaaataaaagtacata

SEQ ID NO: 59314 - DNA, 777 bp, Zea Mays
ctttaactaaaaagtgtctctcacaattcagagccaagactctaggtcatgtgaaccattcaatcttctggaagaacctcaagcccattagcgaaggtggcggggagccgcctcatgggaaacttggctgggccatcgatgaggattttggttcgtttgaggcacttgtaaagaagatgaatgcagaaggcgctgctttacaagggtctggatgggtgtggttagctttggataaagaggcaaaaaagctttcagttgaaacaacagctaatcaggatcctctggtgactaaaggtgcaagcttggttccgctgttggggattgatgtctgggaacatgcatactacctgcagtacaagaatgttaggccggattacctgaacaacatctggaaggtgatgaactggaaatatgctggagaggtgtacgaaaatgttcttgcttgaattgtcttaacggacaatacacatctgcgcgcgcgggtttcggctgtttgatcatgtgaaataaagatggacctgtctagcggctggaccttgtgtacatttcactgagatagactaatgcacggcctgccgattttgttcgtcctgcttgcgtgctactctgtctctgctcctagtttttggcatcatgtttatgttgagcaaggtgatgcccaagggaagccattcccactcttgtctccattaataaaatcagctgagcttccgatgtttgcttgaatttgttgccatgcgtttccagtttttggccattccacttgttggagcaaaa

SEQ ID NO: 59315 - DNA, 524 bp, Zea Mays
cttgcccctaggtgccccataggatcctctggtgactaaaggtgcaagcttggttccgctgttggggattgatgtctgggaacatgcatactacctgcagtacaagaatgttaggccggattacctgaacaacatctggaaggtgatgaactggaaatatgctggagaggtgtacgaaaatgttcttgcttgaattgtcttaacggacaatacacatctgcgcgcgcgggtttcggctgtttgatcatgtgaaataaagatggacctgtctagcggctggaccttgtgtacatttcactgagatagactaatgcacggcctgccgattttgttcgtcctgcttgcgtgctactctgtctctgctcctagtttttggcatcatgtttatgttgagcaaggtgatgcccaagggaagccattcccactcttgtctccattaataaaatcagctgagcttccgatgtttgcttgaatttgttgccatgcgtttccagtttttggccattccacttgttggagcaaaa

SEQ ID NO: 59316 - DNA, 3746 bp, Zea Mays
cttgtttatataatgtaacttattttgaactaagttagatcatatgatctggctcaacttactctaatctaagactagagtttgggcgtttggcacgtcactacgtcagaggtgtctcggtccgacttggtacttggcggctccactgctcacgtcacgtgcccgcgttctctctccgactcccatgcctctccggcgagctagtctggtatccatcggcgagctagttttgtctccaccggcgagcacgcgtctgtaacctcctccacccccatcgaactccacctgctctccaatccgctagatctcggctccgtgcaggttacgtggatggctgtgtggtgttgctttgctcgctaatttggttggatcaggagtgtcctgggagctatgctgtgctgattgtgaggaatttggtagcacctctatcagggttttaaaactagagtgctgccgccccagcatacataatatggacgaagaaaatgttgttgagctgctgcaacgttatcgccgtgaccgtcaagtattactcaactacattctttctggcaacttgatcaagaaagttgcaatgccacctggtgcaatctctttggatgatgtagatatagatcaagttagtgttgattatgtcctcaactgtgctaagaaaggtgaacctcttgaccttggagacgccatccgcctttttcatgatagccttgactatccatatgtgaataacactggagctgtggatgagttctatttgcttacaaaaccagaatattcaggaccagctccaacacgagaaccaccacctatcccagccactgcaccatcatcagttgtgataccaccaccggatgtggaaccagcaccaattattgtgtcatcgccagtcacagctaccaacttgccaaaatcacaaccatttgattctccgaccgagaaggagttaactatagatgacattgaagactttgaggatgatgaagatgaatttgatgggcgaagggcttctagaagacatcaaactgacgctagtgatctatcgttgctgttaccatcatttgaaacaggtatcacagacaatgatcttcgtgaggcagcatatgagatccttgttgctgctgctggtgcttcggggggccttatagttcctcagaaagaaaagaaaaaagagaagagacacagattgatgaggaaactcggtcgtagtaagagtgaaagtgtggatatcaacactcaacggcaacctggtttagttggtttgcttgaaaccatgcgagctcaacttgagataacagagtccatggatattcgaactaggcaaggattactcaacgctatggttggcaaagttggaaaacggatggacaatcttttgattccattggaactattatgctgcatatccagaactgaattttctgacatgaaagcataccttcgttggcagaagagacagttaaacatgctggaggaaggcctcataaaccatccagttgttggatttggggagttaggtcgaaaagtcaatgagataaggagcctttttagaaagattgaagaatccgagtccttgccaccatctgctgcagaggttcaacggacagaatgcttaagatcactgagagaagttgccacttctctatctgaaaggcctgcccggggtgatcttactggtgaggtttgtcactgggctgatggataccatctgaatgtagcattgtatgagaagatgcttggcagtgtttttgacatcttggatgagggaaaacttacagaggaggcagaggaaatccttgaactcttaaggtcaacttggcggacactaggaatcacagagactgttcatgatacatgctatgcatgggtattatttcgacagtttgttcttacaggtgagcaaggacttctgaaagtcgtgattgacaatttgaggaagatacctttgaaagaacagcgtggtccgcaagaaagattacacttgaaaagcctgcgtagttctgttgatgctgagggtagctatcaagacttcacatttttccagtctttcctgtctccaattcagaaatggacggacaagaaactaaatgactatcacctacatttctccgagggctccagcttgatggctgatgttgtgacagtggcaatgcttacaaggcggatccttggtgaagaaaatgacaaggtagcggagtctcctgacagagatcagattgaccgatacatcacttcttcagtcaaaaatactttcttgaagatggcacattctgtagagttcaaagcagacactacaaatgagcatgttttagcatctctagctgaggagacaaagaaactgctgaaaaaagatacagccatttttacacctgttttgacaaaatggcatccacaggcagcagttgtttctgcttccctcattcataaactttatggaaataaattgagaccatttcttgagcatgctgagcatcttacggaggatgtggtttctgtatttccggcagctgatgctttggagcaatacgtaatgtctgtgatggcctccgtcacgggagatgatggtttggatagcctatgcagacataaactagttccatatcagattgaaagtaaatctggtacattagttttacgctgggtaaatgggcaacttgagagaattgaaacttgggttaaaagggctgctgaccaagaggtttgggaccctatatcccctcaacaacgccatggaaattctattgtagaagtctatagaatcatagaagagactgcagatcaattttttgcatttaaggttcctatgcgagatggagaattaaatagtctatgccgtggtcttgacaaggcattccaagtttatacacagctggttactgcacccctagttgataaagaagatttagctccgcctattcctgttcttactcgatataaaaaggagcttggaatcaaggcttttgtaaaaaaagaggtccaagaagttagaacagttgatgagaggaaagctagcgaaattactcagcttacaatgccaaagctttgtgttcgtcttaacagtctatattacggtatcagccagttgagtaagttggaggacagcattaatgagaggtgggctcggaagaaaagtgaaaacactaacatcagacgaaaaagtgaaaagtcaaagagtgccgtccctaatcagaagaatcaatttgatggcagcagaaaagaaatcaatactgctattgatcgtctctgtgaatttactgggacaaaggttatattctgggacctgcagcagccatttgttgagaatttatacagaaatggtgttgctcaagctcgattggacaccataactgaagtgcttgatttggtccttaatcaactttgtgatgtcattgtggaacaactgagggatcgtgtggttacagggcttctgcaagcatgcctggatggcttccttcgtgtgatactggatggaggttctacacgtgtcttctctccaaatgatgcagctttattggaggaagatcttgaaaccctgaaggaattttttgtttctggtggagatggactgcctcgtggaactgttgaaaacttagtctcgcgtgtacgtcctgtaataaatctgatcaagcaagagacccgcgtgctcattgatgacctacgagaagttactcaaggtggcaagagcaaatttggagcggactccaaaaccctccttagggtcctgtgtcacagaaatgattcagaggcatcac

SEQ ID NO: 59317 - DNA, 3674 bp, Zea Mays
cttgtttatataatgtaacttattttgaactaagttagatcatatgatctggctcaacttactctaatctaagactagagtttgggcgtttggcacgtcactacgtcagaggtgtctcggtccgacttggtacttggcggctccactgctcacgtcacgtgcccgcgttctctctccgactcccatgcctctccggcgagctagtctggtatccatcggcgagctagttttgtctccaccggcgagcacgcgtctgtaacctcctccacccccatcgaactccacctgctctccaatccgctagatctcggctccgtgcagctgtgctgattgtgaggaatttggtagcacctctatcagggttttaaaactagagtgctgccgccccagcatacataatatggacgaagaaaatgttgttgagctgctgcaacgttatcgccgtgaccgtcaagtattactcaactacattctttctggcaacttgatcaagaaagttgcaatgccacctggtgcaatctctttggatgatgtagatatagatcaagttagtgttgattatgtcctcaactgtgctaagaaaggtgaacctcttgaccttggagacgccatccgcctttttcatgatagccttgactatccatatgtgaataacactggagctgtggatgagttctatttgcttacaaaaccagaatattcaggaccagctccaacacgagaaccaccacctatcccagccactgcaccatcatcagttgtgataccaccaccggatgtggaaccagcaccaattattgtgtcatcgccagtcacagctaccaacttgccaaaatcacaaccatttgattctccgaccgagaaggagttaactatagatgacattgaagactttgaggatgatgaagatgaatttgatgggcgaagggcttctagaagacatcaaactgacgctagtgatctatcgttgctgttaccatcatttgaaacaggtatcacagacaatgatcttcgtgaggcagcatatgagatccttgttgctgctgctggtgcttcggggggccttatagttcctcagaaagaaaagaaaaaagagaagagacacagattgatgaggaaactcggtcgtagtaagagtgaaagtgtggatatcaacactcaacggcaacctggtttagttggtttgcttgaaaccatgcgagctcaacttgagataacagagtccatggatattcgaactaggcaaggattactcaacgctatggttggcaaagttggaaaacggatggacaatcttttgattccattggaactattatgctgcatatccagaactgaattttctgacatgaaagcataccttcgttggcagaagagacagttaaacatgctggaggaaggcctcataaaccatccagttgttggatttggggagttaggtcgaaaagtcaatgagataaggagcctttttagaaagattgaagaatccgagtccttgccaccatctgctgcagaggttcaacggacagaatgcttaagatcactgagagaagttgccacttctctatctgaaaggcctgcccggggtgatcttactggtgaggtttgtcactgggctgatggataccatctgaatgtagcattgtatgagaagatgcttggcagtgtttttgacatcttggatgagggaaaacttacagaggaggcagaggaaatccttgaactcttaaggtcaacttggcggacactaggaatcacagagactgttcatgatacatgctatgcatgggtattatttcgacagtttgttcttacaggtgagcaaggacttctgaaagtcgtgattgacaatttgaggaagatacctttgaaagaacagcgtggtccgcaagaaagattacacttgaaaagcctgcgtagttctgttgatgctgagggtagctatcaagacttcacatttttccagtctttcctgtctccaattcagaaatggacggacaagaaactaaatgactatcacctacatttctccgagggctccagcttgatggctgatgttgtgacagtggcaatgcttacaaggcggatccttggtgaagaaaatgacaaggtagcggagtctcctgacagagatcagattgaccgatacatcacttcttcagtcaaaaatactttcttgaagatggcacattctgtagagttcaaagcagacactacaaatgagcatgttttagcatctctagctgaggagacaaagaaactgctgaaaaaagatacagccatttttacacctgttttgacaaaatggcatccacaggcagcagttgtttctgcttccctcattcataaactttatggaaataaattgagaccatttcttgagcatgctgagcatcttacggaggatgtggtttctgtatttccggcagctgatgctttggagcaatacgtaatgtctgtgatggcctccgtcacgggagatgatggtttggatagcctatgcagacataaactagttccatatcagattgaaagtaaatctggtacattagttttacgctgggtaaatgggcaacttgagagaattgaaacttgggttaaaagggctgctgaccaagaggtttgggaccctatatcccctcaacaacgccatggaaattctattgtagaagtctatagaatcatagaagagactgcagatcaattttttgcatttaaggttcctatgcgagatggagaattaaatagtctatgccgtggtcttgacaaggcattccaagtttatacacagctggttactgcacccctagttgataaagaagatttagctccgcctattcctgttcttactcgatataaaaaggagcttggaatcaaggcttttgtaaaaaaagaggtccaagaagttagaacagttgatgagaggaaagctagcgaaattactcagcttacaatgccaaagctttgtgttcgtcttaacagtctatattacggtatcagccagttgagtaagttggaggacagcattaatgagaggtgggctcggaagaaaagtgaaaacactaacatcagacgaaaaagtgaaaagtcaaagagtgccgtccctaatcagaagaatcaatttgatggcagcagaaaagaaatcaatactgctattgatcgtctctgtgaatttactgggacaaaggttatattctgggacctgcagcagccatttgttgagaatttatacagaaatggtgttgctcaagctcgattggacaccataactgaagtgcttgatttggtccttaatcaactttgtgatgtcattgtggaacaactgagggatcgtgtggttacagggcttctgcaagcatgcctggatggcttccttcgtgtgatactggatggaggttctacacgtgtcttctctccaaatgatgcagctttattggaggaagatcttgaaaccctgaaggaattttttgtttctggtggagatggactgcctcgtggaactgttgaaaacttagtctcgcgtgtacgtcctgtaataaatctgatcaagcaagagacccgcgtgctcattgatgacctacgagaagttactcaaggtggcaagagcaaatttggagcggactccaaaaccctccttagggtcctgtgtcacagaaatgattcagaggcatcac

SEQ ID NO: 59318 - DNA, 3569 bp, Zea Mays
gtttggcacgtcactacgtcagaggtgtctcggtccgacttggtacttggcggctccactgctcacgtcacgtgcccgcgttctctctccgactcccatgcctctccggcgagctagtctggtatccatcggcgagctagttttgtctccaccggcgagcacgcgtctgtaacctcctccacccccatcgaactccacctgctctccaatccgctagatctcggctccgtgcagctgtgctgattgtgaggaatttggtagcacctctatcagggttttaaaactagagtgctgccgccccagcatacataatatggacgaagaaaatgttgttgagctgctgcaacgttatcgccgtgaccgtcaagtattactcaactacattctttctggcaacttgatcaagaaagttgcaatgccacctggtgcaatctctttggatgatgtagatatagatcaagttagtgttgattatgtcctcaactgtgctaagaaaggtgaacctcttgaccttggagacgccatccgcctttttcatgatagccttgactatccatatgtgaataacactggagctgtggatgagttctatttgcttacaaaaccagaatattcaggaccagctccaacacgagaaccaccacctatcccagccactgcaccatcatcagttgtgataccaccaccggatgtggaaccagcaccaattattgtgtcatcgccagtcacagctaccaacttgccaaaatcacaaccatttgattctccgaccgagaaggagttaactatagatgacattgaagactttgaggatgatgaagatgaatttgatgggcgaagggcttctagaagacatcaaactgacgctagtgatctatcgttgctgttaccatcatttgaaacaggtatcacagacaatgatcttcgtgaggcagcatatgagatccttgttgctgctgctggtgcttcggggggccttatagttcctcagaaagaaaagaaaaaagagaagagacacagattgatgaggaaactcggtcgtagtaagagtgaaagtgtggatatcaacactcaacggcaacctggtttagttggtttgcttgaaaccatgcgagctcaacttgagataacagagtccatggatattcgaactaggcaaggattactcaacgctatggttggcaaagttggaaaacggatggacaatcttttgattccattggaactattatgctgcatatccagaactgaattttctgacatgaaagcataccttcgttggcagaagagacagttaaacatgctggaggaaggcctcataaaccatccagttgttggatttggggagttaggtcgaaaagtcaatgagataaggagcctttttagaaagattgaagaatccgagtccttgccaccatctgctgcagaggttcaacggacagaatgcttaagatcactgagagaagttgccacttctctatctgaaaggcctgcccggggtgatcttactggtgaggtttgtcactgggctgatggataccatctgaatgtagcattgtatgagaagatgcttggcagtgtttttgacatcttggatgagggaaaacttacagaggaggcagaggaaatccttgaactcttaaggtcaacttggcggacactaggaatcacagagactgttcatgatacatgctatgcatgggtattatttcgacagtttgttcttacaggtgagcaaggacttctgaaagtcgtgattgacaatttgaggaagatacctttgaaagaacagcgtggtccgcaagaaagattacacttgaaaagcctgcgtagttctgttgatgctgagggtagctatcaagacttcacatttttccagtctttcctgtctccaattcagaaatggacggacaagaaactaaatgactatcacctacatttctccgagggctccagcttgatggctgatgttgtgacagtggcaatgcttacaaggcggatccttggtgaagaaaatgacaaggtagcggagtctcctgacagagatcagattgaccgatacatcacttcttcagtcaaaaatactttcttgaagatggcacattctgtagagttcaaagcagacactacaaatgagcatgttttagcatctctagctgaggagacaaagaaactgctgaaaaaagatacagccatttttacacctgttttgacaaaatggcatccacaggcagcagttgtttctgcttccctcattcataaactttatggaaataaattgagaccatttcttgagcatgctgagcatcttacggaggatgtggtttctgtatttccggcagctgatgctttggagcaatacgtaatgtctgtgatggcctccgtcacgggagatgatggtttggatagcctatgcagacataaactagttccatatcagattgaaagtaaatctggtacattagttttacgctgggtaaatgggcaacttgagagaattgaaacttgggttaaaagggctgctgaccaagaggtttgggaccctatatcccctcaacaacgccatggaaattctattgtagaagtctatagaatcatagaagagactgcagatcaattttttgcatttaaggttcctatgcgagatggagaattaaatagtctatgccgtggtcttgacaaggcattccaagtttatacacagctggttactgcacccctagttgataaagaagatttagctccgcctattcctgttcttactcgatataaaaaggagcttggaatcaaggcttttgtaaaaaaagaggtccaagaagttagaacagttgatgagaggaaagctagcgaaattactcagcttacaatgccaaagctttgtgttcgtcttaacagtctatattacggtatcagccagttgagtaagttggaggacagcattaatgagaggtgggctcggaagaaaagtgaaaacactaacatcagacgaaaaagtgaaaagtcaaagagtgccgtccctaatcagaagaatcaatttgatggcagcagaaaagaaatcaatactgctattgatcggacaaaggttatattctgggacctgcagcagccatttgttgagaatttatacagaaatggtgttgctcaagctcgattggacaccataactgaagtgcttgatttggtccttaatcaactttgtgatgtcattgtggaacaactgagggatcgtgtggttacagggcttctgcaagcatgcctggatggcttccttcgtgtgatactggatggaggttctacacgtgtcttctctccaaatgatgcagctttattggaggaagatcttgaaaccctgaaggaattttttgtttctggtggagatggactgcctcgtggaactgttgaaaacttagtctcgcgtgtacgtcctgtaataaatctgatcaagcaagagacccgcgtgctcattgatgacctacgagaagttactcaaggtggcaagagcaaatttggagcggactccaaaaccctccttagggtcctgtgtcacagaaatgattcagaggcatcac

SEQ ID NO: 59319 - DNA, 3559 bp, Zea Mays
gcacgtcactacgtcagaggtgtctcggtccgacttggtacttggcggctccactgctcacgtcacgtgcccgcgttctctctccgactcccatgcctctccggcgagctagtctggtatccatcggcgagctagttttgtctccaccggcgagcacgcgtctgtaacctcctccacccccatcgaactccacctgctctccaatccgctagatctcggctccgtgcagctgtgctgattgtgaggaatttggtagcacctctatcagggttttaaaactagagtgctgccgccccagcatacataatatggacgaagaaaatgttgttgagctgctgcaacgttatcgccgtgaccgtcaagtattactcaactacattctttctggcaacttgatcaagaaagttgcaatgccacctggtgcaatctctttggatgatgtagatatagatcaagttagtgttgattatgtcctcaactgtgctaagaaaggtgaacctcttgaccttggagacgccatccgcctttttcatgatagccttgactatccatatgtgaataacactggagctgtggatgagttctatttgcttacaaaaccagaatattcaggaccagctccaacacgagaaccaccacctatcccagccactgcaccatcatcagttgtgataccaccaccggatgtggaaccagcaccaattattgtgtcatcgccagtcacagctaccaacttgccaaaatcacaaccatttgattctccgaccgagaaggagttaactatagatgacattgaagactttgaggatgatgaagatgaatttgatgggcgaagggcttctagaagacatcaaactgacgctagtgatctatcgttgctgttaccatcatttgaaacaggtatcacagacaatgatcttcgtgaggcagcatatgagatccttgttgctgctgctggtgcttcggggggccttatagttcctcagaaagaaaagaaaaaagagaagagacacagattgatgaggaaactcggtcgtagtaagagtgaaagtgtggatatcaacactcaacggcaacctggtttagttggtttgcttgaaaccatgcgagctcaacttgagataacagagtccatggatattcgaactaggcaaggattactcaacgctatggttggcaaagttggaaaacggatggacaatcttttgattccattggaactattatgctgcatatccagaactgaattttctgacatgaaagcataccttcgttggcagaagagacagttaaacatgctggaggaaggcctcataaaccatccagttgttggatttggggagttaggtcgaaaagtcaatgagataaggagcctttttagaaagattgaagaatccgagtccttgccaccatctgctgcagaggttcaacggacagaatgcttaagatcactgagagaagttgccacttctctatctgaaaggcctgcccggggtgatcttactggtgaggtttgtcactgggctgatggataccatctgaatgtagcattgtatgagaagatgcttggcagtgtttttgacatcttggatgagggaaaacttacagaggaggcagaggaaatccttgaactcttaaggtcaacttggcggacactaggaatcacagagactgttcatgatacatgctatgcatgggtattatttcgacagtttgttcttacaggtgagcaaggacttctgaaagtcgtgattgacaatttgaggaagatacctttgaaagaacagcgtggtccgcaagaaagattacacttgaaaagcctgcgtagttctgttgatgctgagggtagctatcaagacttcacatttttccagtctttcctgtctccaattcagaaatggacggacaagaaactaaatgactatcacctacatttctccgagggctccagcttgatggctgatgttgtgacagtggcaatgcttacaaggcggatccttggtgaagaaaatgacaaggtagcggagtctcctgacagagatcagattgaccgatacatcacttcttcagtcaaaaatactttcttgaagatggcacattctgtagagttcaaagcagacactacaaatgagcatgttttagcatctctagctgaggagacaaagaaactgctgaaaaaagatacagccatttttacacctgttttgacaaaatggcatccacaggcagcagttgtttctgcttccctcattcataaactttatggaaataaattgagaccatttcttgagcatgctgagcatcttacggaggatgtggtttctgtatttccggcagctgatgctttggagcaatacgtaatgtctgtgatggcctccgtcacgggagatgatggtttggatagcctatgcagacataaactagttccatatcagattgaaagtaaatctggtacattagttttacgctgggtaaatgggcaacttgagagaattgaaacttgggttaaaagggctgctgaccaagaggtttgggaccctatatcccctcaacaacgccatggaaattctattgtagaagtctatagaatcatagaagagactgcagatcaattttttgcatttaaggttcctatgcgagatggagaattaaatagtctatgccgtggtcttgacaaggcattccaagtttatacacagctggttactgcacccctagttgataaagaagatttagctccgcctattcctgttcttactcgatataaaaaggagcttggaatcaaggcttttgtaaaaaaagaggtccaagaagttagaacagttgatgagaggaaagctagcgaaattactcagcttacaatgccaaagctttgtgttcgtcttaacagtctatattacggtatcagccagttgagtaagttggaggacagcattaatgagaggtgggctcggaagaaaagtgaaaacactaacatcagacgaaaaagtgaaaagtcaaagagtgccgtccctaatcagaagaatcaatttgatggcagcagaaaagaaatcaatactgctattgatcgtctctgtgaatttactgggacaaaggttatattctgggacctgcagcagccatttgttgagaatttatacagaaatggtgttgctcaagctcgattggacaccataactgaagtgcttgatttggtccttaatcaactttgtgatgtcattgtggaacaactgagggatcgtgtggttacagggcttctgcaagcatgcctggatggcttccttcgtgtgatactggatggaggttctacacgtgtcttctctccaaatgatgcagctttattggaggaagatcttgaaaccctgaagcaagttatgtcatgctggagtaggaagggtctattggcgcatattccacacggaaagcttgccatgccattcctgttggcgtggcaaaacagaattgccatgccacctggactggcatggctaggataaatctgaggaaaatcatatctttttcataaaccgttggctggagatgttttgttacaaaaatt

SEQ ID NO: 59320 - DNA, 2613 bp, Zea Mays
ctacgtcagaggtgtctcggtccgacttggtacttggcggctccactgctcacgtcacgtgcccgcgttctctctccgactcccatgcctctccggcgagctagtctggtatccatcggcgagctagttttgtctccaccggcgagcacgcgtctgtaacctcctccacccccatcgaactccacctgctctccaatccgctagatctcggctccgtgcagctgtgctgattgtgaggaatttggtagcacctctatcagggttttaaaactagagtgctgccgccccagcatacataatatggacgaagaaaatgttgttgagctgctgcaacgttatcgccgtgaccgtcaagtattactcaactacattctttctggcaacttgatcaagaaagttgcaatgccacctggtgcaatctctttggatgatgtagatatagatcaagttagtgttgattatgtcctcaactgtgctaagaaaggtgaacctcttgaccttggagacgccatccgcctttttcatgatagccttgactatccatatgtgaataacactggagctgtggatgagttctatttgcttacaaaaccagaatattcaggaccagctccaacacgagaaccaccacctatcccagccactgcaccatcatcagttgtgataccaccaccggatgtggaaccagcaccaattattgtgtcatcgccagtcacagctaccaacttgccaaaatcacaaccatttgattctccgaccgagaaggagttaactatagatgacattgaagactttgaggatgatgaagatgaatttgatgggcgaagggcttctagaagacatcaaactgacgctagtgatctatcgttgctgttaccatcatttgaaacaggtatcacagacaatgatcttcgtgaggcagcatatgagatccttgttgctgctgctggtgcttcggggggccttatagttcctcagaaagaaaagaaaaaagagaagagacacagattgatgaggaaactcggtcgtagtaagagtgaaagtgtggatatcaacactcaacggcaacctggtttagttggtttgcttgaaaccatgcgagctcaacttgagataacagagtccatggatattcgaactaggcaaggattactcaacgctatggttggcaaagttggaaaacggatggacaatcttttgattccattggaactattatgctgcatatccagaactgaattttctgacatgaaagcataccttcgttggcagaagagacagttaaacatgctggaggaaggcctcataaaccatccagttgttggatttggggagttaggtcgaaaagtcaatgagataaggagcctttttagaaagattgaagaatccgagtccttgccaccatctgctgcagaggttcaacggacagaatgcttaagatcactgagagaagttgccacttctctatctgaaaggcctgcccggggtgatcttactggtgaggtttgtcactgggctgatggataccatctgaatgtagcattgtatgagaagatgcttggcagtgtttttgacatcttggatgagggaaaacttacagaggaggcagaggaaatccttgaactcttaaggtcaacttggcggacactaggaatcacagagactgttcatgatacatgctatgcatgggtattatttcgacagtttgttcttacaggtgagcaaggacttctgaaagtcgtgattgacaatttgaggaagatacctttgaaagaacagcgtggtccgcaagaaagattacacttgaaaagcctgcgtagttctgttgatgctgagggtagctatcaagacttcacatttttccagtctttcctgtctccaattcagaaatggacggacaagaaactaaatgactatcacctacatttctccgagggctccagcttgatggctgatgttgtgacagtggcaatgcttacaaggcggatccttggtgaagaaaatgacaaggtagcggagtctcctgacagagatcagattgaccgatacatcacttcttcagtcaaaaatactttcttgaagatggcacattctgtagagttcaaagcagacactacaaatgagcatgttttagcatctctagctgaggagacaaagaaactgctgaaaaaagatacagccatttttacacctgttttgacaaaatggcatccacaggcagcagttgtttctgcttccctcattcataaactttatggaaataaattgagaccatttcttgagcatgctgagcatcttacggaggatgtggtttctgtatttccggcagctgatgctttggagcaatacgtaatgtctgtgatggcctccgtcacgggagatgatggtttggatagcctatgcagacataaactagttccatatcagattgaaagtaaatctggtacattagttttacgctgggtaaatgggcaacttgagagaattgaaacttgggttaaaagggctgctgaccaagaggtttgggaccctatatcccctcaacaacgccatggaaattctattgtagaagtctatagaatcatagaagaggtttctccaccaacaaaggca

SEQ ID NO: 59321 - DNA, 3457 bp, Zea Mays
agaggtgtctcggtccgacttggtacttggcggctccactgctcacgtcacgtgcccgcgttctctctccgactcccatgcctctccggcgagctagtctggtatccatcggcgagctagttttgtctccaccggcgagcacgcgtctgtaacctcctccacccccatcgaactccacctgctctccaatccgctagatctcggctccgtgcagagaaaatgttgttgagctgctgcaacgttatcgccgtgaccgtcaagtattactcaactacattctttctggcaacttgatcaagaaagttgcaatgccacctggtgcaatctctttggatgatgtagatatagatcaagttagtgttgattatgtcctcaactgtgctaagaaaggtgaacctcttgaccttggagacgccatccgcctttttcatgatagccttgactatccatatgtgaataacactggagctgtggatgagttctatttgcttacaaaaccagaatattcaggaccagctccaacacgagaaccaccacctatcccagccactgcaccatcatcagttgtgataccaccaccggatgtggaaccagcaccaattattgtgtcatcgccagtcacagctaccaacttgccaaaatcacaaccatttgattctccgaccgagaaggagttaactatagatgacattgaagactttgaggatgatgaagatgaatttgatgggcgaagggcttctagaagacatcaaactgacgctagtgatctatcgttgctgttaccatcatttgaaacaggtatcacagacaatgatcttcgtgaggcagcatatgagatccttgttgctgctgctggtgcttcggggggccttatagttcctcagaaagaaaagaaaaaagagaagagacacagattgatgaggaaactcggtcgtagtaagagtgaaagtgtggatatcaacactcaacggcaacctggtttagttggtttgcttgaaaccatgcgagctcaacttgagataacagagtccatggatattcgaactaggcaaggattactcaacgctatggttggcaaagttggaaaacggatggacaatcttttgattccattggaactattatgctgcatatccagaactgaattttctgacatgaaagcataccttcgttggcagaagagacagttaaacatgctggaggaaggcctcataaaccatccagttgttggatttggggagttaggtcgaaaagtcaatgagataaggagcctttttagaaagattgaagaatccgagtccttgccaccatctgctgcagaggttcaacggacagaatgcttaagatcactgagagaagttgccacttctctatctgaaaggcctgcccggggtgatcttactggtgaggtttgtcactgggctgatggataccatctgaatgtagcattgtatgagaagatgcttggcagtgtttttgacatcttggatgagggaaaacttacagaggaggcagaggaaatccttgaactcttaaggtcaacttggcggacactaggaatcacagagactgttcatgatacatgctatgcatgggtattatttcgacagtttgttcttacaggtgagcaaggacttctgaaagtcgtgattgacaatttgaggaagatacctttgaaagaacagcgtggtccgcaagaaagattacacttgaaaagcctgcgtagttctgttgatgctgagggtagctatcaagacttcacatttttccagtctttcctgtctccaattcagaaatggacggacaagaaactaaatgactatcacctacatttctccgagggctccagcttgatggctgatgttgtgacagtggcaatgcttacaaggcggatccttggtgaagaaaatgacaaggtagcggagtctcctgacagagatcagattgaccgatacatcacttcttcagtcaaaaatactttcttgaagatggcacattctgtagagttcaaagcagacactacaaatgagcatgttttagcatctctagctgaggagacaaagaaactgctgaaaaaagatacagccatttttacacctgttttgacaaaatggcatccacaggcagcagttgtttctgcttccctcattcataaactttatggaaataaattgagaccatttcttgagcatgctgagcatcttacggaggatgtggtttctgtatttccggcagctgatgctttggagcaatacgtaatgtctgtgatggcctccgtcacgggagatgatggtttggatagcctatgcagacataaactagttccatatcagattgaaagtaaatctggtacattagttttacgctgggtaaatgggcaacttgagagaattgaaacttgggttaaaagggctgctgaccaagaggtttgggaccctatatcccctcaacaacgccatggaaattctattgtagaagtctatagaatcatagaagagactgcagatcaattttttgcatttaaggttcctatgcgagatggagaattaaatagtctatgccgtggtcttgacaaggcattccaagtttatacacagctggttactgcacccctagttgataaagaagatttagctccgcctattcctgttcttactcgatataaaaaggagcttggaatcaaggcttttgtaaaaaaagaggtccaagaagttagaacagttgatgagaggaaagctagcgaaattactcagcttacaatgccaaagctttgtgttcgtcttaacagtctatattacggtatcagccagttgagtaagttggaggacagcattaatgagaggtgggctcggaagaaaagtgaaaacactaacatcagacgaaaaagtgaaaagtcaaagagtgccgtccctaatcagaagaatcaatttgatggcagcagaaaagaaatcaatactgctattgatcgtctctgtgaatttactgggacaaaggttatattctgggacctgcagcagccatttgttgagaatttatacagaaatggtgttgctcaagctcgattggacaccataactgaagtgcttgatttggtccttaatcaactttgtgatgtcattgtggaacaactgagggatcgtgtggttacagggcttctgcaagcatgcctggatggcttccttcgtgtgatactggatggaggttctacacgtgtcttctctccaaatgatgcagctttattggaggaagatcttgaaaccctgaagcaagttatgtcatgctggagtaggaagggtctattggcgcatattccacacggaaagcttgccatgccattcctgttggcgtggcaaaacagaattgccatgccacctggactggcatggctaggataaatctgaggaaaatcatatctttttcataaaccgttggctggagatgttttgttacaaaaatt

SEQ ID NO: 59322 - DNA, 3578 bp, Zea Mays
agaggtgtctcggtccgacttggtacttggcggctccactgctcacgtcacgtgcccgcgttctctctccgactcccatgcctctccggcgagctagtctggtatccatcggcgagctagttttgtctccaccggcgagcacgcgtctgtaacctcctccacccccatcgaactccacctgctctccaatccgctagatctcggctccgtgcaggttacgtggatggctgtgtggtgttgctttgctcgctaatttggttggatcaggagtgtcctgggagctatgctgtgctgattgtgaggaatttggtagcacctctatcagggttttaaaactagagtgctgccgccccagcatacataatatggacgaagaaaatgttgttgagctgctgcaacgttatcgccgtgaccgtcaagtattactcaactacattctttctggcaacttgatcaagaaagttgcaatgccacctggtgcaatctctttggatgatgtagatatagatcaagttagtgttgattatgtcctcaactgtgctaagaaaggtgaacctcttgaccttggagacgccatccgcctttttcatgatagccttgactatccatatgtgaataacactggagctgtggatgagttctatttgcttacaaaaccagaatattcaggaccagctccaacacgagaaccaccacctatcccagccactgcaccatcatcagttgtgataccaccaccggatgtggaaccagcaccaattattgtgtcatcgccagtcacagctaccaacttgccaaaatcacaaccatttgattctccgaccgagaaggagttaactatagatgacattgaagactttgaggatgatgaagatgaatttgatgggcgaagggcttctagaagacatcaaactgacgctagtgatctatcgttgctgttaccatcatttgaaacaggtatcacagacaatgatcttcgtgaggcagcatatgagatccttgttgctgctgctggtgcttcggggggccttatagttcctcagaaagaaaagaaaaaagagaagagacacagattgatgaggaaactcggtcgtagtaagagtgaaagtgtggatatcaacactcaacggcaacctggtttagttggtttgcttgaaaccatgcgagctcaacttgagataacagagtccatggatattcgaactaggcaaggattactcaacgctatggttggcaaagttggaaaacggatggacaatcttttgattccattggaactattatgctgcatatccagaactgaattttctgacatgaaagcataccttcgttggcagaagagacagttaaacatgctggaggaaggcctcataaaccatccagttgttggatttggggagttaggtcgaaaagtcaatgagataaggagcctttttagaaagattgaagaatccgagtccttgccaccatctgctgcagaggttcaacggacagaatgcttaagatcactgagagaagttgccacttctctatctgaaaggcctgcccggggtgatcttactggtgaggtttgtcactgggctgatggataccatctgaatgtagcattgtatgagaagatgcttggcagtgtttttgacatcttggatgagggaaaacttacagaggaggcagaggaaatccttgaactcttaaggtcaacttggcggacactaggaatcacagagactgttcatgatacatgctatgcatgggtattatttcgacagtttgttcttacaggtgagcaaggacttctgaaagtcgtgattgacaatttgaggaagatacctttgaaagaacagcgtggtccgcaagaaagattacacttgaaaagcctgcgtagttctgttgatgctgagggtagctatcaagacttcacatttttccagtctttcctgtctccaattcagaaatggacggacaagaaactaaatgactatcacctacatttctccgagggctccagcttgatggctgatgttgtgacagtggcaatgcttacaaggcggatccttggtgaagaaaatgacaaggtagcggagtctcctgacagagatcagattgaccgatacatcacttcttcagtcaaaaatactttcttgaagatggcacattctgtagagttcaaagcagacactacaaatgagcatgttttagcatctctagctgaggagacaaagaaactgctgaaaaaagatacagccatttttacacctgttttgacaaaatggcatccacaggcagcagttgtttctgcttccctcattcataaactttatggaaataaattgctgatgctttggagcaatacgtaatgtctgtgatggcctccgtcacgggagatgatggtttggatagcctatgcagacataaactagttccatatcagattgaaagtaaatctggtacattagttttacgctgggtaaatgggcaacttgagagaattgaaacttgggttaaaagggctgctgaccaagaggtttgggaccctatatcccctcaacaacgccatggaaattctattgtagaagtctatagaatcatagaagagactgcagatcaattttttgcatttaaggttcctatgcgagatggagaattaaatagtctatgccgtggtcttgacaaggcattccaagtttatacacagctggttactgcacccctagttgataaagaagatttagctccgcctattcctgttcttactcgatataaaaaggagcttggaatcaaggcttttgtaaaaaaagaggtccaagaagttagaacagttgatgagaggaaagctagcgaaattactcagcttacaatgccaaagctttgtgttcgtcttaacagtctatattacggtatcagccagttgagtaagttggaggacagcattaatgagaggtgggctcggaagaaaagtgaaaacactaacatcagacgaaaaagtgaaaagtcaaagagtgccgtccctaatcagaagaatcaatttgatggcagcagaaaagaaatcaatactgctattgatcgtctctgtgaatttactgggacaaaggttatattctgggacctgcagcagccatttgttgagaatttatacagaaatggtgttgctcaagctcgattggacaccataactgaagtgcttgatttggtccttaatcaactttgtgatgtcattgtggaacaactgagggatcgtgtggttacagggcttctgcaagcatgcctggatggcttccttcgtgtgatactggatggaggttctacacgtgtcttctctccaaatgatgcagctttattggaggaagatcttgaaaccctgaaggaattttttgtttctggtggagatggactgcctcgtggaactgttgaaaacttagtctcgcgtgtacgtcctgtaataaatctgatcaagcaagagacccgcgtgctcattgatgacctacgagaagttactcaaggtggcaagagcaaatttggagcggactccaaaaccctccttagggtcctgtgtcacagaaatgattcagaggcatcac

SEQ ID NO: 59323 - DNA, 3651 bp, Zea Mays
agaggtgtctcggtccgacttggtacttggcggctccactgctcacgtcacgtgcccgcgttctctctccgactcccatgcctctccggcgagctagtctggtatccatcggcgagctagttttgtctccaccggcgagcacgcgtctgtaacctcctccacccccatcgaactccacctgctctccaatccgctagatctcggctccgtgcaggttacgtggatggctgtgtggtgttgctttgctcgctaatttggttggatcaggagtgtcctgggagctatgctgtgctgattgtgaggaatttggtagcacctctatcagggttttaaaactagagtgctgccgccccagcatacataatatggacgaagaaaatgttgttgagctgctgcaacgttatcgccgtgaccgtcaagtattactcaactacattctttctggcaacttgatcaagaaagttgcaatgccacctggtgcaatctctttggatgatgtagatatagatcaagttagtgttgattatgtcctcaactgtgctaagaaaggtgaacctcttgaccttggagacgccatccgcctttttcatgatagccttgactatccatatgtgaataacactggagctgtggatgagttctatttgcttacaaaaccagaatattcaggaccagctccaacacgagaaccaccacctatcccagccactgcaccatcatcagttgtgataccaccaccggatgtggaaccagcaccaattattgtgtcatcgccagtcacagctaccaacttgccaaaatcacaaccatttgattctccgaccgagaaggagttaactatagatgacattgaagactttgaggatgatgaagatgaatttgatgggcgaagggcttctagaagacatcaaactgacgctagtgatctatcgttgctgttaccatcatttgaaacaggtatcacagacaatgatcttcgtgaggcagcatatgagatccttgttgctgctgctggtgcttcggggggccttatagttcctcagaaagaaaagaaaaaagagaagagacacagattgatgaggaaactcggtcgtagtaagagtgaaagtgtggatatcaacactcaacggcaacctggtttagttggtttgcttgaaaccatgcgagctcaacttgagataacagagtccatggatattcgaactaggcaaggattactcaacgctatggttggcaaagttggaaaacggatggacaatcttttgattccattggaactattatgctgcatatccagaactgaattttctgacatgaaagcataccttcgttggcagaagagacagttaaacatgctggaggaaggcctcataaaccatccagttgttggatttggggagttaggtcgaaaagtcaatgagataaggagcctttttagaaagattgaagaatccgagtccttgccaccatctgctgcagaggttcaacggacagaatgcttaagatcactgagagaagttgccacttctctatctgaaaggcctgcccggggtgatcttactggtgaggtttgtcactgggctgatggataccatctgaatgtagcattgtatgagaagatgcttggcagtgtttttgacatcttggatgagggaaaacttacagaggaggcagaggaaatccttgaactcttaaggtcaacttggcggacactaggaatcacagagactgttcatgatacatgctatgcatgggtattatttcgacagtttgttcttacaggtgagcaaggacttctgaaagtcgtgattgacaatttgaggaagatacctttgaaagaacagcgtggtccgcaagaaagattacacttgaaaagcctgcgtagttctgttgatgctgagggtagctatcaagacttcacatttttccagtctttcctgtctccaattcagaaatggacggacaagaaactaaatgactatcacctacatttctccgagggctccagcttgatggctgatgttgtgacagtggcaatgcttacaaggcggatccttggtgaagaaaatgacaaggtagcggagtctcctgacagagatcagattgaccgatacatcacttcttcagtcaaaaatactttcttgaagatggcacattctgtagagttcaaagcagacactacaaatgagcatgttttagcatctctagctgaggagacaaagaaactgctgaaaaaagatacagccatttttacacctgttttgacaaaatggcatccacaggcagcagttgtttctgcttccctcattcataaactttatggaaataaattgagaccatttcttgagcatgctgagcatcttacggaggatgtggtttctgtatttccggcagctgatgctttggagcaatacgtaatgtctgtgatggcctccgtcacgggagatgatggtttggatagcctatgcagacataaactagttccatatcagattgaaagtaaatctggtacattagttttacgctgggtaaatgggcaacttgagagaattgaaacttgggttaaaagggctgctgaccaagaggtttgggaccctatatcccctcaacaacgccatggaaattctattgtagaagtctatagaatcatagaagagactgcagatcaattttttgcatttaaggttcctatgcgagatggagaattaaatagtctatgccgtggtcttgacaaggcattccaagtttatacacagctggttactgcacccctagttgataaagaagatttagctccgcctattcctgttcttactcgatataaaaaggagcttggaatcaaggcttttgtaaaaaaagaggtccaagaagttagaacagttgatgagaggaaagctagcgaaattactcagcttacaatgccaaagctttgtgttcgtcttaacagtctatattacggtatcagccagttgagtaagttggaggacagcattaatgagaggtgggctcggaagaaaagtgaaaacactaacatcagacgaaaaagtgaaaagtcaaagagtgccgtccctaatcagaagaatcaatttgatggcagcagaaaagaaatcaatactgctattgatcgtctctgtgaatttactgggacaaaggttatattctgggacctgcagcagccatttgttgagaatttatacagaaatggtgttgctcaagctcgattggacaccataactgaagtgcttgatttgcttattttcaggtccttaatcaactttgtgatgtcattgtggaacaactgagggatcgtgtggttacagggcttctgcaagcatgcctggatggcttccttcgtgtgatactggatggaggttctacacgtgtcttctctccaaatgatgcagctttattggaggaagatcttgaaaccctgaagggaattttttgtttctggtggagatggactgcctcgtggaactgttgaaaacttagtctcgcgtgtacgtcctgtaataaatctgatcaagcaagagacccgcgtgctcattgatgacctacgagaagttactcaaggtggcaagagcaaatttggagcggactccaaaaccctccttagggtcctgtgtcacagaaatgattcagaggcatcac

SEQ ID NO: 59324 - DNA, 1841 bp, Zea Mays
cattttcacttcccatgcatagtatttaccacatgcttttctcttgatccgccgttttacccatgggtgcatgttgctattattcagacttcagtacctggctcctggcatatcctctacacattttagacattatattgttatatatatatataatataccacactgaacctttttatctctcatttggttgcaacaagagatcattattttctgcacattgggactttcttatttttacagggctccagcttgatggctgatgttgtgacagtggcaatgcttacaaggcggatccttggtgaagaaaatgacaaggtagcggagtctcctgacagagatcagattgaccgatacatcacttcttcagtcaaaaatactttcttgaagatggcacattctgtagagttcaaagcagacactacaaatgagcatgttttagcatctctagctgaggagacaaagaaactgctgaaaaaagatacagccatttttacacctgttttgacaaaatggcatccacaggcagcagttgtttctgcttccctcattcataaactttatggaaataaattgagaccatttcttgagcatgctgagcatcttacggaggatgtggtttctgtatttccggcagctgatgctttggagcaatacgtaatgtctgtgatggcctccgtcacgggagatgatggtttggatagcctatgcagacataaactagttccatatcagattgaaagtaaatctggtacattagttttacgctgggtaaatgggcaacttgagagaattgaaacttgggttaaaagggctgctgaccaagaggtttgggaccctatatcccctcaacaacgccatggaaattctattgtagaagtctatagaatcatagaagagactgcagatcaattttttgcatttaaggttcctatgcgagatggagaattaaatagtctatgccgtggtcttgacaaggcattccaagtttatacacagctggttactgcacccctagttgataaagaagatttagctccgcctattcctgttcttactcgatataaaaaggagcttggaatcaaggcttttgtaaaaaaagaggtccaagaagttagaacagttgatgagaggaaagctagcgaaattactcagcttacaatgccaaagctttgtgttcgtcttaacagtctatattacggtatcagccagttgagtaagttggaggacagcattaatgagaggtgggctcggaagaaaagtgaaaacactaacatcagacgaaaaagtgaaaagtcaaagagtgccgtccctaatcagaagaatcaatttgatggcagcagaaaagaaatcaatactgctattgatcggacaaaggttatattctgggacctgcagcagccatttgttgagaatttatacagaaatggtgttgctcaagctcgattggacaccataactgaagtgcttgatttggtccttaatcaactttgtgatgtcattgtggaacaactgagggatcgtgtggttacagggcttctgcaagcatgcctggatggcttccttcgtgtgatactggatggaggttctacacgtgtcttctctccaaatgatgcagctttattggaggaagatcttgaaaccctgaagcaagttatgtcatgctggagtaggaagggtctattggcgcatattccacacggaaagcttgccatgccattcctgttggcgtggcaaaacagaattgccatgccacctggactggcatggctaggataaatctgaggaaaatcatatctttttcataaaccgttggctggagatgttttgttacaaaaatt

SEQ ID NO: 59325 - DNA, 1074 bp, Zea Mays
cctctaagactgcagatcaattttttgcatttaaggttcctatgcgagatggagaattaaatagtctatgccgtggtcttgacaaggcattccaagtttatacacagctggttactgcacccctagttgataaagaagatttagctccgcctattcctgttcttactcgatataaaaaggagcttggaatcaaggcttttgtaaaaaaagaggtccaagaagttagaacagttgatgagaggaaagctagcgaaattactcagcttacaatgccaaagctttgtgttcgtcttaacagtctatattacggtatcagccagttgagtaagttggaggacagcattaatgagaggtgggctcggaagaaaagtgaaaacactaacatcagacgaaaaagtgaaaagtcaaagagtgccgtccctaatcagaagaatcaatttgatggcagcagaaaagaaatcaatactgctattgatcgtctctgtgaatttactggtaaggaaatatatagaggcaatgttttggtagaaacttattgctattaaaatttgaacctttttctttccttttcttacgcagggacaaaggttatattctgggacctgcagcagccatttgttgagaatttatacagaaatggtgttgctcaagctcgattggacaccataactgaagtgcttgatttggtccttaatcaactttgtgatgtcattgtggaacaactgagggatcgtgtggttacagggcttctgcaagcatgcctggatggcttccttcgtgtgatactggatggaggttctacacgtgtcttctctccaaatgatgcagctttattggaggaagatcttgaaaccctgaaggaattttttgtttctggtggagatggactgcctcgtggaactgttgaaaacttagtctcgcgtgtacgtcctgtaataaatctgatcaagcaagagacccgcgtgctcattgatgacctacgagaagttactcaaggtggcaagagcaaatttggagcggactccaaaaccctccttagggtcctgtgtcacagaaatgattcagaggcatcac

SEQ ID NO: 59326 - DNA, 1094 bp, Zea Mays
agatcattgcgcaccaaaggggtctaagactgcagatcaattttttgcatttaaggttcctatgcgagatggagaattaaatagtctatgccgtggtcttgacaaggcattccaagtttatacacagctggttactgcacccctagttgataaagaagatttagctccgcctattcctgttcttactcgatataaaaaggagcttggaatcaaggcttttgtaaaaaaagaggtccaagaagttagaacagttgatgagaggaaagctagcgaaattactcagcttacaatgccaaagctttgtgttcgtcttaacagtctatattacggtatcagccagttgagtaagttggaggacagcattaatgagaggtgggctcggaagaaaagtgaaaacactaacatcagacgaaaaagtgaaaagtcaaagagtgccgtccctaatcagaagaatcaatttgatggcagcagaaaagaaatcaatactgctattgatcgtctctgtgaatttactggtaaggaaatatatagaggcaatgttttggtagaaacttattgctattaaaatttgaacctttttctttccttttcttacgcagggacaaaggttatattctgggacctgcagcagccatttgttgagaatttatacagaaatggtgttgctcaagctcgattggacaccataactgaagtgcttgatttggtccttaatcaactttgtgatgtcattgtggaacaactgagggatcgtgtggttacagggcttctgcaagcatgcctggatggcttccttcgtgtgatactggatggaggttctacacgtgtcttctctccaaatgatgcagctttattggaggaagatcttgaaaccctgaaggaattttttgtttctggtggagatggactgcctcgtggaactgttgaaaacttagtctcgcgtgtacgtcctgtaataaatctgatcaagcaagagacccgcgtgctcattgatgacctacgagaagttactcaaggtggcaagagcaaatttggagcggactccaaaaccctccttagggtcctgtgtcacagaaatgattcagaggcatcac

SEQ ID NO: 59327 - DNA, 2899 bp, Zea Mays
ctgccgtgtgcgcctagtggagtagcacttgctacagaatgcgagctaaaaagtacgagggagccagctaataccagggctcggctcatattctgttcaacgactcgtctagttttccagaggcgagccaggtgtctcctcccagggccgccggacaaggcgtccacacgcgcggtgttctgcctccagtcggtcgcgatagcgctctccatcctgccgccgccgcctaccatttctgccattcctgtctattcccatcgttgaaaccgctcgccctctccacgtgacatccaaacgcgaccgccccctccccacccccaccagccgcccgcctcctctgcgtcgcatccgccgcgagctcggggcgggacagcctccacggcggcggggtcacgctgaacagggagccgctgcagggccggcgcctgcacgccatctccgtgtatgtgagcgggatgctgaccgtgcgcgagacgctgctgttcgccgctgagttctgcctgccctgcgcgctttcctcagagcggaagcgcgcgcgcgtcgaccagctcggcctcttctacgctgccgacaccatcaacggctggcggcagcggcgttcctatcgcagccatgcgccgtcgacgtcgtctacggggaggtgtgggcaggacggctggcactgccggtggtgaacggggaagagctgtttgcacgcgggctgttgggtgtcgagctcgccccgatgacgttccgtcgttcgcagcaaagccagactggtgccctgtgttccttcgggcatcactacggcaatttgaggggctagaggacgccgccgacgtgctcgtcaactcattccacgagatcgaacccaaggaggcagattatatggccctaacatggcatgcaaagacaataggcccaacattgccatcattttatcttgatgatgactgtttgccgttgaacaagacttacggtttcaacctcttcaacagcattagaggagcttggcaatggattgtacaattctggcaaaccattcatttgggttgtgaggtcaaacgaagaacataagttgtccaatgaactccgtgacaagtgcaaggaacgtggccttattgtttcttagtgcccccagctggaagttctagcacataaagctacaggttgtttcttcacacattgcggatggaactcaacattggaagcaattgttaatggtgtgccaatggtggcaataccacactgggcagactagccgaccatatcaaaatatatggagagcatgtggggcttgggtgtccgggtgcgcaaggatgagaaaggcttggtgacgagggacaaggtggaaaggtgcatcaaggatgtcatggatggtgatagtaaggataagtataggaagagtgccactatgtggatgcaaaaggccaaggcagctatgcagaatggagggagttcggacaagaatattacagaattcatcgctaagtattctttaagttaattttcaaagatttcgtaaaaaagttaattttcaaaggtataatgatagtgttataattactttctaccttcgtggattgtatgctgcatgttatattttgtctcaggattgtgcgtattacgttttgacttgatgctgtagatgctacaacagcaacctccacgtctaaaaatatatacattgttatgcgctatcctttgaaactttataatcacattatctttacaactaattaagtactcattgtaggcgtccacacgccgcgagctcggggcgggacagcctccacggtggcggggtcacgctgaacagggagccgctgcagggccggcacctgcacgccatctccgtgtatgtgagcaggatactgaccgtgcgcgagacgttgctgttcgctgccgagttccgcctgccctgcgcgctttcctcagagcggaagcgcgtgggcgtcgaccagctcggcctcttctacaccgccgacaccatcatcggcaacaggggccaccacggcacgtcctcggcagcggcgacctgtacgcggtgtgtgctggtgatgcaagtggcggcgtgggcgtgggcgtgggcggcctatacgaggtcgtgtacaacaacgtcgttagtctatgtgtcaaggccattgggtggaggcccgagcggaggttcaagtggaagctcctcgacggctcgacggggagaagaggagcgcccacttccctatggtcctggtccagatgcccatgtataacgagctggaggtgcataagctgttagcggcagcatgtgagctgcagtggtcgaaggacaggataatagttcaagtggtggactattctactgatccctttatcaagacctgaagatgaaagaagagcaccggcccactttgcttcataggaccactatatggaatggtatgcagttggtggactctggcttttgtagcgtaacatagtggtccatggtgcacttagaaaggacaatctaatcatgatgcaatgacatcatatgtgattcatgatatagcatcgacatcatggttcaattatcgtgatatatgttcccgttgcaacgcatgggcactcacctagtaccttttgaagtcctgaaccaccacgagagcggcggcggcggcggcggctcccaagatattttcgcttcctaaattcacaatgcaggatccgagtccgatacgtcctgggaatgggagcgtccgcacgttcgactctgctgggtgccgcggtcgccgcccaccgacggaccctgcagcttgctctactgtagccgccacccgtcggaaccctagctccatggctgcgctgcgtgggcgagagactagcgagagaagccactatcgttgacggtcagcattcagccccctagctaattgctgttttctacgatgtgtcgttgttt

SEQ ID NO: 59328 - DNA, 1809 bp, Zea Mays
cacgcgcggtgttctgcctccagtcggtcgcgatagcgctctccatcctgccgccgccgcctaccatttctgccattcctgtctattcccatcgttgaaaccgctcgccctctccacgtgacatccaaacgcgaccgccccctccccacccccaccagccgcccgcctcctctgcgtcgcatccgccgcgagctcggggcgggacagcctccacggcggcggggtcacgctgaacagggagccgctgcagggccggcgcctgcacgccatctccgtgtatgtgagcgggatgctgaccgtgcgcgagacgctgctgttcgccgctgagttctgcctgccctgcgcgctttcctcagagcggaagcgcgcgcgcgtcgaccagctcggcctcttctacgctgccgacaccatcaacggctggcggcagcggcgttcctatcgcagccatgcgccgtcgacgtcgtctacggggaggtgtgggcaggacggctggcactgccggtggtgaacggggaagagctgtttgcacgcgggctgttgggtgtcgagctcgccccgatgacgttccgtcgttcgcagcaaagccagactggtgccctgtgttccttcgggcatcactacggcaatttgaggggctagaggacgccgccgacgtgctcgtcaactcattccacgagatcgaacccaagttagaggagcttggcaatggattgtacaattctggcaaaccattcatttgggttgtgaggtcaaacgaagaacataagttgtccaatgaactccgtgacaagtgcaaggaacgtggccttattgtttcttagtgcccccagctggaagttctagcacataaagctacaggttgtttcttcacacattgcggatggaactcaacattggaagcaattgttaatggtgtgccaatggtggcaataccacactgggcagactagccgaccatatcaaaatatatggagagcatgtggggcttgggtgtccgggtgcgcaaggatgagaaaggcttggtgacgagggacaaggtggaaaggtgcatcaaggatgtcatggatggtgatagtaaggataagtataggaagagtgccactatgtggatgcaaaaggccaaggcagctatgcagaatggagggagttcggacaagaatattacagaattcatcgctaagcgtccacacgccgcgagctcggggcgggacagcctccacggtggcggggtcacgctgaacagggagccgctgcagggccggcacctgcacgccatctccgtgtatgtgagcaggatactgaccgtgcgcgagacgttgctgttcgctgccgagttccgcctgccctgcgcgctttcctcagagcggaagcgcgtgggcgtcgaccagctcggcctcttctacaccgccgacaccatcatcggcaacaggggccaccacggcacgtcctcggcagcggcgacctgtacgcggtgtgtgctggtgatgcaagtggcggcgtgggcgtgggcgtgggcggcctatacgaggtcgtgtacaacaacgtcgttagtctatgtgtcaaggccattgggtggaggcccgagcggaggttcaagtggaagctcctcgacggctcgacggggagaagaggagcgcccacttccctatggtcctggtccagatgcccatgtataacgagctggaggtgagaacaggccaccacaaaaaagtcgctaaaatcgtataggaatatgttaactattcatccatggattgttattcctcttgttactttgtgagatcaaatattattttgatgaggtgcgct

SEQ ID NO: 59329 - DNA, 3181 bp, Zea Mays
cacgcgcggtgttctgcctccagtcggtcgcgatagcgctctccatcctgccgccgccgcctaccatttctgccattcctgtctattcccatcgttgaaaccgctcgccctctccacgtgacatccaaacgcgaccgccccctccccacccccaccagccgcccgcctcctctgcgtcgcatccgccgcgagctcggggcgggacagcctccacggcggcggggtcacgctgaacagggagccgctgcagggccggcgcctgcacgccatctccgtgtatgtgagcgggatgctgaccgtgcgcgagacgctgctgttcgccgctgagttctgcctgccctgcgcgctttcctcagagcggaagcgcgcgcgcgtcgaccagctcggcctcttctacgctgccgacaccatcaacggctggcggcagcggcgttcctatcgcagccatgcgccgtcgacgtcgtctacggggaggtgtgggcaggacggctggcactgccggtggtgaacggggaagagctgtttgcacgcgggctgttgggtgtcgagctcgccccgatgacgttccgtcgttcgcagcaaagccagactggtgccctgtgttccttcgggcatcactacggcaatttgaggggctagaggacgccgccgacgtgctcgtcaactcattccacgagatcgaacccaaggaggcagattatatggccctaacatggcatgcaaagacaataggcccaacattgccatcattttatcttgatgatgactgtttgccgttgaacaagacttacggtttcaacctcttcaacagcagtgagtcatgtctggcttggctcgacaaacagcttccgtgttctgttgttcttgtatcctatggtactgtctctgattatgatgaagcacagttagaggagcttggcaatggattgtacaattctggcaaaccattcatttgggttgtgaggtcaaacgaagaacataagttgtccaatgaactccgtgacaagtgcaaggaacgtggccttattgtttcttagtgcccccagctggaagttctagcacataaagctacaggttgtttcttcacacattgcggatggaactcaacattggaagcaattgttaatggtgtgccaatggtggcaataccacactgggcagactagccgaccatatcaaaatatatggagagcatgtggggcttgggtgtccgggtgcgcaaggatgagaaaggcttggtgacgagggacaaggtggaaaggtgcatcaaggatgtcatggatggtgatagtaaggataagtataggaagagtgccactatgtggatgcaaaaggccaaggcagctatgcagaatggagggagttcggacaagaatattacagaattcatcgctaatactcattgtaggcgtccacacgccgcgagctcggggcgggacagcctccacggtggcggggtcacgctgaacagggagccgctgcagggccggcacctgcacgccatctccgtgtatgtgagcaggatactgaccgtgcgcgagacgttgctgttcgctgccgagttccgcctgccctgcgcgctttcctcagagcggaagcgcgtgggcgtcgaccagctcggcctcttctacaccgccgacaccatcatcggcaacaggggccaccacggcacgtcctcggcagcggcgacctgtacgcggtgtgtgctggtgatgcaagtggcggcgtgggcgtgggcgtgggcggcctatacgaggtcgtgtacaacaacgtcgttagtctatgtgtcaaggccattgggtggaggcccgagcggaggttcaagtggaagctcctcgacggctcgacggggagaagaggagcgcccacttccctatggtcctggtccagatgcccatgtataacgagctggaggtgcataagctgttagcggcagcatgtgagctgcagtggtcgaaggacaggataatagttcaagtggtggactattctactgatccctttatcaagacctgaagatgaaagaagagcaccggcccactttgcttcataggaccactatatggaatggtatgcagttggtggactctggcttttgtagcgtaacatagtggtccatggtgcacttagaaaggacaatctaatcatgatgcaatgacatcatatgtgattcatgatatagcatcgacatcatggttcaattatcgtgatatatgttcccgttgcaacgcatgggcactcacctagtaccttttgaagtcctgaaccaccacgagagcggcggcggcggcggcggctcccaagatattttcgcttcctaaattcacaatgcaggatccgagtccgatacgtcctgcgtatgtaggatgagaacagtcggatttgtaaacgctaaaatcgttctgctctcgtatttttttatcaaaaataaaatcgaaaatagtaactccagacagatatcaatatttcgaaaacatcgaaaataaaagtttggcacagaaagtatatcgctaactgtcgaaatttaaaatactatcggtaaccaaagcaatatgaaaacatcccaatataataggctcactaactgtatcatagtcactcgcaatttacatggtagaaactagcatattcatacgctgaggccacctgggagagatcaccggtgctaacaaattcaatattcatacagagactatattcatatagagagcaaagcaaatagttgctagttcagtagtttatagtttatacgtggtgcctgtctgtacgactctatctctgttgatgccgtcgccgatctgggaggccacgacgctgcggcgtttttgggagggcgagaggggagggcgagggcgtgatgccgacgcacggcttgcaaggcacgacggcgattcagctaggacgaagacgacgagtcagccatggacgaccggatgagagttgagagaggctggaactggacctgggaatgggagcgtccgcacgttcgactctgctgggtgccgcggtcgccgcccaccgacggaccctgcagcttgctctactgtagccgccacccgtcggaaccctagctccatggctgcgctgcgtgggcgagagactagcgagagaagccactatcgttgacggtcagcattcagccccctagctaattgctgttttctacgatgtgtcgttgttt

SEQ ID NO: 59330 - DNA, 2530 bp, Zea Mays
gttagaggagcttggcaatggattgtacaattctggcaaaccattcatttgggttgtgaggtcaaacgaagaacataagttgtccaatgaactccgtgacaagtgcaaggaacgtggccttattgtttcttagtgcccccagctggaagttctagcacataaagctacaggttgtttcttcacacattgcggatggaactcaacattggaagcaattgttaatggtgtgccaatggtggcaataccacactgggcagactagccgaccatatcaaaatatatggagagcatgtggggcttgggtgtccgggtgcgcaaggatgagaaaggcttggtgacgagggacaaggtggaaaggtgcatcaaggatgtcatggatggtgatagtaaggataagtataggaagagtgccactatgtggatgcaaaaggccaaggcagctatgcagaatggagggagttcggacaagaatattacagaattcatcgctaagtattctttaagttaattttcaaagatttcgtaaaaaagttaattttcaaaggtataatgatagtgttataattactttctaccttcgtggattgtatgctgcatgttatattttgtctcaggattgtgcgtattacgttttgacttgatgctgtagatgctacaacagcaacctccacgtctaaaaatatatacattgttatgcgctatcctttgaaactttataatcacattatctttacaactaattaagtactcattgtaggcgtccacacgccgcgagctcggggcgggacagcctccacggtggcggggtcacgctgaacagggagccgctgcagggccggcacctgcacgccatctccgtgtatgtgagcaggatactgaccgtgcgcgagacgttgctgttcgctgccgagttccgcctgccctgcgcgctttcctcagagcggaagcgcgtgggcgtcgaccagctcggcctcttctacaccgccgacaccatcatcggcaacaggggccaccacggcacgtcctcggcagcggcgacctgtacgcggtgtgtgctggtgatgcaagtggcggcgtgggcgtgggcgtgggcggcctatacgaggtcgtgtacaacaacgtcgttagtctatgtgtcaaggccattgggtggaggcccgagcggaggttcaagtggaagctcctcgacggctcgacggggagaagaggagcgcccacttccctatggtcctggtccagatgcccatgtataacgagctggaggtgcataagctgttagcggcagcatgtgagctgcagtggtcgaaggacaggataatagttcaagtggtggactattctactgatccctttatcaagacctgaagatgaaagaagagcaccggcccactttgcttcataggaccactatatggaatggtatgcagttggtggactctggcttttgtagcgtaacatagtggtccatggtgcacttagaaaggacaatctaatcatgatgcaatgacatcatatgtgattcatgatatagcatcgacatcatggttcaattatcgtgatatatgttcccgttgcaacgcatgggcactcacctagtaccttttgaagtcctgaaccaccacgagagcggcggcggcggcggcggctcccaagatattttcgcttcctaaattcacaatgcaggatccgagtccgatacgtcctgcgtatgtaggatgagaacagtcggatttgtaaacgctaaaatcgttctgctctcgtatttttttatcaaaaataaaatcgaaaatagtaactccagacagatatcaatatttcgaaaacatcgaaaataaaagtttggcacagaaagtatatcgctaactgtcgaaatttaaaatactatcggtaaccaaagcaatatgaaaacatcccaatataataggctcactaactgtatcatagtcactcgcaatttacatggtagaaactagcatattcatacgctgaggccacctgggagagatcaccggtgctaacaaattcaatattcatacagagactatattcatatagagagcaaagcaaatagttgctagttcagtagtttatagtttatacgtggtgcctgtctgtacgactctatctctgttgatgccgtcgccgatctgggaggccacgacgctgcggcgtttttgggagggcgagaggggagggcgagggcgtgatgccgacgcacggcttgcaaggcacgacggcgattcagctaggacgaagacgacgagtcagccatggacgaccggatgagagttgagagaggctggaactggacctgggaatgggagcgtccgcacgttcgactctgctgggtgccgcggtcgccgcccaccgacggaccctgcagcttgctctactgtagccgccacccgtcggaaccctagctccatggctgcgctgcgtgggcgagagactagcgagagaagccactatcgttgacggtcagcattcagccccctagctaattgctgttttctacgatgtgtcgttgttt

SEQ ID NO: 59331 - DNA, 420 bp, Zea Mays
atgttcacgggtctggccatccttggagataccagcctcaaaaccaccagtggtggagtcaatgataaggacagcacagtcagcctgggaggtaccagtgatcatgttcttgatgaagtcacggtgtccaggggcatcaatgaccgtgcagtagtacttggtggtctcaaacttccacagagcgatatcaatggtgatacctctctcacgctcagccttgagcttgtcgagcacccacgcgtacttgaaggaccgcttgttcatttcagcagcctccttctcaaacctctcgatcacacgcttgtcaatgcctccaagcttgtagatcaggtgtcctgtggtggtcgacttgccagagtcaacgtggccaataaccacaatgttgatgtgggacttctctttacccatggttggaggtga

SEQ ID NO: 59332 - DNA, 2949 bp, Zea Mays
agtagttgtatgggcatgccccattccagctccctccaccacttcctccgccacgtttccttccctccggacccgcacctcctccccaccgcgttcaagtcatgcccgacactgccgctcgcccgcgctctccacgccgtcgccgaggtcagcggcctcgcgcgggaccccttcgtcgcctcctcgctcctacacgcctatctccgcctcggtaccacgggcaacgcccgcgccttgttcgacggaatgccgcgcccgcagaggaccgtcgtcggctggagcgcgctggtcgcggcgcacgcggcgcgcggggacgccgagggcgcctggcgcctgctcgaggagatgcggcgggatggcggcgtggagccgaacgtgatcacctggaacgggctcgtgtccgggctcaaccgcagtggccgtgcccgggacgcggtcgttgcgctggcgaccatgcacggggaagggctcctgcgtcctgacgccacgggcgtctcgtgcgcgctgtctgctgttggggacgtcggtttggtttcggtgggccaacagctgcacggatacgctgtgaaggcaggttgcagggcggacgcctgcgtggtcaccgccctcatcgacatgtacgggaagtgcggccaggctgcagaggttgttcgggtgtttgatgagtccagccacatggatgttgcttcttgcaatgcccttattgcgggactatctcggaacgcgcaagtctgcgaggcactaaggttgttcaaagagtttgttgaccggggagttgagctgaatgtcgtgtcctggacctcgattgttgcttgttgtgtgcagaatggtaaggatttggaagctgtcgagtttttcagggagatgcaggcacaagggactgaaccaaactctgtcacgatcccttgtgtgctgccagcgtttgccaatgttgcagctctgatgcatgggaggtcagcgcactgttttgctctcaggaagggctttctccatgatgtttatgtgagcagtgctttggtggacatgtatgcaaagtgtggcagggttaaggatgcgagaataatattcgatacaatggtatctcggaatgtggtgtcatggaatgcgatgatcggtggctatgctatgtatggagaggctgtgaatgcagtttggatgtttcactcaatgctgaagtgcaaacaaaagcctgacatggtcaccttcacctgcttgcttgctgcttgcacgcaagctggcctcacagaggaagggcgtcattatttcaaagaaatgcataatgagtatggtgtttctccgaggatggaacattatgcatgtatggttactcttctaggacgtgctggcaagcttgatgaggcatatgatctcataagtgacatgccctttgagccagatgcttatatttggggttcattattaggctcttgccgggttcatggcaacgtggatctggctgaggttgcagcagaaaagctctttcatctagagccagaaaatgctggtaattatgtccttctctctaacatttatgcttctaagaaaatgtgggatcgggttaatagggttagagagatgatgaaggatgtaggcttgaagaaggaaaaaggctgtagctggattgagatcaagaacaaggtgcatatgttgttggctggtgatgattcacaccctatgatgactgcgataattgagaaaataaaccagcttaatattcagatgaggaagctaggctttgtaccaagcacagattttgtcctacatgatgtggaggaacaagagaaagatgatattcttgctgttcacagtgagaagctagctgtcgctttgggactcataagcactagcccaggaacaacccttcgggtgataaagaacctccgaatttgtggcgactgccatgaggcaatgaaatttatatcatcttttgaggggagggagatatctgttagagataccaacaggttccatcacttcagtggtggaaaatgttcctgtggggatttttggtgactttatgtgtgctttccttgaggagagggagatatctgttagagataccaacaggttccatcactttaggagtggaaaaggttcctgtgggggtttttggtgactttgtgctttcctgcaatactatttgcacaacaacttgatgaggatggcaatggaacatagcattcgttcctggatttttttcccataagatggatttgacttaagagctattggattggattggacttgacattaaacattttgtattggggtacgtttggattttgattttttccctttgattttaattgaaattgtccatatggattggatactgctaatccattgccacctctagttgcagcctagtaggaaaaaaggattcttctactttctgagctcgttgactgaggaattttgctcaagtatgtttgaaggggaagacatacttgaaggcattggttctttaagggctggggggatagattttttaagattcagtgaaaggagcaagcaggaggtccgtcaccctgaatatcctagattgtgtgatgtaaatatctccaaagaaaacttgtttttaacttcaggaaacgagattatttgacataacaagaacactatcatgctatttcatttatctatttcttatttcaagtaatagaacattgggattataaattattttaatatctatgccgttggctttgaatatctagttgttgagaagggcacactatttctagaagttacagcaccatgtatcaatatccagattgaagtgttgataagtgtgtctgaatatttttagctattgttgtttgttgtttttatttctatggaaatgaattgtatgtttacatgtctccgaaaatggactgaataatgtatgtctgggatgagattactgatgcatcaggatacaatcgtggtaatctcttagtggtcgat

SEQ ID NO: 59333 - DNA, 3910 bp, Zea Mays
agtagttgtatgggcatgccccattccagctccctccaccacttcctccgccacgtttccttccctccggacccgcacctcctccccaccgcgttcaagtcatgcccgacactgccgctcgcccgcgctctccacgccgtcgccgaggtcagcggcctcgcgcgggaccccttcgtcgcctcctcgctcctacacgcctatctccgcctcggtaccacgggcaacgcccgcgccttgttcgacggaatgccgcgcccgcagaggaccgtcgtcggctggagcgcgctggtcgcggcgcacgcggcgcgcggggacgccgagggcgcctggcgcctgctcgaggagatgcggcgggatggcggcgtggagccgaacgtgatcacctggaacgggctcgtgtccgggctcaaccgcagtggccgtgcccgggacgcggtcgttgcgctggcgaccatgcacggggaagggctcctgcgtcctgacgccacgggcgtctcgtgcgcgctgtctgctgttggggacgtcggtttggtttcggtgggccaacagctgcacggatacgctgtgaaggcaggttgcagggcggacgcctgcgtggtcaccgccctcatcgacatgtacgggaagtgcggccaggctgcagaggttgttcgggtgtttgatgagtccagccacatggatgttgcttcttgcaatgcccttattgcgggactatctcggaacgcgcaagtctgcgaggcactaaggttgttcaaagagtttgttgaccggggagttgagctgaatgtcgtgtcctggacctcgattgttgcttgttgtgtgcagaatggtaaggatttggaagctgtcgagtttttcagggagatgcaggcacaagggactgaaccaaactctgtcacgatcccttgtgtgctgccagcgtttgccaatgttgcagctctgatgcatgggaggtcagcgcactgttttgctctcaggaagggctttctccatgatgtttatgtgagcagtgctttggtggacatgtatgcaaagtgtggcagggttaaggatgcgagaataatattcgatacaatggtatctcggaatgtggtgtcatggaatgcgatgatcggtggctatgctatgtatggagaggctgtgaatgcagtttggatgtttcactcaatgctgaagtgcaaacaaaagcctgacatggtcaccttcacctgcttgcttgctgcttgcacgcaagctggcctcacagaggaagggcgtcattatttcaaagaaatgcataatgagtatggtgtttctccgaggatggaacattatgcatgtatggttactcttctaggacgtgctggcaagcttgatgaggcatatgatctcataagtgacatgccctttgagccagatgcttatatttggggttcattattaggctcttgccgggttcatggcaacgtggatctggctgaggttgcagcagaaaagctctttcatctagagccagaaaatgctggtaattatgtccttctctctaacatttatgcttctaagaaaatgtgggatcgggttaatagggttagagagatgatgaaggatgtaggcttgaagaaggaaaaaggctgtagctggattgagatcaagaacaaggtgcatatgttgttggctggtgatgattcacaccctatgatgactgcgataattgagaaaataaaccagcttaatattcagatgaggaagctaggctttgtaccaagcacagattttgtcctacatgatgtggaggaacaagagaaagatgatattcttgctgttcacagtgagaagctagctgtcgctttgggactcataagcactagcccaggaacaacccttcgggtgataaagaacctccgaatttgtggcgactgccatgaggcaatgaaatttatatcatcttttgaggggagggagatatctgttagagataccaacaggttccatcacttcagtggtggaaaatgttcctgtggggatttttggtgactttatgtgtgctttccttgaggagagggagatatctgttagagataccaacaggttccatcactttaggagtggaaaaggttcctgtgggggtttttggtgactttgtgctttcctgcaatactatttgcacaacaacttgatgaggatggcaatggaacatagcattcgttcctggatttttttcccataaggtaattgtttaactatacaatcaagcctgacctcatatgtcgaaaggaagaagcaaatctgatatcaggacttatacattatgtgattatgcattggagagggggggaaaacaagactaatgcattatgcaacaacagctgctgcatggtgttttcagctggctttttcaaatttatctatctgatttttccatcccaatatatatttgtttcctgggcagttctgtatgtttgcaactacacatgtatctttagttagtagttctttagccagttctgtatttttgcaactacctcatgatcttgtgatttgccatgatagcatggtataatccttagtgattatttgtcatatcatattttactaggtctaactccaaaaacatttgatatgcaattcagcacatttattatcttaatgccgtaaatctgttctaatttgagattcaccacgattcttgctgccagtgatcaagtcatttcataacaaaaccacttgtcacactggtatacacaaaattagcgggcaatcgtatcaagtcatttccaaaagcatttcattgactttgctaaagttttaaggtgtgaatttgaggttttaatttgactattgtccagcttttgacgtggggcccacttatatacttagttgcaccgatctacacaaagtagcaggcaatcatactaaatcatctccaacaaactttagtctaattcactaagtttttaaggtatcaccacatggtattaattctaggatccagctttcgatgtaagggtcatgtatatatctactcaccacaaattaggggacaatcatactaaattatttctaacaaacctaaatcaatttaaaattttaaggtgtggacgtaagcttttaaattctaaggtccagcttttgacgcacgcagaatcaacatgtagttataatggttttgttattattgaatcatactagatggatttgacttaagagctattggattggattggacttgacattaaacattttgtattggggtacgtttggattttgattttttccctttgattttaattgaaattgtccatatggattggatactgctaatccattgccacctctagttgcagcctagtaggaaaaaaggattcttctactttctgagctcgttgactgaggaattttgctcaagtatgtttgaaggggaagacatacttgaaggcattggttctttaagggctggggggatagattttttaagattcagtgaaaggagcaagcaggaggtccgtcaccctgaatatcctagattgtgtgatgtaaatatctccaaagaaaacttgtttttaacttcaggaaacgagattatttgacataacaagaacactatcatgctatttcatttatctatttcttatttcaagtaatagaacattgggattataaattattttaatatctatgccgttggctttgaatatctagttgttgagaagggcacactatttctagaagttacagcaccatgtatcaatatccagattgaagtgttgataagtgtgtctgaatatttttagctattgttgtttgttgtttttatttctatggaaatgaattgtatgtttacatgtctccgaaaatggactgaataatgtatgtctgggatgagattactgatgcatcaggatacaatcgtggtaatctcttagtggtcgat

SEQ ID NO: 59334 - DNA, 2796 bp, Zea Mays
gttgtatgggcatgccccattccagctccctccaccacttcctccgccacgtttccttccctccggacccgcacctcctccccaccgcgttcaagtcatgcccgacactgccgctcgcccgcgctctccacgccgtcgccgaggtcagcggcctcgcgcgggaccccttcgtcgcctcctcgctcctacacgcctatctccgcctcggtaccacgggcaacgcccgcgccttgttcgacggaatgccgcgcccgcagaggaccgtcgtcggctggagcgcgctggtcgcggcgcacgcggcgcgcggggacgccgagggcgcctggcgcctgctcgaggagatgcggcgggatggcggcgtggagccgaacgtgatcacctggaacgggctcgtgtccgggctcaaccgcagtggccgtgcccgggacgcggtcgttgcgctggcgaccatgcacggggaagggctcctgcgtcctgacgccacgggcgtctcgtgcgcgctgtctgctgttggggacgtcggtttggtttcggtgggccaacagctgcacggatacgctgtgaaggcaggttgcagggcggacgcctgcgtggtcaccgccctcatcgacatgtacgggaagtgcggccaggctgcagaggttgttcgggtgtttgatgagtccagccacatggatgttgcttcttgcaatgcccttattgcgggactatctcggaacgcgcaagtctgcgaggcactaaggttgttcaaagagtttgttgaccggggagttgagctgaatgtcgtgtcctggacctcgattgttgcttgttgtgtgcagaatggtaaggatttggaagctgtcgagtttttcagggagatgcaggcacaagggactgaaccaaactctgtcacgatcccttgtgtgctgccagcgtttgccaatgttgcagctctgatgcatgggaggtcagcgcactgttttgctctcaggaagggctttctccatgatgtttatgtgagcagtgctttggtggacatgtatgcaaagtgtggcagggttaaggatgcgagaataatattcgatacaatggtatctcggaatgtggtgtcatggaatgcgatgatcggtggctatgctatgtatggagaggctgtgaatgcagtttggatgtttcactcaatgctgaagtgcaaacaaaagcctgacatggtcaccttcacctgcttgcttgctgcttgcacgcaagctggcctcacagaggaagggcgtcattatttcaaagaaatgcataatgagtatggtgtttctccgaggatggaacattatgcatgtatggttactcttctaggacgtgctggcaagcttgatgaggcatatgatctcataagtgacatgccctttgagccagatgcttatatttggggttcattattaggctcttgccgggttcatggcaacgtggatctggctgaggttgcagcagaaaagctctttcatctagagccagaaaatgctggtaattatgtccttctctctaacatttatgcttctaagaaaatgtgggatcgggttaatagggttagagagatgatgaaggatgtaggcttgaagaaggaaaaaggctgtagctggattgagatcaagaacaaggtgcatatgttgttggctggtgatgattcacaccctatgatgactgcgataattgagaaaataaaccagcttaatattcagatgaggaagctaggctttgtaccaagcacagattttgtcctacatgatgtggaggaacaagagaaagatgatattcttgctgttcacagtgagaagctagctgtcgctttgggactcataagcactagcccaggaacaacccttcgggtgataaagaacctccgaatttgtggcgactgccatgaggcaatgaaatttatatcatcttttgaggggagggagatatctgttagagataccaacaggttccatcacttcagtggtggaaaatgttcctgtggggatttttggtgactttatgtgtgctttccttgaggagagggagatatctgttagagataccaacaggttccatcactttaggagtggaaaaggttcctgtgggggtttttggtgactttgtgctttcctgcaatactatttgcacaacaacttgatgaggatggcaatggaacatagcattcgttcctggatttttttcccataagttgcagcctagtaggaaaaaaggattcttctactttctgagctcgttgactgaggaattttgctcaagtatgtttgaaggggaagacatacttgaaggcattggttctttaagggctggggggatagattttttaagattcagtgaaaggagcaagcaggaggtccgtcaccctgaatatcctagattgtgtgatgtaaatatctccaaagaaaacttgtttttaacttcaggaaacgagattatttgacataacaagaacactatcatgctatttcatttatctatttcttatttcaagtaatagaacattgggattataaattattttaatatctatgccgttggctttgaatatctagttgttgagaagggcacactatttctagaagttacagcaccatgtatcaatatccagattgaagtgttgataagtgtgtctgaatatttttagctattgttgtttgttgtttttatttctatggaaatgaattgtatgtttacatgtctccgaaaatggactgaataatgtatgtctgggatgagattactgatgcatcaggatacaatcgtggtaatctcttagtggtcgat

SEQ ID NO: 59335 - DNA, 2779 bp, Zea Mays
atgccccattccagctccctccaccacttcctccgccacgtttccttccctccggacccgcacctcctccccaccgcgttcaagtcatgcccgacactgccgctcgcccgcgctctccacgccgtcgccgaggtcagcggcctcgcgcgggaccccttcgtcgcctcctcgctcctacacgcctatctccgcctcggtaccacgggcaacgcccgcgccttgttcgacggaatgccgcgcccgcagaggaccgtcgtcggctggagcgcgctggtcgcggcgcacgcggcgcgcggggacgccgagggcgcctggcgcctgctcgaggagatgcggcgggatggcggcgtggagccgaacgtgatcacctggaacgggctcgtgtccgggctcaaccgcagtggccgtgcccgggacgcggtcgttgcgctggcgaccatgcacggggaagggctcctgcgtcctgacgccacgggcgtctcgtgcgcgctgtctgctgttggggacgtcggtttggtttcggtgggccaacagctgcacggatacgctgtgaaggcaggttgcagggcggacgcctgcgtggtcaccgccctcatcgacatgtacgggaagtgcggccaggctgcagaggttgttcgggtgtttgatgagtccagccacatggatgttgcttcttgcaatgcccttattgcgggactatctcggaacgcgcaagtctgcgaggcactaaggttgttcaaagagtttgttgaccggggagttgagctgaatgtcgtgtcctggacctcgattgttgcttgttgtgtgcagaatggtaaggatttggaagctgtcgagtttttcagggagatgcaggcacaagggactgaaccaaactctgtcacgatcccttgtgtgctgccagcgtttgccaatgttgcagctctgatgcatgggaggtcagcgcactgttttgctctcaggaagggctttctccatgatgtttatgtgagcagtgctttggtggacatgtatgcaaagtgtggcagggttaaggatgcgagaataatattcgatacaatggtatctcggaatgtggtgtcatggaatgcgatgatcggtggctatgctatgtatggagaggctgtgaatgcagtttggatgtttcactcaatgctgaagtgcaaacaaaagcctgacatggtcaccttcacctgcttgcttgctgcttgcacgcaagctggcctcacagaggaagggcgtcattatttcaaagaaatgcataatgagtatggtgtttctccgaggatggaacattatgcatgtatggttactcttctaggacgtgctggcaagcttgatgaggcatatgatctcataagtgacatgccctttgagccagatgcttatatttggggttcattattaggctcttgccgggttcatggcaacgtggatctggctgaggttgcagcagaaaagctctttcatctagagccagaaaatgctggtaattatgtccttctctctaacatttatgcttctaagaaaatgtgggatcgggttaatagggttagagagatgatgaaggatgtaggcttgaagaaggaaaaaggctgtagctggattgagatcaagaacaaggtgcatatgttgttggctggtgatgattcacaccctatgatgactgcgataattgagaaaataaaccagcttaatattcagatgaggaagctaggctttgtaccaagcacagattttgtcctacatgatgtggaggaacaagagaaagatgatattcttgctgttcacagtgagaagctagctgtcgctttgggactcataagcactagcccaggaacaacccttcgggtgataaagaacctccgaatttgtggcgactgccatgaggcaatgaaatttatatcatcttttgaggggagggagatatctgttagagataccaacaggttccatcacttcagtggtggaaaatgttcctgtggggatttttggtgactttatgtgtgctttccttgaggagagggagatatctgttagagataccaacaggttccatcactttaggagtggaaaaggttcctgtgggggtttttggtgactttgtgctttcctgcaatactatttgcacaacaacttgatgaggatggcaatggaacatagcattcgttcctggatttttttcccataagcctagtaggaaaaaaggattcttctactttctgagctcgttgactgaggaattttgctcaagtatgtttgaaggggaagacatacttgaaggcattggttctttaagggctggggggatagattttttaagattcagtgaaaggagcaagcaggaggtccgtcaccctgaatatcctagattgtgtgatgtaaatatctccaaagaaaacttgtttttaacttcaggaaacgagattatttgacataacaagaacactatcatgctatttcatttatctatttcttatttcaagtaatagaacattgggattataaattattttaatatctatgccgttggctttgaatatctagttgttgagaagggcacactatttctagaagttacagcaccatgtatcaatatccagattgaagtgttgataagtgtgtctgaatatttttagctattgttgtttgttgtttttatttctatggaaatgaattgtatgtttacatgtctccgaaaatggactgaataatgtatgtctgggatgagattactgatgcatcaggatacaatcgtggtaatctcttagtggtcgat

SEQ ID NO: 59336 - DNA, 1091 bp, Zea Mays
ttgagacaccacacaaatagtgaaatttctcacaccttgaagatgctctggtagtctggtactgtacagtcgcagcggcgaaaggggaatcgcgcgaaatggagctctcatcggcggggaggtggactgacctccccgaggacatcgccctagccgtcgcctcccgcctccaggaggctgatgtgtgcgcgctcggcggctgctcgcgcacctggcgcagagcctgcgacgccgactgcatctgggagcgcctctttcgctgccgctggccagctgccgtggcggaggcgtcggcgtcgtcgtcccgtatgcagggctggaaagctctctacatcagccaacacagaagaatggctgctgcaatatctaatgtggttgaatttgtgggaggcagcttaaataatgggtcacttgaatccgaatactatctgaaagctattgctgatttggccatgatacttgatataggatttctcgatgtccagtttttcttgttttcaaggaaccatagtgcgataataaacctaattggactgcactactcgatcgcatctttgcatgtgctgctgaagtcagtaaagcactccaagctcaccgtgtatcagaaaggatggtttgtgtgaacttgctcaagcttggtaggtggttctatggtttccggttgcctgatgagtacgagtcccgcaaaatctcgctaggtgagctcaccacggctgagggagcagagattcttgccattcttaaccgtggagctgtccacgaggtgtttcgtctccgcatcggtttggtgaacgtagataagtgatctggagtacaaaaaaagtacacacacaatatgtacttggcttgttttgcccattgtaaatatgtgtagtctttctgtgttgtaagtcatctgctgctctctgggttcttctttgttgtaagtgcaactgtggggatggatcgaagtatggacccatttaaacttttgtggcatcatagtcttctataaacaaataataaaggcttgccatgtgtaattagtgctacacattttcaccgtttctgtgataatttctgttgattttttttccatattttatttttct

SEQ ID NO: 59337 - DNA, 378 bp, Zea Mays
cacaaatagtgaaatttctcacaccttgaagatgctctggtagtctggtactgtacagtcgcagcggcgaaaggggaatcgcgcgaaatggagctctcatcggcggggaggtggactgacctccccgaggacatcgccctagccgtcgcctcccgcctccaggaggctgatgtgtgcgcgctcggcggctgctcgcgcacctggcgcagagcctgcgacgccgactgcatctgggagcgcctctttcgctgccgctggccagctgccgtggcggaggcgtcggcgtcgtcgtcccgtatgcaggctagcagaaccaaagtttcttgaccggcgaaggaaggacatctcccacgatattgtttggaagaagaaaccaca

SEQ ID NO: 59338 - DNA, 1419 bp, Zea Mays
ctcacaccttgaagatgctctggtagtctggtactgtacagtcgcagcggcgaaaggggaatcgcgcgaaatggagctctcatcggcggggaggtggactgacctccccgaggacatcgccctagccgtcgcctcccgcctccaggaggctgatgtgtgcgcgctcggcggctgctcgcgcacctggcgcagagcctgcgacgccgactgcatctgggagcgcctctttcgctgccgctggccagctgccgtggcggaggcgtcggcgtcgtcgtcccgtatgcagtgtataacaggctagcagaaccaaagtttcttgaccggcgaaggaaggacatctcccacgatattgtttggaagaagaaaccacagtgcaccctattctatgagttatcagggagggaggctttttaaccagcactgaaaccccacaggagttgaacccaggcgctggaggtggtactccggagtcacaaccactaggctatgaacccttttgctagtggaaccaaatccattggaccagaactggacctgtctgcctactgcaaatctatggttaatctttagggaacattttttttgcattttttgaaggattgctttgttctttccagagagtgagatatacaagttaaaaagggctggaaagctctctacatcagccaacacagaagaatggctgctgcaatatctaatgtggttgaatttgtgggaggcagcttaaataatgggtcacttgaatccgaatactatctgaaagctattgctgatttggccatgatacttgatataggatttctcgatgtccagtttttcttgttttcaaggaaccatagtgcgataataaacctaattggactgcactactcgatcgcatctttgcatgtgctgctgaagtcagtaaagcactccaagctcaccgtgtatcagaaaggatggtttgtgtgaacttgctcaagcttggtaggtggttctatggtttccggttgcctgatgagtacgagtcccgcaaaatctcgctaggtgagctcaccacggctgagggagcagagattcttgccattcttaaccgtggagctgtccacgaggtgtttcgtctccgcatcggtttggtgaacgtagataagtgatctggagtacaaaaaaagtacacacacaatatgtacttggcttgttttgcccattgtaaatatgtgtagtctttctgtgttgtaagtcatctgctgctctctgggttcttctttgttgtaagtgcaactgtggggatggatcgaagtatggacccatttaaacttttgtggcatcatagtcttctataaacaaataataaaggcttgccatgtgtaattagtgctacacattttcaccgtttctgtgataatttctgttgattttttttccatattttatttttct

SEQ ID NO: 59339 - DNA, 817 bp, Zea Mays
gttctttccagagagtgagatatacaagttaaaaagggctggaaagctctctacatcagccaacacagaagaatggctgctgcaatatctaatgtggttgaatttgtgggaggcagcttaaataatgggtcacttgaatccgaatactatctgaaagctattgctgatttggccatgatacttgatataggatttctcgatgtccagtttttcttgttttcaaggaaccatagtgcgataataaacctaattggactgcactactcgatcgcatctttgcatgtgctgccagctgaagtcagtaaagcactccaagctcaccgtgtatcagaaaggatggtttgtgtgaacttgctcaagcttggtaggtggttctatggtttccggttgcctgatgagtacgagtcccgcaaaatctcgctaggtgagctcaccacggctgagggagcagagattcttgccattcttaaccgtggagctgtccacgaggtgtttcgtctccgcatcggtttggtgaacgtagataagtgatctggagtacaaaaaaagtacacacacaatatgtacttggcttgttttgcccattgtaaatatgtgtagtctttctgtgttgtaagtcatctgctgctctctgggttcttctttgttgtaagtgcaactgtggggatggatcgaagtatggacccatttaaacttttgtggcatcatagtcttctataaacaaataataaaggcttgccatgtgtaattagtgctacacattttcaccgtttctgtgataatttctgttgattttttttccatattttatttttct

SEQ ID NO: 59340 - DNA, 1631 bp, Zea Mays
ttttttgtcgttggcgcttgcatcatccttctggatgtcgctgacggaacggtcccgacggccgaacgccaccgccacacgctccacgccgctatgggaggagtagtttctctccatgagccggcccccatgcatggatgctgctaacctctggttcagttttactgtatcgtatagtatactactacctgaatctgaattagcgcgcaccattgtgattgtgagtgagtgatggatcaaccaagaataggccaatacgattcggctagctagctaccaccaccagcagcagcagcagcaggaagccacccaacgcacgcgcacggcattgctgctggatcagccaacctagctacgcgagtagtggccgtcctcctgaattcccatggacggcgacggcagcaaaccacgcggcggaaataaggctgcacggcccgcgccagcccccgatgccacgcagcagccagcgtcatccgccgcggccggcgctggcgagaaggtcgatgacggccgccagcagcccgtggcgccagtggacgagagccgccgcgctgcgggcggcgccgagccggaggaggaggaggggggcaaccgcaacgacgacgcgcaggtggagatgttctacgcgctgctggccaacatccgggcaatgaggaggggcctgccgccgcacgacgtggcggcctcctcgtccgtgcgcggaggcggcggcgacaccggcgacgacgccgtactggactctgcgagggagaagcggctgcgcctgagcgcggacccgccgtggcgaccggcgttcaggatggaggacttcgaggagcccgctccggcggcgtgcgagacgaggaagcggacgaggggcacgggccacgacggccacggcgacggcgcgagcagcgggcacgaatagacatagaccacgtcgttgccgcacgaggcggtacagcgagtccaacagtccgacagtccgatagcaggaggcaggagcagcagagactggccgccgtccgtccggttgatcggtcccggtgtgcgagctttcctttctttctcgctgttgctgcgcggtgtacaataaatcaataatacattggcgccgtcgaacgcactcgcgcaagcgcgacagctggtcagtttcaagaaacaagagaaattgggacgtgctgtcgtctgcttgctgctacgtgctagtcgcggcgatgcgaagccaaccaccgacacggcgactgagaccgtgcagactgcagaggcaccggtaaaccatgtcggtggggttcacgcgtgcagtgcagtaataatctatctatctcttcatgccattcgcgtcaccttttcagttgttccgcgctatataatagtagtaagctttagatctgtcagtcacgagaaaagcctttctcaacagctgctatcgtcctttcatatcttttcattcacctttttcttttcttttttgagattggactggattctctgttgcttatgtcagctgcaccaaaacaatgcttctactgttttcttctagaagcgtacaccatgggcgaaaaagagaatggtaattccgaccgattttttggtctcagggttttttcacattttatgttggccggtaggagttgcaggcactaaagttt

SEQ ID NO: 59341 - DNA, 513 bp, Zea Mays
cagaattttgcccagaccctcgattcataggcatagacgaacccacaaattaaatttttagcgagggaacgatgtcatgggcaaaatcccaaatgtcccctttaatattagaatcaaccccgcaacaaagacaacctagattttaagatcaagaaaaaaagcaagattttcatgtcaagacaaatgactcagaaatgcgaacccaatccagatgaccatgcaagtcaacatgtctcaaaataacagtatagatacccaaacaacagacacagggcacacaaccaatagattttaacagatcgaagtatacgggcacaagtacaaaataaacgagggcacatgggaggacgcatcatttcttctttattgcagccttggtcaccttggcaccagttgggtccttcttctccacgctcttgatgactccaacagcaaccgtctgcctcatgtcacggacagcaaaacgacccagaggaggatactgagagaaggtctcaaccaccatgggcttag

SEQ ID NO: 59342 - DNA, 475 bp, Zea Mays
atgctcacgggtctggccatccttagagataccggcctcaaaaccaccagtggtggagtcaatgatcaggacagcacagtcagcctgggaggtacccgtgatcatgttcttgatgaagtcgcgatgtccaggggcatcaatgacagtgcagtagtacttggtggtctcaaacttccacagagcgatatcaatggtgatacctctctcacgctcagccttgagcttgtcaagcacccaagcgtacttgaaggaccgtttgttcatttcagcggcttccttctcgaacctctcaatcacacgcttgtcaatgcctccaagcttgtagatcaggtggccggtggtggttgacttgccagagtcgacatggccaataaccacaatgttgatgtgggacttctccttacccatggcttacaacagaggccaaagccttgtggaggcgcagaacagcagcccggagcagacgacggcgact

SEQ ID NO: 59343 - DNA, 1520 bp, Zea Mays
ggaaccggttccgtgctgcacgtatagtatcttcggtatgtgttcgttgattctcatctcagtgactcagtgcacatatcttcagtagaagatgcacatgcatgtacagctggaacaatggttccaaagattgccgacccagctccaagatttcgcggcgagcggtgcctgcctacctaccgtgacgggcgcgcatgcacgcatgccgataaggtagcgcacgtcactgaccgacctcctcgccctagcggagtcgtgctcgtgtgtgtcccagactcccagtctccctttcaaagcctcgcacacacgacgctagtcgtactgtgtacatacacatacaccacttgcccgagagtcgaaggtgccaagccaacgcaggtgcagatggcggccgagcaccacctcccgccggagcacgcggaccaccacagaggcgggaggaagggggtccgcgccgacgacctgaagccgggctggtggcgccgcagcccccggtacagctactactacggcgggggcgagggcgggggcgcggtccgcgccctctgcttcgccgtcctcgtcctgctcctggccgcggggatcaccctgctggtgctctacgtcgtgtaccgcccgtcccaccccaccttcgccgtcacctcggccgccgtgctggcgctgtacaacgccaccgccaacgtcgccgcgggcgcgggcgcgggcccggcgccggccaccgcgctggccgcgtcgttccagttcacgctggtgctcggcaacccgagcgggcggtcggcggcgcggtacgaccggctggcggcgtacgtggcgtaccgcggggaggccgtgacggcgccgacgcccatgcccccgctggcgcaggacgccggcaccgccgtggcggcggcgcccgtgctgggggcgggcgtcgcggcgcccgtgcccgtgtcgcccgacgccgcggcggcgctggcggcggacgtggccaacgccgtgctgccgctccgggtggtgctgctcggccgcgtccggttcgtgcacgaaccgttccaccgggggtggcgctcgctctacgcccgctgcgacctcctcatcggcgtccgcaagatcgggatcgggaacggcggcgccgccggcggtgtgcccctggcgccgcttcttggtgacccgagctgcaacgtcgacatgtgaatgtgtgatggatcccgtcgtgtagcaatctacgtgcatggtatatatgcgtgaatgttcgtctctgcgtatgtgatctgtgtatgcaaaggcaagattacatgtacgacgcgccagaaacaaataacgagtggtaatgtaatgcttcatagcagtggcctgctgcagcagctacttcctacgacggcggacttgtgccgctgttggccaacccaacgcacagtcggtggtttttggagcttcccttcccttccgtaggaacctcaaatatgcgatgcgactgtgagtgtcaccgtgcgtccgagccatgatggctcaccgaaagaataaacagcggcaggttcccg

SEQ ID NO: 59344 - DNA, 1424 bp, Zea Mays
cacatatcttcagtagaagatgcacatgcatgtacagctggaacaatggttccaaagattgccgacccagctccaagatttcgcggcgagcggtgcctgcctacctaccgtgacgggcgcgcatgcacgcatgccgataaggtagcgcacgtcactgaccgacctcctcgccctagcggagtcgtgctcgtgtgtgtcccagactcccagtctccctttcaaagcctcgcacacacgacgctagtcgtactgtgtacatacacatacaccacttgcccgagagtcgaaggtgccaagccaacgcaggtgcagatggcggccgagcaccacctcccgccggagcacgcggaccaccacagaggcgggaggaagggggtccgcgccgacgacctgaagccgggctggtggcgccgcagcccccggtacagctactactacggcgggggcgagggcgggggcgcggtccgcgccctctgcttcgccgtcctcgtcctgctcctggccgcggggatcaccctgctggtgctctacgtcgtgtaccgcccgtcccaccccaccttcgccgtcacctcggccgccgtgctggcgctgtacaacgccaccgccaacgtcgccgcgggcgcgggcgcgggcccggcgccggccaccgcgctggccgcgtcgttccagttcacgctggtgctcggcaacccgagcgggcggtcggcggcgcggtacgaccggctggcggcgtacgtggcgtaccgcggggaggccgtgacggcgccgacgcccatgcccccgctggcgcaggacgccggcaccgccgtggcggcggcgcccgtgctgggggcgggcgtcgcggcgcccgtgcccgtgtcgcccgacgccgcggcggcgctggcggcggacgtggccaacgccgtgctgccgctccgggtggtgctgctcggccgcgtccggttcgtgcacgaaccgttccaccgggggtggcgctcgctctacgcccgctgcgacctcctcatcggcgtccgcaagatcgggatcgggaacggcggcgccgccggcggtgtgcccctggcgccgcttcttggtgacccgagctgcaacgtcgacatgtgaatgtgtgatggatcccgtcgtgtagcaatctacgtgcatggtatatatgcgtgaatgttcgtctctgcgtatgtgatctgtgtatgcaaaggcaagattacatgtacgacgcgccagaaacaaataacgagtggcctgctgcagcagctacttcctacgacggcggacttgtgccgctgttggccaacccaacgcacagtcggtggtttttggagcttcccttcccttccgtaggaacctcaaatatgcgatgcgactgtgagtgtcaccgtgcgtccgagccatgatggctcaccgaaagaataaacagcggcaggttcccg

SEQ ID NO: 59345 - DNA, 987 bp, Zea Mays
gcgtgattgcgtgaaagtctcttctggatccaaactaataaacaccacgcgagtacgccgcgtgcgacctcgaggctcgagcttgacgcccgcgtgccatggctcccacggcgccgacgcaacggccgacgatgcgccactcctccgcgttcctcctcccttcaaccgcaccgtcatcgcccgcgcctggtcccgatgacgccgccgtcgcggtcgtcgtcctcaaccagccgctgccccgcttcgcgcccctcctctggtccagagcggcggtgcgggtgtgcgcggacggtggcgccaaccgcgtcttcgacggcatgccggccctgctccccggccaggaccccgacgaggttcgcgcgagttacaagccagatgtaatcaaaggggatatggactcagtaagaccagaagtgaaggaacattattccaacttgggcaccagaattgttgacgagtcacatgaccaggacacgaccgatttacacaaatgcatagcttttatagctgagaattattctgccactaacaaatctaaccatcttggtccttggagcacttgggggaaggtttgatcacgagatgggaaacatcaatgtgcttcatctcttcccaagcatcaatatcgtcctcctatcagatgattgtctgatctttctgctctcgaaaatgcatacccacgagattcacgttgaaaagtcgatcgagggaccccactgtggattgatcccgattggcatgccgtcgactagcaccacgaccaccgggcttcgatggaatctagtatgagcttcggaggattgatcagcacgtcaaatatcgtggaagaggacaaggtaacggtcacctcggattcagaccttatgtggacaacatcgctccggaagtgaatctacactcgagtatagagtatcgttatactgttgtaatattagagaaataagtgacatgcttttaatatatatatatatatatatattaaatatt

SEQ ID NO: 59346 - DNA, 1000 bp, Zea Mays
gcgtgattgcgtgaaagtctcttctggatccaaactaataaacaccacgcgagtacgccgcgtgcgacctcgaggctcgagcttgacgcccgcgtgccatggctcccacggcgccgacgcaacggccgacgatgcgccactcctccgcgttcctcctcccttcaaccgcaccgtcatcgcccgcgcctggtcccgatgacgccgccgtcgcggtcgtcgtcctcaaccagccgctgccccgcttcgcgcccctcctctggtccagagcggcggtgcgggtgtgcgcggacggtggcgccaaccgcgtcttcgacggcatgccggccctgctccccggccaggaccccgacgaggttcgcgcgagttacaagccagatgtaatcaaaggggatatggactcagtaagaccagaagtgaaggaacattattccaacttgggcaccagaattgttgacgagtcacatgaccaggacacgaccgatttacacaaatgcatagcttttatagctgagaattattctgccactaacaaatctaaccagcatcttggtccttggagcacttgggggaaggtttgatcacgagatgggaaacatcaatgtgcttcatctcttcccaagcatcaatatcgtcctcctatcagatgattgtctgatctttctgctctcgaaaatgcatacccacgagattcacgttgaaaagtcgatcgagggaccccactgtggattgatcccgattggcatgccgtcgactagcaccacgaccaccgggcttcgatggaatctagataataccagtatgagcttcggaggattgatcagcacgtcaaatatcgtggaagaggacaaggtaacggtcacctcggattcagaccttatgtggacaacatcgctccggaagtgaatctacactcgagtatagagtatcgttatactgttgtaatattagagaaataagtgacatgcttttaatatatatatatatatatatattaaatatt

SEQ ID NO: 59347 - DNA, 536 bp, Zea Mays
ggaacctggtgactcagtgagacagctctaaccaatgcactagacctgaagtctgctcttgggaagaaaaggaaggatggcaaatctgcaccgttgcaaccacttactaaagttcaacgtgtttgcattggcagattaatagagaagtacggtgatgactacaaggccatgttcatggataccaagctgaacgcaatgcagcactctgtgggtacattgaagaaactatgcgaaagacaccacgttgatggcaagatcttcgtctatccactgtagtattgtgctggcacctacttcagcctcagtgtactcttttcgccccgttaatggaacaagaacaattttgcaatgtgccccaaagaggaatccgcaattcagaactattgtgtacttacttttcgagagttgtcttgatctcccaatattgctgtgtcactttgtcgattgtcgcagtagtttgctgttcttttgtcaagcgaattatgcagggataaaccatacagtcgtttaagcaaaaggacaatatcctaggctgt

SEQ ID NO: 59348 - DNA, 961 bp, Zea Mays
atagcttgtatttctagtagaaaaaaattcagacattgcttccctccggacaaaatgagatcagcggcaccaccgtgccaacttcccagcccaaaccccgacgcgtccccacctccgtcgccgatgacaccgcgtgccccgcaggtgcggatgagggacgtgccgatggcgacggagttcggcccgtcgcctgttggtggggttggtgtctggagtggtggggtcggcgctgcagcggaggcagcagtcaccgattctgaatatgggagcgaacctgggtaccgtggcgacgtggagctgggatatggagatgaaatcgacgaagaggaggaggatgggaggcagcagctgttctggggcggggtgattggagatatgaacaaaatgaaaatcgatggcgacaataactttggggagcagaagagccatcaccgatgcaggcgcaagaagcatgatgtgaggattttggattccttgagttgaagagcttcataaggctaaaagtggtgaagcgtccatgtgttggttgtagtgttccttcactagcagcagctatttatcgatagcatgtctttgttgcagcatccactgatagagcagacaactagttactagtgtttcgacattttgtatggcacagatgtttcataatagttccctagtatctgggcgagaatttccatgagtttatctatgacggcttcaaagtgtagcttatgtgctaagaacatgtgtcttcttggttgtttttggtacacttgttagcatcgctgctggtctgacgttctacatttttatttgagtgcgtgattgatacagcacatgtcagctacttgggtgcagttgttaatattgacatgggttacagcgtaggctaatgtttcatgtttgtacgaattatttgtatttatcctgctttgaattgaacatctgtagttcccctttggaaccgattttcaat

SEQ ID NO: 59349 - DNA, 659 bp, Zea Mays
gaagaattaatccaattctcccaaaccactgtagtctccctccatgccgatttgtctcaaccatcttcttgatatgaacaaaatgaaaatcgatggcgacaataactttggggagcagaagagccatcaccgatgcaggcgcaagaagcatgatgtgaggattttggattccttgagttgaagagcttcataaggctaaaagtggtgaagcgtccatgtgttggttgtagtgttccttcactagcagcagctatttatcgatagcatgtctttgttgcagcatccactgatagagcagacaactagttactagtgtttcgacattttgtatggcacagatgtttcataatagttccctagtatctgggcgagaatttccatgagtttatctatgacggcttcaaagtgtagcttatgtgctaagaacatgtgtcttcttggttgtttttggtacacttgttagcatcgctgctggtctgacgttctacatttttatttgagtgcgtgattgatacagcacatgtcagctacttgggtgcagttgttaatattgacatgggttacagcgtaggctaatgtttcatgtttgtacgaattatttgtatttatcctgctttgaattgaacatctgtagttcccctttggaaccgattttcaat

SEQ ID NO: 59350 - DNA, 690 bp, Zea Mays
aattaatcgaattcccccaaattactccagtctatcctcgccgactttctccacccatttttctggcaatggttatccccaaatgacctaaggatcatagcaatatgaacaaaatgaaaatcgatggcgacaataactttggggagcagaagagccatcaccgatgcaggcgcaagaagcatgatgtgaggattttggattccttgagttgaagagcttcataaggctaaaagtggtgaagcgtccatgtgttggttgtagtgttccttcactagcagcagctatttatcgatagcatgtctttgttgcagcatccactgatagagcagacaactagttactagtgtttcgacattttgtatggcacagatgtttcataatagttccctagtatctgggcgagaatttccatgagtttatctatgacggcttcaaagtgtagcttatgtgctaagaacatgtgtcttcttggttgtttttggtacacttgttagcatcgctgctggtctgacgttctacatttttatttgagtgcgtgattgatacagcacatgtcagctacttgggtgcagttgttaatattgacatgggttacagcgtaggctaatgtttcatgtttgtacgaattatttgtatttatcctgctttgaattgaacatctgtagttcccctttggaaccgattttcaat

SEQ ID NO: 59351 - DNA, 5110 bp, Zea Mays
cggacgggaagatgtataacctcccaaatctctctctatctctctctactactagcttgctccatgaagtcaagagaggacggacagggaccagtcgctccccataccagaccaagattggcatgagccactgcaaccaggcttcacccacggcaccacatcctcctgttcctggtggtggtgattggtgacgacgaaagagcttgcttctaagcaccggcattgcggcgacacaatgccgacggcgccagcggcggtgctgccgcgcacttgcatggactccctcatcgccttcctccaccaccacctgcgcgcgctcctcgccgaccccgccgcgctccacgccacgcgccgccgctgtctcgctctgctcacgcccccacggcggcaccattgtcgtaaaaacctctccggagcgcaggaggaggaggagaacgaagacgacgccgtcctcgccgcgctccacggctccatcgacgcgctcctcccgtcccccgtcgacggcgcggcggccgtctgcctggcgggcgtcgaggaggcgctgcaggcccccgcgctgctgccggagcacggcgagacggcggggctggacaaccgccgcgtcgccgcgtgcgcctacttctacctcgcgctcgtgcggtgcgcccagggggacgcgtggcagatgtccatggacctcctgcaggccgtcgccgtgtgcccagccgcggtggccgctggccgcgaggacggcgcccgccgcgccgggctcgcgccacgcgcgctctgggaggggctgttcgacgacggcgtgctcgccagggccggcggcgccggcgaagaggacgcggcgcggcgcgcggccaggcgttacaaggactggctcatgtactacaaggtggtggccgccgcgccggagcaaaatggcgggtatcttcaggcaggaagatctggaagctctgtcatttcgagatggttgagttcttcggaggatagaacgaaccattcggttgatcctgaaggaattaccacggtctctgcatcagaatttggtgcccatgacggtttcaccgagctgaaggatttcctcagcatcgcagatcaagatttccaggaagataccaaggggagctctgacagcaggtgcctccatgagatgctcgaggagtcgcagtctgattcgcctgtttccttttactcgcatcttgattctagtgaacaaagtgatagcgaggcagctccatatgacaaaggaaggtcagcaaagatcatgcccatagatgcagatttcttagcagctaaactccatgaaagatcaaaccacaacaagaatctgacgtggtgcacatctcctgaaaatgcaatgatatatgctccagaatcctcaatgtaccaggtcgatgaccgtgagacgaaaccaaactgcttgcaatcaaacagatctcatggatcactgaataatctatcaaattcggtcctggagctgaagaatgctgactcatactccacatccaactattccgccaaggatgccatgtttacgcagtgctcaccgaggcatgatctcagatgcttcaatgccttctcggccaaattcatcaagaaaagttccctgtccgatctagtctccagaggaagcatgagcaggaaattcaagacttccacagccagtgatgattggagtgatgtcagctcgcgctgggcgaaggacagccaggtagattttcttgagaggttcgagaaggcagtatcaaaactgctgatttcagatggactagaaagctgcctagatgctggctctgaggtcacaactatatggcaattactgaacaacacttgtgaggcgagacacatgtcgtcagtaaggcaagatatccttgatcggctgcttgacagcatttccacatcaaaaaaggacaaagtggtcagggcatcagtctatgtactactgctcatgatatctgaagatagaaatgtcatgagaggcatcaagaggaaggacttccatttatccaacttagccgttgcattgaagagagatgtacatgaagcagccattctgatatatctgttagatcctacacctttagagatcaaaaacttggatctgttgccctcgcttctacatgttgcttgtagctcaggcacccaaaaatggccttcaatgcttccactgacaccgacatcagcatcaatagctctcatcgagatcttagtgacagcattcgactatgtaacaaacaatgtccacttggcttccctcagctcccctcctattttgtccaagcttgtggatgttgcaaagaaccacaacttggaggaaggtgtggccctggcagctattctcatcagatgtgtacgtctcaatggtaactgcaagaagttcttgtcacaggctactccagtggacccattccttcaccttctgagacgaaaagagcaccgggccaagtgtgctgcacttgaatacttccatgagattctacagattcccaggtcctcagcaaactctctgcttgaagaaataagacggcaaggtggcattgcaattatgcacacactgatggtcagcctccatcaaactggacctgaacatcgggttttaggagctagccttctcctgcaattggatatgatggagagatcagatggcaggagtgtgttccaagatgaagcgatggaagtcctgttggactctctatcatctcaagaaaacagtagagtacaggcattatcagcatgttttctttcaaacctcggagggacttattcctggtcaggagaatcgtacactgcagcatggctcacaaagaaagctggtctcacatcaacatcacaaagaaatacaatcaggaacatcgactggcttgattcttgcctgcaggatacagaaataagcacatggagcaataaatctgcacgagcgattattaaaataggagtaccgtttatcagcgctttagccaaaggaatgcaaagcaaagtgaagggaacctcacagaattgcctcttatgcactgcatggctcggaagcgagctggctgcccttggtgaaaatgccataagatattctgcttgtgagatcttgttgcatgacatagcaagtcaccttcatccaggaaatgagcttgacgaaagggttctagcatgcatgtgtctctataattacacctctggaaaaggaaagcaaatgttgatgagcttgccagagggttcccgagaatctcttaggaggctttcatcgttcacatggatggctgaggagttacttcaagttacagattattttctttccagcaaaccacgtgtatcatgtgtacatacacaaattctcgaaattggtcaaccaggcaatggtgcagcaactgctatagcattcttcagagggcagctttttgctggttattctaatggcaccatcagggcatgggacataaaaggccagagggcagtaatcatcagggaggtaaaagagcacaagaaggcagtgacatgtttttcactatcagaaactggggagaacctcctgagtggatcagcagacaaatctattcgggtatgggaaatggcacagcgcaagctagagtgcgtggagatgattcagacaagagaggctgtacaaaaacttgatatttgtggtgacaaaattcttgtacttacacagaacagcgttctcaagttctcttgtgcatcaagaagcacccaaacattttacaggagcaagcatgtcaaatctctagctgtataccagggaaaagcttaccttggatgcaaagacgcaagtatacaggaactagacgtgtcagttgaatccaacagtgcgatgataaggatacctagaggaggctggatggttaggaaacaatccattagctccattgttgtatacagagattggatgtactgtgccggtgctcaggtcgaagggtcagccttaaaggattggaagaaacgatgcaaacctaatatgacaatgccaataccaaagggaacaagtgtagaggccatggcagtggttgaagacttcatctacttgaactgcagtagaagtcctagtatcattcagatatggttgagggagaagcagcagaaagtaggaaggctatccgcaggaagcaagataacgagcttgttcactgcaaacgacatggttttctgtggtacagaaactgggttaattaaggcatggataccgttgtgaagtgtagaagcaagaaggagcaggtggaaggcttaatcttgtaaatgtaaaggaaagctagagtgtacaggaaacatgaaaaagaggagcataccattgtacaagccctcaggacacaacacagcagccagcgcggttcgttcataaactccatggatcagcaagtttcttcgaaatggatgagtagtaggttcataatgtaaatactaactagtgtgtgcgtgtttgttttagttttgcgaagggatgagttgtggatgttaataaagggtagagtaaatttcttagatctacatatatacttgcctagaactggaaaattaagaggacactaccactataacaaaaaaaagccatgtcattttggacaatgagaagcctccaaagctttattcttttttttcccaccatttatttaattggaaaacgtgatcatgaaataattgttgaaacagataaatttaagcggcagtggccgtagaatcatgaggccaactacacccagtggcggagcgctcggtatggcgagctatggcgcttgccataccttactccgccatgaggaacaggtgcttcaggctcaggcggtagtgggcagagaacaccagggccgagagtgaggcggcgagggcgaggcaaagctgtcgatgatgaagcgtgtctcctcactctcccatggcgtcatccgctgcgctcctcctcatgcccttctagtcccgtcgatttactgccttgcgctcaaggccaagcaagtggaagtgcaggtagaaacgtagtgttagaacggaatctcaagaccaagaggagggcggggcgccattatggcatggcatgcgtagtaaacagactgaagacaagagaaggttcaagggacggcacaaacctgagccgagccccccccccagcgcgccgccgtagacaacggtcttg

SEQ ID NO: 59352 - DNA, 4953 bp, Zea Mays
cggacgggaagatgtataacctcccaaatctctctctatctctctctactactagcttgctccatgaagtcaagagaggacggacagggaccagtcgctccccataccagaccaagattggcatgagccactgcaaccaggcttcacccacggcaccacatcctcctgttcctggtggtggtgattggtgacgacgaaagagcttgcttctaagcaccggcattgcggcgacacaatgccgacggcgccagcggcggtgctgccgcgcacttgcatggactccctcatcgccttcctccaccaccacctgcgcgcgctcctcgccgaccccgccgcgctccacgccacgcgccgccgctgtctcgctctgctcacgcccccacggcggcaccattgtcgtaaaaacctctccggagcgcaggaggaggaggagaacgaagacgacgccgtcctcgccgcgctccacggctccatcgacgcgctcctcccgtcccccgtcgacggcgcggcggccgtctgcctggcgggcgtcgaggaggcgctgcaggcccccgcgctgctgccggagcacggcgagacggcggggctggacaaccgccgcgtcgccgcgtgcgcctacttctacctcgcgctcgtgcggtgcgcccagggggacgcgtggcagatgtccatggacctcctgcaggccgtcgccgtgtgcccagccgcggtggccgctggccgcgaggacggcgcccgccgcgccgggctcgcgccacgcgcgctctgggaggggctgttcgacgacggcgtgctcgccagggccggcggcgccggcgaagaggacgcggcgcggcgcgcggccaggcgttacaaggactggctcatgtactacaaggtggtggccgccgcgccggagcaaaatggcgggtatcttcaggcaggaagatctggaagctctgtcatttcgagatggttgagttcttcggaggatagaacgaaccattcggttgatcctgaaggaattaccacggtctctgcatcagaatttggtgcccatgacggtttcaccgagctgaaggatttcctcagcatcgcagatcaagatttccaggaagataccaaggggagctctgacagcaggtgcctccatgagatgctcgaggagtcgcagtctgattcgcctgtttccttttactcgcatcttgattctagtgaacaaagtgatagcgaggcagctccatatgacaaaggaaggtcagcaaagatcatgcccatagatgcagatttcttagcagctaaactccatgaaagatcaaaccacaacaagaatctgacgtggtgcacatctcctgaaaatgcaatgatatatgctccagaatcctcaatgtaccaggtcgatgaccgtgagacgaaaccaaactgcttgcaatcaaacagatctcatggatcactgaataatctatcaaattcggtcctggagctgaagaatgctgactcatactccacatccaactattccgccaaggatgccatgtttacgcagtgctcaccgaggcatgatctcagatgcttcaatgccttctcggccaaattcatcaagaaaagttccctgtccgatctagtctccagaggaagcatgagcaggaaattcaagacttccacagccagtgatgattggagtgatgtcagctcgcgctgggcgaaggacagccaggtagattttcttgagaggttcgagaaggcagtatcaaaactgctgatttcagatggactagaaagctgcctagatgctggctctgaggtcacaactatatggcaattactgaacaacacttgtgaggcgagacacatgtcgtcagtaaggcaagatatccttgatcggctgcttgacagcatttccacatcaaaaaaggacaaagtggtcagggcatcagtctatgtactactgctcatgatatctgaagatagaaatgtcatgagaggcatcaagaggaaggacttccatttatccaacttagccgttgcattgaagagagatgtacatgaagcagccattctgatatatctgttagatcctacacctttagagatcaaaaacttggatctgttgccctcgcttctacatgttgcttgtagctcaggcacccaaaaatggccttcaatgcttccactgacaccgacatcagcatcaatagctctcatcgagatcttagtgacagcattcgactatgtaacaaacaatgtccacttggcttccctcagctcccctcctattttgtccaagcttgtggatgttgcaaagaaccacaacttggaggaaggtgtggccctggcagctattctcatcagatgtgtacgtctcaatggtaactgcaagaagttcttgtcacaggctactccagtggacccattccttcaccttctgagacgaaaagagcaccgggccaagtgtgctgcacttgaatacttccatgagattctacagattcccaggtcctcagcaaactctctgcttgaagaaataagacggcaaggtggcattgcaattatgcacacactgatggtcagcctccatcaaactggacctgaacatcgggttttaggagctagccttctcctgcaattggatatgatggagagatcagatggcaggagtgtgttccaagatgaagcgatggaagtcctgttggactctctatcatctcaagaaaacagtagagtacaggcattatcagcatgttttctttcaaacctcggagggacttattcctggtcaggagaatcgtacactgcagcatggctcacaaagaaagctggtctcacatcaacatcacaaagaaatacaatcaggaacatcgactggcttgattcttgcctgcaggatacagaaataagcacatggagcaataaatctgcacgagcgattattaaaataggagtaccgtttatcagcgctttagccaaaggaatgcaaagcaaagtgaagggaacctcacagaattgcctcttatgcactgcatggctcggaagcgagctggctgcccttggtgaaaatgccataagatattctgcttgtgagatcttgttgcatgacatagcaagtcaccttcatccaggaaatgagcttgacgaaagggttctagcatgcatgtgtctctataattacacctctggaaaaggaaagcaaatgttgatgagcttgccagagggttcccgagaatctcttaggaggctttcatcgttcacatggatggctgaggagttacttcaagttacagattattttctttccagcaaaccacgtgtatcatgtgtacatacacaaattctcgaaattggtcaaccaggcaatggtgcagcaactgctatagcattcttcagagggcagctttttgctggttattctaatggcaccatcagggcatgggacataaaaggccagagggcagtaatcatcagggaggtaaaagagcacaagaaggcagtgacatgtttttcactatcagaaactggggagaacctcctgagtggatcagcagacaaatctattcgggtatgggaaatggcacagcgcaagctagagtgcgtggagatgattcagacaagagaggctgtacaaaaacttgatatttgtggtgacaaaattcttgtacttacacagaacagcgttctcaagttctcttgtgcatcaagaagcacccaaacattttacaggagcaagcatgtcaaatctctagctgtataccagggaaaagcttaccttggatgcaaagacgcaagtatacaggaactagacgtgtcagttgaatccaacagtgcgatgataaggatacctagaggaggctggatggttaggaaacaatccattagctccattgttgtatacagagattggatgtactgtgccggtgctcaggtcgaagggtcagccttaaaggattggaagaaacgatgcaaacctaatatgacaatgccaataccaaagggaacaagtgtagaggccatggcagtggttgaagacttcatctacttgaactgcagtagaagtcctagtatcattcagatatggttgagggagaagcagcagaaagtaggaaggctatccgcaggaagcaagataacgagcttgttcactgcaaacgacatggttttctgtggtacagaaactgggttaattaaggcatggataccgttgtgaagtgtagaagcaagaaggagcaggtggaaggcttaatcttgtaaatgtaaaggaaagctagagtgtacaggaaacatgaaaaagaggagcataccattgtacaagccctcaggacacaacacagcagccagcgcggttcgttcataaactccatggatcagcaagtttcttcgaaatggatgagtagtaggttcataatgtaaatactaactagtgtgtgcgtgtttgttttagttttgcgaagggatgagttgtggatgttaataaagggtagagtaaatttcttagatctacatatatacttgcctagaactggaaaattaagaggacactaccactataacaaaaaaaagccatgtcattttggacaatgagaagcctccaaagctttattcttttttttcccaccatttatttaattggaaaacgtgatcatgaaataattgttgaaacagataaatttaagcggcagtggccgtagaatcatgaggccaactacacccagtggcggagcgctcggtatggcgagctatggcgcttgccataccttactccgccatgaggaacaggtgcttcaggctcaggcggtagtgggcagagaacaccagggccgagagtgaggcggcgagggcgaggcaaagctgtcgatgatgaagcgtgtctcctcactctcccatggcgtcatccgctgcgctcctcctcatgcccttctagtcccgtcgatttactgccttgcgctcaagggtgccaggacgacccagcccatgtggaag

SEQ ID NO: 59353 - DNA, 5615 bp, Zea Mays
cggacagggaccagtcgctccccataccagaccaagattggcatgagccactgcaaccaggcttcacccacggcaccacatcctcctgttcctggtggtggtgattggtgacgacgaaagagcttgcttctaagcaccggcattgcggcgacacaatgccgacggcgccagcggcggtgctgccgcgcacttgcatggactccctcatcgccttcctccaccaccacctgcgcgcgctcctcgccgaccccgccgcgctccacgccacgcgccgccgctgtctcgctctgctcacgcccccacggcggcaccattgtcgtaaaaacctctccggagcgcaggaggaggaggagaacgaagacgacgccgtcctcgccgcgctccacggctccatcgacgcgctcctcccgtcccccgtcgacggcgcggcggccgtctgcctggcgggcgtcgaggaggcgctgcaggcccccgcgctgctgccggagcacggcgagacggcggggctggacaaccgccgcgtcgccgcgtgcgcctacttctacctcgcgctcgtgcggtgcgcccagggggacgcgtggcagatgtccatggacctcctgcaggccgtcgccgtgtgcccagccgcggtggccgctggccgcgaggacggcgcccgccgcgccgggctcgcgccacgcgcgctctgggaggggctgttcgacgacggcgtgctcgccagggccggcggcgccggcgaagaggacgcggcgcggcgcgcggccaggcgttacaaggactggctcatgtactacaaggtggtggccgccgcgccggagcaaaatggcgggtatcttcaggcaggaagatctggaagctctgtcatttcgagatggttgagttcttcggaggatagaacgaaccattcggttgatcctgaaggaattaccacggtctctgcatcagaatttggtgcccatgacggtttcaccgagctgaaggatttcctcagcatcgcagatcaagatttccaggaagataccaaggggagctctgacagcaggtgcctccatgagatgctcgaggagtcgcagtctgattcgcctgtttccttttactcgcatcttgattctagtgaacaaagtgatagcgaggcagctccatatgacaaaggaaggtcagcaaagatcatgcccatagatgcagatttcttagcagctaaactccatgaaagatcaaaccacaacaagaatctgacgtggtgcacatctcctgaaaatgcaatgatatatgctccagaatcctcaatgtaccaggtcgatgaccgtgagacgaaaccaaactgcttgcaatcaaacagatctcatggatcactgaataatctatcaaattcggtcctggagctgaagaatgctgactcatactccacatccaactattccgccaaggatgccatgtttacgcagtgctcaccgaggcatgatctcagatgcttcaatgccttctcggccaaattcatcaagaaaagttccctgtccgatctagtctccagaggaagcatgagcaggaaattcaagacttccacagccagtgatgattggagtgatgtcagctcgcgctgggcgaaggacagccaggtagattttcttgagaggttcgagaaggcagtatcaaaactgctgatttcagatggactagaaagctgcctagatgctggctctgaggtcacaactatatggcaattactgaacaacacttgtgaggcgagacacatgtcgtcagtaaggcaagatatccttgatcggctgcttgacagcatttccacatcaaaaaaggacaaagtggtcagggcatcagtctatgtactactgctcatgatatctgaagatagaaatgtcatgagaggcatcaagaggaaggacttccatttatccaacttagccgttgcattgaagagagatgtacatgaagcagccattctgatatatctgttagatcctacacctttagagatcaaaaacttggatctgttgccctcgcttctacatgttgcttgtagctcaggcacccaaaaatggccttcaatgcttccactgacaccgacatcagcatcaatagctctcatcgagatcttagtgacagcattcgactatgtaacaaacaatgtccacttggcttccctcagctcccctcctattttgtccaagcttgtggatgttgcaaagaaccacaacttggaggaaggtgtggccctggcagctattctcatcagatgtgtacgtctcaatggtaactgcaagaagttcttgtcacaggctactccagtggacccattccttcaccttctgagacgaaaagagcaccgggccaagtgtgctgcacttgaatacttccatgagattctacagattcccaggtcctcagcaaactctctgcttgaagaaataagacggcaaggtggcattgcaattatgcacacactgatggagagatcagatggcaggagtgtgttccaagatgaagcgatggaagtcctgttggactctctatcatctcaagaaaacagtagagtacaggcattatcagcatgttttctttcaaacctcggagggacttattcctggtcaggagaatcgtacactgcagcatggctcacaaagaaagctggtctcacatcaacatcacaaagaaatacaatcaggaacatcgactggcttgattcttgcctgcaggttaagtatcaaaacattttttcatttggaaaatatagaaaaaaaaacataacttaatggcaaggaacataataacaataataatggtgatacaggatacagaaataagcacatggagcaataaatctgcacgagcgattattaaaataggagtaccgtttatcagcgctttagccaaaggaatgcaaagcaaagtgaagggaacctcacagaattgcctcttatgcactgcatggctcggaagcgagctggctgcccttggtgaaaatgccataagatattctgcttgtgagatcttgttgcatgacatagcaagtcaccttcatccaggaaatgagcttgacgaaagggttctagcatgcatgtgtctctataattacacctctggaaaaggaaagcaaatgttgatgagcttgccagagggttcccgagaatctcttaggaggctttcatcgttcacatggatggctgaggagttacttcaagttacagattattttctttccagcaaaccagtgagtattgttggaattgagctcctaggggtggtaataggctctaaattttatactataaaatttaaggatcgggtcggatttggatcgagctctatttctatttatttttaaactaaaattatttaagggctcaaatgaattatgaagaaacatttggatcgtgatccattatcacacccctatgagctccttcacttcccttgttcgtttcatactacccctgttccagcaaacaaggcatgccatgctaagtaacagcaagaacagaccatcaggtatatcttagattgggagctaagagcctatgattatatctgatcaaatcaaaagttctttaggcttgctattgttaatttcagaatctatgctgagattattataaccacattttctagctagccctttgtgagaaatgtttcttaaacataagaaataattatctgatgttgtcagtgcagcgtgtatcatgtgtacatacacaaattctcgaaattggtcaaccaggcaatggtgcagcaactgctatagcattcttcagagggcagctttttgctggttattctaatggcaccatcagggcatgggacataaaaggccagagggcagtaatcatcagggaggtaaaagagcacaagaaggcagtgacatgtttttcactatcagaaactggggagaacctcctgagtggatcagcagacaaatctattcgggtaaccaattcaacttcagtgctaaaaccgtaaaagaaaattaattgcgggatgttaattgacaagatcatttgcaggtatgggaaatggcacagcgcaagctagagtgcgtggagatgattcagacaagagaggctgtacaaaaacttgatatttgtggtgacaaaattcttgtacttacacagaacagcgttctcaaggtattcatatgatatgcacttggtgattgtctcaagaaatggaacacataacaataatggtgtttttactttgattctgtcacagttctcttgtgcatcaagaagcacccaaacattttacaggagcaagcatgtcaaatctctagctgtataccagggaaaagcttaccttggatgcaaagacgcaagtatacaggaactagacgtgtcagttgaatccaacagtgcgatgataaggatacctagaggaggctggatggttaggaaacaatccattagctccattgttgtatacagagattggatgtactgtgccggtgctcaggtcgaagggtcagccttaaaggtaataatgaaatgatcaaacttgacctcttaaagctatgagatgaaaagaaatgtgaattttttgaactgtttccaggattggaagaaacgatgcaaacctaatatgacaatgccaataccaaagggaacaagtgtagaggccatggcagtggttgaagacttcatctacttgaactgcagtagaagtcctagtatcattcagatatggttgagggagaagcagcagaaagtaggaaggctatccgcaggaagcaagataacgagcttgttcactgcaaacgacatggttttctgtggtacagaaactgggttaattaaggcatggataccgttgtgaagtgtagaagcaagaaggagcaggtggaaggcttaatcttgtaaatgtaaaggaaagctagagtgtacaggaaacatgaaaaagaggagcataccattgtacaagccctcaggacacaacacagcagccagcgcggttcgttcataaactccatggatcagcaagtttcttcgaaatggatgagtagtaggttcataatgtaaatactaactagtgtgtgcgtgtttgttttagttttgcgaagggatgagttgtggatgttaataaagggtagagtaaatttcttagatctacatatatacttgcctagaactggaaaattaagaggacactaccactataacaaaaaaaagccatgtcattttggacaatgagaagcctccaaagctttattcttttttttcccaccatttatttaattggaaaacgtgatcatgaaataattgttgaaacagataaatttaagcggcagtggccgtagaatcatgaggccaactacacccagtggcggagcgctcggtatggcgagctatggcgcttgccataccttactccgccatgaggaacaggtgcttcaggctcaggcggtagtgggcagagaacaccagggccgagagtgaggcggcgagggcgaggcaaagctgtcgatgatgaagcgtgtctcctcactctcccatggcgtcatccgctgcgctcctcctcatgcccttctagtcccgtcgatttactgccttgcgctcaagttttctcgtgcaggtgcctcctctcaaaaataagagagctgtgaagag

SEQ ID NO: 59354 - DNA, 5036 bp, Zea Mays
agtcgctccccataccagaccaagattggcatgagccactgcaaccaggcttcacccacggcaccacatcctcctgttcctggtggtggtgattggtgacgacgaaagagcttgcttctaagcaccggcattgcggcgacacaatgccgacggcgccagcggcggtgctgccgcgcacttgcatggactccctcatcgccttcctccaccaccacctgcgcgcgctcctcgccgaccccgccgcgctccacgccacgcgccgccgctgtctcgctctgctcacgcccccacggcggcaccattgtcgtaaaaacctctccggagcgcaggaggaggaggagaacgaagacgacgccgtcctcgccgcgctccacggctccatcgacgcgctcctcccgtcccccgtcgacggcgcggcggccgtctgcctggcgggcgtcgaggaggcgctgcaggcccccgcgctgctgccggagcacggcgagacggcggggctggacaaccgccgcgtcgccgcgtgcgcctacttctacctcgcgctcgtgcggtgcgcccagggggacgcgtggcagatgtccatggacctcctgcaggccgtcgccgtgtgcccagccgcggtggccgctggccgcgaggacggcgcccgccgcgccgggctcgcgccacgcgcgctctgggaggggctgttcgacgacggcgtgctcgccagggccggcggcgccggcgaagaggacgcggcgcggcgcgcggccaggcgttacaaggactggctcatgtactacaaggtggtggccgccgcgccggagcaaaatggcgggtatcttcaggcaggaagatctggaagctctgtcatttcgagatggttgagttcttcggaggatagaacgaaccattcggttgatcctgaaggaattaccacggtctctgcatcagaatttggtgcccatgacggtttcaccgagctgaaggatttcctcagcatcgcagatcaagatttccaggaagataccaaggggagctctgacagcaggtgcctccatgagatgctcgaggagtcgcagtctgattcgcctgtttccttttactcgcatcttgattctagtgaacaaagtgatagcgaggcagctccatatgacaaaggaaggtcagcaaagatcatgcccatagatgcagatttcttagcagctaaactccatgaaagatcaaaccacaacaagaatctgacgtggtgcacatctcctgaaaatgcaatgatatatgctccagaatcctcaatgtaccaggtcgatgaccgtgagacgaaaccaaactgcttgcaatcaaacagatctcatggatcactgaataatctatcaaattcggtcctggagctgaagaatgctgactcatactccacatccaactattccgccaaggatgccatgtttacgcagtgctcaccgaggcatgatctcagatgcttcaatgccttctcggccaaattcatcaagaaaagttccctgtccgatctagtctccagaggaagcatgagcaggaaattcaagacttccacagccagtgatgattggagtgatgtcagctcgcgctgggcgaaggacagccaggtagattttcttgagaggttcgagaaggcagtatcaaaactgctgatttcagatggactagaaagctgcctagatgctggctctgaggtcacaactatatggcaattactgaacaacacttgtgaggcgagacacatgtcgtcagtaaggcaagatatccttgatcggctgcttgacagcatttccacatcaaaaaaggacaaagtggtcagggcatcagtctatgtactactgctcatgatatctgaagatagaaatgtcatgagaggcatcaagaggaaggacttccatttatccaacttagccgttgcattgaagagagatgtacatgaagcagccattctgatatatctgttagatcctacacctttagagatcaaaaacttggatctgttgccctcgcttctacatgttgcttgtagctcaggcacccaaaaatggccttcaatgcttccactgacaccgacatcagcatcaatagctctcatcgagatcttagtgacagcattcgactatgtaacaaacaatgtccacttggcttccctcagctcccctcctattttgtccaagcttgtggatgttgcaaagaaccacaacttggaggaaggtgtggccctggcagctattctcatcagatgtgtacgtctcaatggtaactgcaagaagttcttgtcacaggctactccagtggacccattccttcaccttctgagacgaaaagagcaccgggccaagtgtgctgcacttgaatacttccatgagattctacagattcccaggtcctcagcaaactctctgcttgaagaaataagacggcaaggtggcattgcaattatgcacacactgatggtcagcctccatcaaactggacctgaacatcgggttttaggagctagccttctcctgcaattggatatgatggagagatcagatggcaggagtgtgttccaagatgaagcgatggaagtcctgttggactctctatcatctcaagaaaacagtagagtacaggcattatcagcatgttttctttcaaacctcggagggacttattcctggtcaggagaatcgtacactgcagcatggctcacaaagaaagctggtctcacatcaacatcacaaagaaatacaatcaggaacatcgactggcttgattcttgcctgcaggatacagaaataagcacatggagcaataaatctgcacgagcgattattaaaataggagtaccgtttatcagcgctttagccaaaggaatgcaaagcaaagtgaagggaacctcacagaattgcctcttatgcactgcatggctcggaagcgagctggctgcccttggtgaaaatgccataagatattctgcttgtgagatcttgttgcatgacatagcaagtcaccttcatccaggaaatgagcttgacgaaagggttctagcatgcatgtgtctctataattacacctctggaaaaggaaagcaaatgttgatgagcttgccagagggttcccgagaatctcttaggaggctttcatcgttcacatggatggctgaggagttacttcaagttacagattattttctttccagcaaaccatgcagcgtgtatcatgtgtacatacacaaattctcgaaattggtcaaccaggcaatggtgcagcaactgctatagcattcttcagagggcagctttttgctggttattctaatggcaccatcagggcatgggacataaaaggccagagggcagtaatcatcagggaggtaaaagagcacaagaaggcagtgacatgtttttcactatcagaaactggggagaacctcctgagtggatcagcagacaaatctattcgggtatgggaaatggcacagcgcaagctagagtgcgtggagatgattcagacaagagaggctgtacaaaaacttgatatttgtggtgacaaaattcttgtacttacacagaacagcgttctcaagttctcttgtgcatcaagaagcacccaaacattttacaggagcaagcatgtcaaatctctagctgtataccagggaaaagcttaccttggatgcaaagacgcaagtatacaggaactagacgtgtcagttgaatccaacagtgcgatgataaggatacctagaggaggctggatggttaggaaacaatccattagctccattgttgtatacagagattggatgtactgtgccggtgctcaggtcgaagggtcagccttaaaggattggaagaaacgatgcaaacctaatatgacaatgccaataccaaagggaacaagtgtagaggccatggcagtggttgaagacttcatctacttgaactgcagtagaagtcctagtatcattcagatatggttgagggagaagcagcagaaagtaggaaggctatccgcaggaagcaagataacgagcttgttcactgcaaacgacatggttttctgtggtacagaaactgggttaattaaggcatggataccgttgtgaagtgtagaagcaagaaggagcaggtggaaggcttaatcttgtaaatgtaaaggaaagctagagtgtacaggaaacatgaaaaagaggagcataccattgtacaagccctcaggacacaacacagcagccagcgcggttcgttcataaactccatggatcagcaagtttcttcgaaatggatgagtagtaggttcataatgtaaatactaactagtgtgtgcgtgtttgttttagttttgcgaagggatgagttgtggatgttaataaagggtagagtaaatttcttagatctacatatatacttgcctagaactggaaaattaagaggacactaccactataacaaaaaaaagccatgtcattttggacaatgagaagcctccaaagctttattcttttttttcccaccatttatttaattggaaaacgtgatcatgaaataattgttgaaacagataaatttaagcggcagtggccgtagaatcatgaggccaactacacccagtggcggagcgctcggtatggcgagctatggcgcttgccataccttactccgccatgaggaacaggtgcttcaggctcaggcggtagtgggcagagaacaccagggccgagagtgaggcggcgagggcgaggcaaagctgtcgatgatgaagcgtgtctcctcactctcccatggcgtcatccgctgcgctcctcctcatgcccttctagtcccgtcgatttactgccttgcgctcaaggtttgcacctgcttcctgtccaactcactccacctcccatccgtccacgccgctgtctcactcttcagctctgccacagacgcaccgcaagtctccatcgatggtcctgcactcacgctgctctgcagcctacacccatagcactcatgcctcgcgcgcagctctgcagccccacctaacgacgtgagcgctcctgcctc

SEQ ID NO: 59355 - DNA, 5000 bp, Zea Mays
taccagaccaagattggcatgagccactgcaaccaggcttcacccacggcaccacatcctcctgttcctggtggtggtgattggtgacgacgaaagagcttgcttctaagcaccggcattgcggcgacacaatgccgacggcgccagcggcggtgctgccgcgcacttgcatggactccctcatcgccttcctccaccaccacctgcgcgcgctcctcgccgaccccgccgcgctccacgccacgcgccgccgctgtctcgctctgctcacgcccccacggcggcaccattgtcgtaaaaacctctccggagcgcaggaggaggaggagaacgaagacgacgccgtcctcgccgcgctccacggctccatcgacgcgctcctcccgtcccccgtcgacggcgcggcggccgtctgcctggcgggcgtcgaggaggcgctgcaggcccccgcgctgctgccggagcacggcgagacggcggggctggacaaccgccgcgtcgccgcgtgcgcctacttctacctcgcgctcgtgcggtgcgcccagggggacgcgtggcagatgtccatggacctcctgcaggccgtcgccgtgtgcccagccgcggtggccgctggccgcgaggacggcgcccgccgcgccgggctcgcgccacgcgcgctctgggaggggctgttcgacgacggcgtgctcgccagggccggcggcgccggcgaagaggacgcggcgcggcgcgcggccaggcgttacaaggactggctcatgtactacaaggtggtggccgccgcgccggagcaaaatggcgggtatcttcaggcaggaagatctggaagctctgtcatttcgagatggttgagttcttcggagagttgatctggcctccatttgagaactgaaggtgaatctggcatcgttgcaggatagaacgaaccattcggttgatcctgaaggaattaccacggtctctgcatcagaatttggtgcccatgacggtttcaccgagctgaaggatttcctcagcatcgcagatcaagatttccaggaagataccaaggggagctctgacagcaggtgcctccatgagatgctcgaggagtcgcagtctgattcgcctgtttccttttactcgcatcttgattctagtgaacaaagtgatagcgaggcagctccatatgacaaaggaaggtcagcaaagatcatgcccatagatgcagatttcttagcagctaaactccatgaaagatcaaaccacaacaagaatctgacgtggtgcacatctcctgaaaatgcaatgatatatgctccagaatcctcaatgtaccaggtcgatgaccgtgagacgaaaccaaactgcttgcaatcaaacagatctcatggatcactgaataatctatcaaattcggtcctggagctgaagaatgctgactcatactccacatccaactattccgccaaggatgccatgtttacgcagtgctcaccgaggcatgatctcagatgcttcaatgccttctcggccaaattcatcaagaaaagttccctgtccgatctagtctccagaggaagcatgagcaggaaattcaagacttccacagccagtgatgattggagtgatgtcagctcgcgctgggcgaaggacagccaggtagattttcttgagaggttcgagaaggcagtatcaaaactgctgatttcagatggactagaaagctgcctagatgctggctctgaggtcacaactatatggcaattactgaacaacacttgtgaggcgagacacatgtcgtcagtaaggcaagatatccttgatcggctgcttgacagcatttccacatcaaaaaaggacaaagtggtcagggcatcagtctatgtactactgctcatgatatctgaagatagaaatgtcatgagaggcatcaagaggaaggacttccatttatccaacttagccgttgcattgaagagagatgtacatgaagcagccattctgatatatctgttagatcctacacctttagagatcaaaaacttggatctgttgccctcgcttctacatgttgcttgtagctcaggcacccaaaaatggccttcaatgcttccactgacaccgacatcagcatcaatagctctcatcgagatcttagtgacagcattcgactatgtaacaaacaatgtccacttggcttccctcagctcccctcctattttgtccaagcttgtggatgttgcaaagaaccacaacttggaggaaggctactccagtggacccattccttcaccttctgagacgaaaagagcaccgggccaagtgtgctgcacttgaatacttccatgagattctacagattcccaggtcctcagcaaactctctgcttgaagaaataagacggcaaggtggcattgcaattatgcacacactgatggtcagcctccatcaaactggacctgaacatcgggttttaggagctagccttctcctgcaattggatatgatggagagatcagatggcaggagtgtgttccaagatgaagcgatggaagtcctgttggactctctatcatctcaagaaaacagtagagtacaggcattatcagcatgttttctttcaaacctcggagggacttattcctggtcaggagaatcgtacactgcagcatggctcacaaagaaagctggtctcacatcaacatcacaaagaaatacaatcaggaacatcgactggcttgattcttgcctgcaggatacagaaataagcacatggagcaataaatctgcacgagcgattattaaaataggagtaccgtttatcagcgctttagccaaaggaatgcaaagcaaagtgaagggaacctcacagaattgcctcttatgcactgcatggctcggaagcgagctggctgcccttggtgaaaatgccataagatattctgcttgtgagatcttgttgcatgacatagcaagtcaccttcatccaggaaatgagcttgacgaaagggttctagcatgcatgtgtctctataattacacctctggaaaaggaaagcaaatgttgatgagcttgccagagggttcccgagaatctcttaggaggctttcatcgttcacatggatggctgaggagttacttcaagttacagattattttctttccagcaaaccacgtgtatcatgtgtacatacacaaattctcgaaattggtcaaccaggcaatggtgcagcaactgctatagcattcttcagagggcagctttttgctggttattctaatggcaccatcagggcatgggacataaaaggccagagggcagtaatcatcagggaggtaaaagagcacaagaaggcagtgacatgtttttcactatcagaaactggggagaacctcctgagtggatcagcagacaaatctattcgggtatgggaaatggcacagcgcaagctagagtgcgtggagatgattcagacaagagaggctgtacaaaaacttgatatttgtggtgacaaaattcttgtacttacacagaacagcgttctcaagttctcttgtgcatcaagaagcacccaaacattttacaggagcaagcatgtcaaatctctagctgtataccagggaaaagcttaccttggatgcaaagacgcaagtatacaggaactagacgtgtcagttgaatccaacagtgcgatgataaggatacctagaggaggctggatggttaggaaacaatccattagctccattgttgtatacagagattggatgtactgtgccggtgctcaggtcgaagggtcagccttaaaggattggaagaaacgatgcaaacctaatatgacaatgccaataccaaagggaacaagtgtagaggccatggcagtggttgaagacttcatctacttgaactgcagtagaagtcctagtatcattcagatatggttgagggagaagcagcagaaagtaggaaggctatccgcaggaagcaagataacgagcttgttcactgcaaacgacatggttttctgtggtacagaaactgggttaattaaggcatggataccgttgtgaagtgtagaagcaagaaggagcaggtggaaggcttaatcttgtaaatgtaaaggaaagctagagtgtacaggaaacatgaaaaagaggagcataccattgtacaagccctcaggacacaacacagcagccagcgcggttcgttcataaactccatggatcagcaagtttcttcgaaatggatgagtagtaggttcataatgtaaatactaactagtgtgtgcgtgtttgttttagttttgcgaagggatgagttgtggatgttaataaagggtagagtaaatttcttagatctacatatatacttgcctagaactggaaaattaagaggacactaccactataacaaaaaaaagccatgtcattttggacaatgagaagcctccaaagctttattcttttttttcccaccatttatttaattggaaaacgtgatcatgaaataattgttgaaacagataaatttaagcggcagtggccgtagaatcatgaggccaactacacccagtggcggagcgctcggtatggcgagctatggcgcttgccataccttactccgccatgaggaacaggtgcttcaggctcaggcggtagtgggcagagaacaccagggccgagagtgaggcggcgagggcgaggcaaagctgtcgatgatgaagcgtgtctcctcactctcccatggcgtcatccgctgcgctcctcctcatgcccttctagtcccgtcgatttactgccttgcgctcaaggtttgcacctgcttcctgtccaactcactccacctcccatccgtccacgccgctgtctcactcttcagctctgccacagacgcaccgcaagtctccatcgatggtcctgcactcacgctgctctgcagcctacacccatagcactcatgcctcgcgcgcagctctgcagccccacctaacgacgtgagcgctcctgcctc

SEQ ID NO: 59356 - DNA, 4309 bp, Zea Mays
ctgcctgcctgcagaatgatagcaccatctagagagatcatcttcagtcctgctgcattgcctactgctatgtatatagtttaaatagccaataggtatcttcaggcaggaagatctggaagctctgtcatttcgagatggttgagttcttcggaggatagaacgaaccattcggttgatcctgaaggaattaccacggtctctgcatcagaatttggtgcccatgacggtttcaccgagctgaaggatttcctcagcatcgcagatcaagatttccaggaagataccaaggggagctctgacagcaggtgcctccatgagatgctcgaggagtcgcagtctgattcgcctgtttccttttactcgcatcttgattctagtgaacaaagtgatagcgaggcagctccatatgacaaaggaaggtcagcaaagatcatgcccatagatgcagatttcttagcagctaaactccatgaaagatcaaaccacaacaagaatctgacgtggtgcacatctcctgaaaatgcaatgatatatgctccagaatcctcaatgtaccaggtcgatgaccgtgagacgaaaccaaactgcttgcaatcaaacagatctcatggatcactgaataatctatcaaattcggtcctggagctgaagaatgctgactcatactccacatccaactattccgccaaggatgccatgtttacgcagtgctcaccgaggcatgatctcagatgcttcaatgccttctcggccaaattcatcaagaaaagttccctgtccgatctagtctccagaggaagcatgagcaggaaattcaagacttccacagccagtgatgattggagtgatgtcagctcgcgctgggcgaaggacagccaggtagattttcttgagaggttcgagaaggcagtatcaaaactgctgatttcagatggactagaaagctgcctagatgctggctctgaggtcacaactatatggcaattactgaacaacacttgtgaggcgagacacatgtcgtcagtaaggcaagatatccttgatcggctgcttgacagcatttccacatcaaaaaaggacaaagtggtcagggcatcagtctatgtactactgctcatgatatctgaagatagaaatgtcatgagaggcatcaagaggaaggacttccatttatccaacttagccgttgcattgaagagagatgtacatgaagcagccattctgatatatctgttagatcctacacctttagagatcaaaaacttggatctgttgccctcgcttctacatgttgcttgtagctcaggcacccaaaaatggccttcaatgcttccactgacaccgacatcagcatcaatagctctcatcgagatcttagtgacagcattcgactatgtaacaaacaatgtccacttggcttccctcagctcccctcctattttgtccaagcttgtggatgttgcaaagaaccacaacttggaggaaggtgtggccctggcagctattctcatcagatgtgtacgtctcaatggtaactgcaagaagttcttgtcacaggctactccagtggacccattccttcaccttctgagacgaaaagagcaccgggccaagtgtgctgcacttgaatacttccatgagattctacagattcccaggtcctcagcaaactctctgcttgaagaaataagacggcaaggtggcattgcaattatgcacacactgatggtcagcctccatcaaactggacctgaacatcgggttttaggagctagccttctcctgcaattggatatgatggagagatcagatggcaggagtgtgttccaagatgaagcgatggaagtcctgttggactctctatcatctcaagaaaacagtagagtacaggcattatcagcatgttttctttcaaacctcggagggacttattcctggtcaggagaatcgtacactgcagcatggctcacaaagaaagctggtctcacatcaacatcacaaagaaatacaatcaggaacatcgactggcttgattcttgcctgcaggatacagaaataagcacatggagcaataaatctgcacgagcgattattaaaataggagtaccgtttatcagcgctttagccaaaggaatgcaaagcaaagtgaagggaacctcacagaattgcctcttatgcactgcatggctcggaagcgagctggctgcccttggtgaaaatgccataagatattctgcttgtgagatcttgttgcatgacatagcaagtcaccttcatccaggaaatgagcttgacgaaagggttctagcatgcatgtgtctctataattacacctctggaaaaggaaagcaaatgttgatgagcttgccagagggttcccgagaatctcttaggaggctttcatcgttcacatggatggctgaggagttacttcaagttacagattattttctttccagcaaaccacgtgtatcatgtgtacatacacaaattctcgaaattggtcaaccaggcaatggtgcagcaactgctatagcattcttcagagggcagctttttgctggttattctaatggcaccatcagggcatgggacataaaaggccagagggcagtaatcatcagggaggtaaaagagcacaagaaggcagtgacatgtttttcactatcagaaactggggagaacctcctgagtggatcagcagacaaatctattcgggtatgggaaatggcacagcgcaagctagagtgcgtggagatgattcagacaagagaggctgtacaaaaacttgatatttgtggtgacaaaattcttgtacttacacagaacagcgttctcaagttctcttgtgcatcaagaagcacccaaacattttacaggagcaagcatgtcaaatctctagctgtataccagggaaaagcttaccttggatgcaaagacgcaagtatacaggaactagacgtgtcagttgaatccaacagtgcgatgataaggatacctagaggaggctggatggttaggaaacaatccattagctccattgttgtatacagagattggatgtactgtgccggtgctcaggtcgaagggtcagccttaaaggattggaagaaacgatgcaaacctaatatgacaatgccaataccaaagggaacaagtgtagaggccatggcagtggttgaagacttcatctacttgaactgcagtagaagtcctagtatcattcagatatggttgagggagaagcagcagaaagtaggaaggctatccgcaggaagcaagataacgagcttgttcactgcaaacgacatggttttctgtggtacagaaactgggttaattaaggcatggataccgttgtgaagtgtagaagcaagaaggagcaggtggaaggcttaatcttgtaaatgtaaaggaaagctagagtgtacaggaaacatgaaaaagaggagcataccattgtacaagccctcaggacacaacacagcagccagcgcggttcgttcataaactccatggatcagcaagtttcttcgaaatggatgagtagtaggttcataatgtaaatactaactagtgtgtgcgtgtttgttttagttttgcgaagggatgagttgtggatgttaataaagggtagagtaaatttcttagatctacatatatacttgcctagaactggaaaattaagaggacactaccactataacaaaaaaaagccatgtcattttggacaatgagaagcctccaaagctttattcttttttttcccaccatttatttaattggaaaacgtgatcatgaaataattgttgaaacagataaatttaagcggcagtggccgtagaatcatgaggccaactacacccagtggcggagcgctcggtatggcgagctatggcgcttgccataccttactccgccatgaggaacaggtgcttcaggctcaggcggtagtgggcagagaacaccagggccgagagtgaggcggcgagggcgaggcaaagctgtcgatgatgaagcgtgtctcctcactctcccatggcgtcatccgctgcgctcctcctcatgcccttctagtcccgtcgatttactgccttgcgctcaaggtttgcacctgcttcctgtccaactcactccacctcccatccgtccacgccgctgtctcactcttcagctctgccacagacgcaccgcaagtctccatcgatggtcctgcactcacgctgctctgcagcctacacccatagcactcatgcctcgcgcgcagctctgcagccccacctaacgacgtgagcgctcctgcctc

SEQ ID NO: 59357 - DNA, 2353 bp, Zea Mays
ctcctccctcgcccatggtcgcggttctccaagttcagagctcacgcggtcctctgtccctgcttgccctctgcctgcttccatggcgccgtggcttcccatctctctccctcgcattttcctctgtctgccatgaacgtaggagttcttctgtttggccccagctcgatttagtcttcagctgtctgcgcacgcgcagctcgctcttactttatttgccgcgcgcgcacgaattttatctgctcgccacagcatcatcgcttgtgtcgcaagctcgttagccacagttatcttaaccgcgtcagcacgtgaccgtggtcgtgttcgtcgagttcgccaacactatgttgtcgattcgactgtcgtcgctgttatatgcctcgttgcatgctcgctgagtgttgtcggtacctcagcatttgtgcttgccgctggctcgtgttaacgctcgcgcgcctgctcgttatcactgcgtcgcactcactctttgtccatcaggcttcacgcgtgctcgcgtttgtcgtcgagctgttgaacccgtcctcccttgctcgtgacttcatcgtcgctagaaccctcactaaattcgtgtcctcgccagctcactccatattcaatctcgtcgtcgttccgcgcgtcagcaagaaatcttaatagtcgggtgaagacggagccaacagcatggtgttcatcaagtgcgcgacaaaaagctcggacatcctacgcaactcaagtttgattcgtcagaattattcagtcgagaaaaagatcttcagcaattgattaccgaagaaaagaagacccctggatgacgtcaaccgaaaaccgtcgtcgtgcttgcgactatcgcgtcaaattagacagagtacgataaataatcgcgtgatgcggaagacaagccaagtcgacctcaagcgtgggctaatccgcgggatgatgctgatggacgaaccggaagatggataatctgaacaatgccaacacaaaaggctgatcgtcaagtggttgtcgtctaacaacactaacctagtgttacccaggcaagccccggtgcatttgccacctccttgctattttaaaatcttttatcaccttgtttgatgcattaggtgataggagttgtgtgctaaaccgttgatgcatttccttccttgaaaattgattacccttccttgatacccgttttgaaaagaattttatgatgcttagctttgctttagcaaaacaaaaatgttttgttttaaaacaaaagtgatgcttcagtggatgggaatttttcaaaaataaaacttgatggtgaatccatcatggccatgatggattcaacatcggaaaagatatacctctgccaggtaccaaactttgggtttaaattataaagctgagaccgggcgggtgacttgcacaagaaaggagtctcgatgtagtgtctccgtctgagtcgtttaaggaccgtaccgattgttggcctgctgatctaggaccctttatctggccacatacctcgtcatgggtaagcttgaacccggctattccaaacatgaaaagacaaccgcgcactgggagtggagagatggcgagagtggcacataccctcctggcaaaggaccgcctaaaaggggtggtgtgctctcgggtggcgcggacctgttcatgtggtggaggatccgtgggaatggtagacatgtgcaaaagagttaagagaagcatatgtcgtgtggttggagatccccagctgggtattaatcgattcggatcgccgaacttctcggatatgaagactggatcttcgaccctcatcgtagataacaagcgaaacaaaagttggattttaaaagaaagctagtgtaggacaagtgaatgctctagattaggcaaatctagattcaggaaaagtacttaatttgtaatgtaaaattatggcttaaggacccacttctagtaagcttttctgcaaaaagagtctttgattcttgataagccataccttgaatccctctagccagcatacccttgagagtcttttctttagtcgggtaagtcttgctgagtaattccgtactcaggattttattccctgttgtttttcaggttctaactttgtgctgttgttgatggtgttaagtgccggtgggctcggccttcttataagtctaagtaacccttctatacttcttattgaggatgatcccttgagctagcatatatttcaaaactataaataatttataatagtttaaagttatttctttgaaccacttctgtaaccactctgataaatctaatgtaaaacttgatgtaacttgtaaaatttggtaaaaagatttccgctgcaaaatgttggtgtgtgatt

SEQ ID NO: 59358 - DNA, 4636 bp, Zea Mays
aaaaaacccagcaaaccgacacgtccaatccaaatagaagaaaaaaaaactcgggcaattccgccgggcgccggccatccgatcgatcccgtcccagctgtccttcctccccgaagtatccatcatccatgaacatggagcgcctaccgccgccggcaggatcgcgccacggtcaccaccgctacacgcggatgccgcggcaggcggacctcgagggcgaagcggcgcctgctgaccaggagcgggaacccgagcggcggccggaggtcctggcggcctcagcgtcggcatcgctccgagtgcccgacgccgcgcgggtgttcgacgagctgcccagggcgtccatcgtagccgtatcgcgccccgacgccggggacatcacgcccatgctgctctcctataccatcgaggttcattacaagcagtttagatggcgtctatataagaaagcttcacaggttctctatcttcactttgcattgaagaggcgtgaatttcttgaagaattccatgaaaagcaggagcaggtcaaagaatggctccaaaatttgggaattggggagcatatgccagtagtacatgatgaggatgaagcggatgatgtaaatgttccaccacagtctgatgataactcaattagaaatagaaacgttccttcaagtgctgttttacctgtcattcgaccggctcttggacgtcaaaactctatttctgatcgagcaaaagttgcaatgcaagaatatctaaaccatttcttagggaacttggatatcgtcaattcacgggaggtttgcaaatttttggaggtgtcatgtttgtcatttttacctgagtatggtcccaagttaaaagaagacaatgtttcagttggacatttaccaaagattcaaaaggaccggaaaaaacgatgctgttcatgtggattgtttaactgttgcaagagcaattggcaaaagacctgggctgtcctgaagccaggattcttggctttgcttgaagacccttttgatccaaagcttttagacgtcattatttttgatgcattgccacatatggatataactggagaaggccaagtttctttagcaaaagagattaaagaacgtaatccactgcattttggattccaggtttcttctggtggccggacaataaagctacgcgcaacaagctcttctagggttaaggactgggttactgcaataaatgctgctcgacaacctccagaaggctggtgctatcctcatcgttttggctcatttgcaccaccgaggggtttgttggaagatgggagtatggtacaatggtttgtagatgggcaagctgcattcaaagctattgcatcctccattgaggaagccaaatcggagatatttattactggctggtggctctgcccagagttgtatcttcgacgcccattccaacatcatggatcatctagacttgatgctctactggaagcaagagctaagcagggtgtacagatttacattctcttgtacaaggaagttgctcttgctttgaaaattaacagcttatacagtaaacagaggctacttaacattcatgaaaatgttaaagttctgcgttaccctgatcacttctcaagtggtgtatacttgtggtcacaccatgagaagattgtgattgttgataatcaagtatgttatattggaggtcttgatctgtgctttggtcgctacgatagtcctgagcacaaagtcgctgattctcctccagagatgtggccaggaaaggactactacaatcccagggaatctgaacccaattcctgggaggacaccatgaaagatgagctggaccgtgataaatatccccgcatgccttggcatgatgttcagtgtgctctctatggcccaccttgccgtgatgtagcgaggcattttgttcagcgctggaattatgcaaagaggaacaaagctctaaatgagcaagcaattcccttactgatgcctcattaccacatggtaattccacactacaagggtagaagcaaagaaacaaatgatgaggctgagggtaaacaatacaatgataaggatgttgatattggaaagccagtcttgacatcacgcacatcatgtcaggatgttccattgctcttacctcaagagcttgaacctcgtgaattatccagttcagatttaagggtgaatgatttagatattaaccattcagatcgtttaaacaagaagaactttaatcagcctttgctcaaccgaaaggcaaaactggattcttctcatcaggatttacctatgagaagttttgtagacaatctcagttcccttgagccatcatctgttagacgttttgattcgtcaaaagatgataggaatcacattgacaaaaaatggtgggaaatgcaggagcgaggcaaccaagttgcttcattacttgatattggacaagttggtccaagggtaacatgtcgttgtcaggttgttaggagtgtcggtcaatggtcagctgggaccactcaaattgaaggaagcatccacaatgcctacttttctctgattgagaaggcagaacacttcgtatacattgagaatcaatttttcatatcgggtctgtcaggagatgatacgattaaaaaccgcgtactggaagcattgtatcggcgcatacttagagctgaaagagagaaaaagcgctttaaggccatcatcatcatacctcttttacctggttttcagggaggcattgatgatggtggagcagcatcagtcagggcaatcatgcattggcaatatcggactatctgcagaggttctaattcgattcttcagaatctatttgatgttattggacctaaagcacatgattacatctccttttatgggcttagagcacatggtaaactccatgatgggggtcccttggttactagtcaggtatgatgagcttctatttgtgcatgttttgttcctccccagggtcctcactcttgtccagctgagcatcatgaattttacctagaagaggcaatgaactgctcgtcatcatcttttatttttttttgaaaaaaacgcaggagaattgctcgtcatcatcacactttgttttttatctttcgcagaactacttccggtccaatttataaggtgtagcttaacatgattataaacttttgattattggatagtacatttgattgcaaatctaatagtatcaattttgtatttaaaatagtcaacaactgtttgccaaattattggtcaaagatataaagtttgacccttgacatatgcgaaatgtcttataaaatagactgggaggagcagcatataaaatgtattcaggataccattctaacaatgtcccatttccagatttatgtacatagcaagttaatgatagttgatgaccgcatcacattgattggctcagctaatattaatgatagaagcttgcttggatcaagagactccgagattgctgtggtcatcgaagataaagaggttgttaattcaaaaatggatggaagaccttgggaagctgggaagtcctctttaagcctacgcctctcgctgtgggtggaacaccttggccttcatccaggagaggttagccatatcatggatcctatagatgattcaacattcaaaaatatctggatggccactgccaagacaaataccatgatataccaagatgtcttcgggtgtgtacccaacgatctcattcactcaagggttcaatttcggcaaagctttgctcacttgagggacaaaattggccacactacaattgatttgggtgttgcccaagagaagctagaagcttaccaagagggtgatctcaaaagtatcaaccctatggacagactacagttagtcaggggccaccttgtttcgtttccgttggatttcatgtgccaagaggacttgagaccatatttcagtgaaagtgagtactacacatcaccacaggttttccattagcctctctgtctgcctcgtaaagttactcaaccggctgtacatgttgcaaagatcaccttgtagatgctctacacatgttgtcaaataggaaacaaaaaaaaattaatatattatcataccattagagtattagaattgtttcctagaaagaaaatagtatatcagtatagttcattcgttccaacaacttttagtttcgggaaagaaacaatcaaattcattgtttataagtgcaaataataggagtttccttagttcaacacattttctttggaatgaatatacacctcccatagcagttcattttcttcctatcctattgtgtacctgctacactatccagaaatataagggctagtttggaaacgtaaatcctttataggattcttggggattaatttcccagtcaatcccctagaaccccggacgggatttaagttttcaaattggccggcgatgtctatgtggtcacataacatgtatattcttgtattagtttgtcggtcaaactcgatttttgacagtcgaaacacgccttatatttctggatgatagggagtagtgttgattaaggatatttgacaattgacactatttttgcgagcacttgaaacttgtgtgtctacctgaaatggcgggacaataaatatacatgttctgtgttg

SEQ ID NO: 59359 - DNA, 3797 bp, Zea Mays
cgacgagctgcccagggcgtccatcgtagccgtatcgcgccccgacgccggggacatcacgcccatgctgctctcctataccatcgaggttcattacaagcagtttagatggcgtctatataagaaagcttcacaggttctctatcttcactttgcattgaagaggcgtgaatttcttgaagaattccatgaaaagcaggagcaggtcaaagaatggctccaaaatttgggaattggggagcatatgccagtagtacatgatgaggatgaagcggatgatgtaaatgttccaccacagtctgatgataactcaattagaaatagaaacgttccttcaagtgctgttttacctgtcattcgaccggctcttggacgtcaaaactctatttctgatcgagcaaaagttgcaatgcaagaatatctaaaccatttcttagggaacttggatatcgtcaattcacgggaggtttgcaaatttttggaggtgtcatgtttgtcatttttacctgagtatggtcccaagttaaaagaagacaatgtttcagttggacatttaccaaagattcaaaaggaccggaaaaaacgatgctgttcatgtggattgtttaactgttgcaagagcaattggcaaaagacctgggctgtcctgaagccaggattcttggctttgcttgaagacccttttgatccaaagcttttagacgtcattatttttgatgcattgccacatatggatataactggagaaggccaagtttctttagcaaaagagattaaagaacgtaatccactgcattttggattccaggtttcttctggtggccggacaataaagctacgcgcaacaagctcttctagggttaaggactgggttactgcaataaatgctgctcgacaacctccagaaggctggtgctatcctcatcgttttggctcatttgcaccaccgaggggtttgttggaagatgggagtatggtacaatggtttgtagatgggcaagctgcattcaaagctattgcatcctccattgaggaagccaaatcggagatatttattactggctggtggctctgcccagagttgtatcttcgacgcccattccaacatcatggatcatctagacttgatgctctactggaagcaagagctaagcagggtgtacagatttacattctcttgtacaaggaagttgctcttgctttgaaaattaacagcttatacagtaaacagaggctacttaacattcatgaaaatgttaaagttctgcgttaccctgatcacttctcaagtggtgtatacttgtggtcacaccatgagaagattgtgattgttgataatcaagtatgttatattggaggtcttgatctgtgctttggtcgctacgatagtcctgagcacaaagtcgctgattctcctccagagatgtggccaggaaaggactactacaatcccagggaatctgaacccaattcctgggaggacaccatgaaagatgagctggaccgtgataaatatccccgcatgccttggcatgatgttcagtgtgctctctatggcccaccttgccgtgatgtagcgaggcattttgttcagcgctggaattatgcaaagaggaacaaagctctaaatgagcaagcaattcccttactgatgcctcattaccacatggtaattccacactacaagggtagaagcaaagaaacaaatgatgaggctgagggtaaacaatacaatgataaggatgttgatattggaaagccagtcttgacatcacgcacatcatgtcaggatgttccattgctcttacctcaagagcttgaacctcgtgaattatccagttcagatttaagggtgaatgatttagatattaaccattcagatcgtttaaacaagaagaactttaatcagcctttgctcaaccgaaaggcaaaactggattcttctcatcaggatttacctatgagaagttttgtagacaatctcagttcccttgagccatcatctgttagacgttttgattcgtcaaaagatgataggaatcacattgacaaaaaatggtgggaaatgcaggagcgaggcaaccaagttgcttcattacttgatattggacaagttggtccaagggtaacatgtcgttgtcaggttgttaggagtgtcggtcaatggtcagctgggaccactcaaattgaaggaagcatccacaatgcctacttttctctgattgagaaggcagaacacttcgtatacattgagaatcaatttttcatatcgggtctgtcaggagatgatacgattaaaaaccgcgtactggaagcattgtatcggcgcatacttagagctgaaagagagaaaaagcgctttaaggccatcatcatcatacctcttttacctggttttcagggaggcattgatgatggtggagcagcatcagtcagggcaatcatgcattggcaatatcggactatctgcagagagcacatggtaaactccatgatgggggtcccttggttactagtcagatttatgtacatagcaagttaatgatagttgatgaccgcatcacattgattggctcagctaatattaatgatagaagcttgcttggatcaagagactccgagattgctgtggtcatcgaagataaagaggttgttaattcaaaaatggatggaagaccttgggaagctgggaagtcctctttaagcctacgcctctcgctgtgggtggaacaccttggccttcatccaggagaggttagccatatcatggatcctatagatgattcaacattcaaaaatatctggatggccactgccaagacaaataccatgatataccaagatgtcttcgggtgtgtacccaacgatctcattcactcaagggttcaatttcggcaaagctttgctcacttgagggacaaaattggccacactacaattgatttgggtgttgcccaagagaagctagaagcttaccaagagggtgatctcaaaagtatcaaccctatggacagactacagttagtcaggggccaccttgtttcgtttccgttggatttcatgtgccaagaggacttgagaccatatttcagtgaaagtgagtactacacatcaccacaggttttccattagcctctctgtctgcctcgtaaagttactcaaccggctgtacatgttgcaaagatcaccttgtagatgctctacacatgttgtcaaataggaaacaaaaaaaaattaatatattatcataccattagagtattagaattgtttcctagaaagaaaatagtatatcagtatagttcattcgttccaacaacttttagtttcgggaaagaaacaatcaaattcattgtttataagtgcaaataataggagtttccttagttcaacacattttctttggaatgaatatacacctcccatagcagttcattttcttcctatcctattgtgtacctgctacactatccagaaatataagggctagtttggaaacgtaaatcctttataggattcttggggattaatttcccagtcaatcccctagaaccccggacgggatttaagttttcaaattggccggcgatgtctatgtggtcacataacatgtatattcttgtattagtttgtcggtcaaactcgatttttgacagtcgaaacacgccttatatttctggatgatagggagtagtgttgattaaggatatttgacaattgacactatttttgcgagcacttgaaacttgtgtgtctacctgaaatggcgggacaataaatatacatgttctgtgttg

SEQ ID NO: 59360 - DNA, 3219 bp, Zea Mays
cgacgagctgcccagggcgtccatcgtagccgtatcgcgccccgacgccggggacatcacgcccatgctgctctcctataccatcgaggttcattacaagcagtttagatggcgtctatataagaaagcttcacaggttctctatcttcactttgcattgaagaggcgtgaatttcttgaagaattccatgaaaagcaggagcaggtcaaagaatggctccaaaatttgggaattggggagcatatgccagtagtacatgatgaggatgaagcggatgatgtaaatgttccaccacagtctgatgataactcaattagaaatagaaacgttccttcaagtgctgttttacctgtcattcgaccggctcttggacgtcaaaactctatttctgatcgagcaaaagttgcaatgcaagaatatctaaaccatttcttagggaacttggatatcgtcaattcacgggaggtttgcaaatttttggaggtgtcatgtttgtcatttttacctgagtatggtcccaagttaaaagaagacaatgtttcagttggacatttaccaaagattcaaaaggaccggaaaaaacgatgctgttcatgtggattgtttaactgttgcaagagcaattggcaaaagacctgggctgtcctgaagccaggattcttggctttgcttgaagacccttttgatccaaagcttttagacgtcattatttttgatgcattgccacatatggatataactggagaaggccaagtttctttagcaaaagagattaaagaacgtaatccactgcattttggattccaggtttcttctggtggccggacaataaagctacgcgcaacaagctcttctagggttaaggactgggttactgcaataaatgctgctcgacaacctccagaaggctggtgctatcctcatcgttttggctcatttgcaccaccgaggggtttgttggaagatgggagtatggtacaatggtttgtagatgggcaagctgcattcaaagctattgcatcctccattgaggaagccaaatcggagatatttattactggctggtggctctgcccagagttgtatcttcgacgcccattccaacatcatggatcatctagacttgatgctctactggaagcaagagctaagcagggtgtacagatttacattctcttgtacaaggaagttgctcttgctttgaaaattaacagcttatacagtaaacagaggctacttaacattcatgaaaatgttaaagttctgcgttaccctgatcacttctcaagtggtgtatacttgtggtcacaccatgagaagattgtgattgttgataatcaagtatgttatattggaggtcttgatctgtgctttggtcgctacgatagtcctgagcacaaagtcgctgattctcctccagagatgtggccaggaaaggactactacaatcccagggaatctgaacccaattcctgggaggacaccatgaaagatgagctggaccgtgataaatatccccgcatgccttggcatgatgttcagtgtgctctctatggcccaccttgccgtgatgtagcgaggcattttgttcagcgctggaattatgcaaagaggaacaaagctctaaatgagcaagcaattcccttactgatgcctcattaccacatggtaattccacactacaagggtagaagcaaagaaacaaatgatgaggctgagggtaaacaatacaatgataaggatgttgatattggaaagccagtcttgacatcacgcacatcatgtcaggatgttccattgctcttacctcaagagcttgaacctcgtgaattatccagttcagatttaagggtgaatgatttagatattaaccattcagatcgtttaaacaagaagaactttaatcagcctttgctcaaccgaaaggcaaaactggattcttctcatcaggatttacctatgagaagttttgtagacaatctcagttcccttgagccatcatctgttagacgttttgattcgtcaaaagatgataggaatcacattgacaaaaaatggtgggaaatgcaggagcgaggcaaccaagttgcttcattacttgatattggacaagttggtccaagggtaacatgtcgttgtcaggttgttaggagtgtcggtcaatggtcagctgggaccactcaaattgaaggaagcatccacaatgcctacttttctctgattgagaaggcagaacacttcgtatacattgagaatcaatttttcatatcgggtctgtcaggagatgatacgattaaaaaccgcgtactggaagcattgtatcggcgcatacttagagctgaaagagagaaaaagcgctttaaggccatcatcatcatacctcttttacctggttttcagggaggcattgatgatggtggagcagcatcagtcagggcaatcatgcattggcaatatcggactatctgcagaggttctaattcgattcttcagaatctatttgatgttattggacctaaagcacatgattacatctccttttatgggcttagagcacatggtaaactccatgatgggggtcccttggttactagtcagatttatgtacatagcaagttaatgatagttgatgaccgcatcacattgattggctcagctaatattaatgatagaagcttgcttggatcaagagactccgagattgctgtggtcatcgaagataaagaggttgttaattcaaaaatggatggaagaccttgggaagctgggaagtcctctttaagcctacgcctctcgctgtgggtggaacaccttggccttcatccaggagaggttagccatatcatggatcctatagatgattcaacattcaaaaatatctggatggccactgccaagacaaataccatgatataccaagatgtcttcgggtgtgtacccaacgatctcattcactcaagggttcaatttcggcaaagctttgctcacttgagggacaaaattggccacactacaattgatttgggtgttgcccaagagaagctagaagcttaccaagagggtgatctcaaaagtatcaaccctatggacagactacagttagtcaggggccaccttgtttcgtttccgttggatttcatgtgccaagaggacttgagaccatatttcagtgaaagtatagatgaattacctgaactgacgacatatatctatgtata

SEQ ID NO: 59361 - DNA, 3745 bp, Zea Mays
gtctatataagaaagcttcacaggttctctatcttcactttgcattgaagaggcgtgaatttcttgaagaattccatgaaaagcaggagcaggtcaaagaatggctccaaaatttgggaattggggagcatatgccagtagtacatgatgaggatgaagcggatgatgtaaatgttccaccacagtctgatgataactcaattagaaatagaaacgttccttcaagtgctgttttacctgtcattcgaccggctcttggacgtcaaaactctatttctgatcgagcaaaagttgcaatgcaagaatatctaaaccatttcttagggaacttggatatcgtcaattcacgggaggtttgcaaatttttggaggtgtcatgtttgtcatttttacctgagtatggtcccaagttaaaagaagacaatgtttcagttggacatttaccaaagattcaaaaggaccggaaaaaacgatgctgttcatgtggattgtttaactgttgcaagagcaattggcaaaagacctgggctgtcctgaagccaggattcttggctttgcttgaagacccttttgatccaaagcttttagacgtcattatttttgatgcattgccacatatggatataactggagaaggccaagtttctttagcaaaagagattaaagaacgtaatccactgcattttggattccaggtttcttctggtggccggacaataaagctacgcgcaacaagctcttctagggttaaggactgggttactgcaataaatgctgctcgacaacctccagaaggctggtgctatcctcatcgttttggctcatttgcaccaccgaggggtttgttggaagatgggagtatggtacaatggtttgtagatgggcaagctgcattcaaagctattgcatcctccattgaggaagccaaatcggagatatttattactggctggtggctctgcccagagttgtatcttcgacgcccattccaacatcatggatcatctagacttgatgctctactggaagcaagagctaagcagggtgtacagatttacattctcttgtacaaggaagttgctcttgctttgaaaattaacagcttatacagtaaacagaggctacttaacattcatgaaaatgttaaagttctgcgttaccctgatcacttctcaagtggtgtatacttgtggtcacaccatgagaagattgtgattgttgataatcaagtatgttatattggaggtcttgatctgtgctttggtcgctacgatagtcctgagcacaaagtcgctgattctcctccagagatgtggccaggaaaggactactacaatcccagggaatctgaacccaattcctgggaggacaccatgaaagatgagctggaccgtgataaatatccccgcatgccttggcatgatgttcagtgtgctctctatggcccaccttgccgtgatgtagcgaggcattttgttcagcgctggaattatgcaaagaggaacaaagctctaaatgagcaagcaattcccttactgatgcctcattaccacatggtaattccacactacaagggtagaagcaaagaaacaaatgatgaggctgagggtaaacaatacaatgataaggatgttgatattggaaagccagtcttgacatcacgcacatcatgtcaggatgttccattgctcttacctcaagagcttgaacctcgtgaattatccagttcagatttaagggtgaatgatttagatattaaccattcagatcgtttaaacaagaagaactttaatcagcctttgctcaaccgaaaggcaaaactggattcttctcatcaggatttacctatgagaagttttgtagacaatctcagttcccttgagccatcatctgttagacgttttgattcgtcaaaagatgataggaatcacattgacaaaaaatggtgggaaatgcaggagcgaggcaaccaagttgcttcattacttgatattggacaagttggtccaagggtaacatgtcgttgtcaggttgttaggagtgtcggtcaatggtcagctgggaccactcaaattgaaggaagcatccacaatgcctacttttctctgattgagaaggcagaacacttcgtatacattgagaatcaatttttcatatcgggtctgtcaggagatgatacgattaaaaaccgcgtactggaagcattgtatcggcgcatacttagagctgaaagagagaaaaagcgctttaaggccatcatcatcatacctcttttacctggttttcagggaggcattgatgatggtggagcagcatcagtcagggcaatcatgcattggcaatatcggactatctgcagaggttctaattcgattcttcagaatctatttgatgttattggacctaaagcacatgattacatctccttttatgggcttagagcacatggtaaactccatgatgggggtcccttggttactagtcagatttatgtacatagcaagttaatgatagttgatgaccgcatcacattgattggctcagctaatattaatgatagaagcttgcttggatcaagagactccgagattgctgtggtcatcgaagataaagaggttgttaattcaaaaatggatggaagaccttgggaagctgggaagtcctctttaagcctacgcctctcgctgtgggtggaacaccttggccttcatccaggagaggttagccatatcatggatcctatagatgattcaacattcaaaaatatctggatggccactgccaagacaaataccatgatataccaagatgtcttcgggtgtgtacccaacgatctcattcactcaagctttgctcacttgagggacaaaattggccacactacaattgatttgggtgttgcccaagagaagctagaagcttaccaagagggtgatctcaaaagtatcaaccctatggacagactacagttagtcaggggccaccttgtttcgtttccgttggatttcatgtgccaagaggacttgagaccatatttcagtgaaagtgagtactacacatcaccacaggttttccattagcctctctgtctgcctcgtaaagttactcaaccggctgtacatgttgcaaagatcaccttgtagatgctctacacatgttgtcaaataggaaacaaaaaaaaattaatatattatcataccattagagtattagaattgtttcctagaaagaaaatagtatatcagtatagttcattcgttccaacaacttttagtttcgggaaagaaacaatcaaattcattgtttataagtgcaaataataggagtttccttagttcaacacattttctttggaatgaatatacacctcccatagcagttcattttcttcctatcctattgtgtacctgctacactatccagaaatataagggctagtttggaaacgtaaatcctttataggattcttggggattaatttcccagtcaatcccctagaaccccggacgggatttaagttttcaaattggccggcgatgtctatgtggtcacataacatgtatattcttgtattagtttgtcggtcaaactcgatttttgacagtcgaaacacgccttatatttctggatgatagggagtagtgttgattaaggatatttgacaattgacactatttttgcgagcacttgaaacttgtgtgtctacctgaaatggcgggacaataaatatacatgttctgtgttg

SEQ ID NO: 59362 - DNA, 327 bp, Zea Mays
aaaaaagaatataccctgtgctctggataatctgtcccagagttgacactgccacttcccttttactaacagcacctccatctaaaagagaatccacaactacaggcatcagctcaggaagatattgcctcatagcaaagccaccctataacacaggacatattattaaaagctatgccattacgagaacacaaacaccacaaatagaggaacagatgaagactaaccactttggccagttctccaacagtggcaagcactcccgcagcaagagcattattagcatttggtcccgttccttcacacaatctagtcactagcgcctaa

SEQ ID NO: 59363 - DNA, 140 bp, Zea Mays
caacaaaaattgaagtcaagatgtcagcttgggccaagaaatcatcaaaagctggatttcgatacaaagccttgaagactgaacttctaacaccaacatcagcatcagcaactgcagccataagaagtttctccactatc

SEQ ID NO: 59364 - DNA, 919 bp, Zea Mays
gccggcggcgcttagctcctccaatacgatttgtcctatttgaaccgaactgtgaagctgaagaagcagaaagggagtgtgcaactaatttgcaacagcacaaagaggcagcttttctggtactgctatcttcatcttccaaataaagtatgacactctctctagcgaattccagaagttcatggccctgaaacaaatgcatatttaagttttaaaatacactaccataagtcagcttactagagcatttcaacaaaccttaaagttgaagtttgctagagtccacagtgcaagttgcacaagaacaggactattagagtccacaaactgttgcaaattgtttgacctgcttgctcgaccaacagaagcacctggccttattgatgactttggtagtgcttgagatatacaatccaataaacgctcctgtattgtgggtagtaaagacgggatgctgtacaaaaaatgtcacatagcagctctgtagagaataaaatgaaaggaactaattaattaaagcaatgaaatcttaccttgtgcttatagactcgagtgcatctataagtttatcagaaagaccagcaaaaaacatagcatctagaagtccgctacgaatatgaggttccattgcaggacccatagcttttgcaaagcttcctacacaagaaattgcctcaagagatggccttcctctgcgaggagcaatctgtacatacaagcaccaatgattacatgaaaattcaagtaaacacctgagtagaatagggctgccaagtaccaaagcataccgcatcttgcaaatgtgaggtaattgctggtaaataaggcacaagttcaacacccagagccccagccatctctccaagggcaacaaaaccactagcgcgctcgtctggtgtacgtagaacaaacaagatat

SEQ ID NO: 59365 - DNA, 321 bp, Zea Mays
ctttaggcttctttccgatctccgggaagtgcggcgagggtttcatggcgatgttggcggctgcaaggccggcgcgccggatagaggcgggggcaggggaactgtcaagggtttaactatgcgaacgcgcactgcaggaatggacgagctcgctctctcaaatcggccgaatgcgctcgtcccaccgagacgccgtcttgctccgtctccctgtctcgctcacgcggacgctccacgcgagcagggcaggccgaggagggcgacggcgcggccgggcgacggcgcgaggagagcgatggcgcgaagagtgcagaacgcgcg

SEQ ID NO: 59366 - DNA, 920 bp, Zea Mays
atggcggccgtgcacgaggaacggaagcccattcggacgccgaccgaccttgcggccgccatccacgcggcagcggatgccgacatcgacgcggtggccgccctggccctgtccgcggcctcggacgtgccgctaccgacgcactccctcgcgctcttgctccgccgcctgttcaccactcgctccatcgccgccacgcggggcctcctcgacaagctccacccctccggcgaggacggatgcccgcgccccaacccggccctgcgcggggcgctgctggcgctcgcggacgccgtgtgccgccgcggtcccccagcatcgcaactaccgtgtgatggccgcccatcccgccgagcccgccccctacacccaccaattgtcagggcctgcctctccgggcctctcaagcggggaatccatctgttgggcatcttcctcacctgcggcatacggtggcgtggcggcactgagagcgagaagcctggatccaggagtgggcaggagggggccgaggacctgcacctctgcatcgacagcagcctttctctcctgtcggaggcgcttaggatgccccagcccgctgcttttgtctccatgcagccgttcgatggtcaacccacgccgagcaacgtctcgaacaagaagatgaagcacgatggagaggtgtcgttcttagatggcgccggggaggtcaccgtcaccatcggtggcaactcgcaacagcctctctccacagcccctccacccgattctccagacttcaaacctcaagtctgggccaaatatttgcaatgttctagaaggaatgtggctccagctctaacggtgagtccgacgaggctgcgatggcaaaagagagcgactcttcggaggatgaggtggcgccaaggaataccatgggagacatgcctctagagtaa

SEQ ID NO: 59367 - DNA, 2602 bp, Zea Mays
aacgattccggatgtaagccgacagaaacgacaagcccttagggcggtacattccaacttaacataaaacacccctctcacaaccagaccccaccgctgccacgtccacgtgcgccgcacacgcgggaaaggggactctacaacacgcatcgccccgagccgagccctctcgcttcccttttataccccttgccacgcgcattcccctctccactgccagctccggtccgcagagggagggaggaggacgccagttgccactgccgcgccgctcccgcctccctctctccatccgacgagctcgagaagccaccatgatctccgcgcgcaccgccgcagcttcccccgcctccctgtggaagcggggaggacaaagtgagggcggcggcagttgcgacggatgtcggacctacaggaacactttgcggagggccgcagcagcgaaggtgcgtgccttgccgtcgagggcggtggaggcggtcaaaatgggctccgccgcggaggtggagcaggaggaggcggaggtagccgcggccgcggacggcgtcgtcgtcgaggaccactacggcgaggacagcgccaccgaggagctgcccatcatgccctgggccttctccgtcgcaagcggttacaccctcttgagggatccacatcacaacaagggtcttgctttcacggagaaggagagggatgcacaccacttgcgtgggctgcttcctcctgcagttgttcctcaagaactccaaattaagaagatcatgcacaacctgcggcagtaccaggtccctttgcagcgctatatggccatgatggaccttcaggagaggaacgagaggcttttctacaagcttttaattgataacgtggaggagctgcttcctgtggtttatacaccaactgtaggtgaggcctgccagaagtatgggtccatctttcgacaaccacagggtctgtatgtcagcttgagggacaaggggaaggtcctagaagttctaaggaactggccacataggaacattcaagttatctgtgttactgatggtgagcgaatcttgggacttggagatttgggttctcagggaatgggaattcctgtaggcaaacttgctctatacactgctcttggaggagttcgtccatcagcttgtttgcctatcacaatcgatgttggcacaaataatgagaaactgcttaatgatgagttttacattggactccggcaaaaacgtgcaactggcgaggagtatcatgagcttatggaagagttcatggctgctgttaagcaaatctacggcgagaaagtcctcattcagtttgaggacttcgcgaatcataatgcttttaatttgcttgcaaaatatagcaagagccatcttgttttcaatgatgacatccagggcacagcatcagtggtccttgcaggtttgttagcagcactcaaggtggttggtaggaccttggcagagcacacttatttattccttggtgctggggaggctggaactggtattgcagaactcattgctcttgagatttcaaaacagacgtcggctccaattgaagagtgccgcaagaagatttggttggtggactcaaagggtttgattgttgactctcgtaaaaactccgttcagtcattcaaaaaaccttgggcacatgagcatgagcccttgacaaccttgtacgatgctgttcagtccatcaaacctacagttctgattgggacgtctggagttggaagaacattcacaaaagaagttgttgaggccatggcttccttcaatgagaggcctatcatcttttcactgtcaaatccaacctctcattctgaatgtactgctgaagaagcatataactggactcagggtcgtgtaatatttgccagtggcagtccatttgaccctgtggagtacgatgggaaggtttttgtacctggacagtcgaacaacgcctacattttccctggatttggcctcggtcttgttatctctggagccatccgtgtccacgaggacatgcttcttgccgcctcggaagcactagctgctcaggccacacaggagaacttcgacaagggatcaatcttcccgcccttcaccaacattagaaagatctctgcgcgcattgccgcagccgtggctgcaaaagcttatgaactcggtttggcgacccgtctgcctcccccaagggacctggtgaaatatgcacagagctgcatgtacactcctgtctaccgtaactaccggtagtgctgctgggatcaattctgcagtaataaaatatgtcgacgcagatgatcctgcaatgttgtagtttattttttcatttgttggccctgctgctgaccacctttgtggctgctagacactgtacctgtctatgcatatatgatactggaacatttggcgcgctgtgggcgtccctgtcatgagatcaattgcagaaataaaatgcaatttagatttgagcaccaaaataaaaatagtaataatacacaagtgaggcaagcatatgttgaatctgatttgcttcaccttcgattagagatgacaatgagtaaatattcaccttcgattagagatgacaatgagtaaatacccgt

SEQ ID NO: 59368 - DNA, 2602 bp, Zea Mays
aacgattccggatgtaagccgacagaaacgacaagcccttagggcggtacattccaacttaacataaaacacccctctcacaaccagaccccaccgctgccacgtccacgtgcgccgcacacgcgggaaaggggactctacaacacgcatcgccccgagccgagccctctcgcttcccttttataccccttgccacgcgcattcccctctccactgccagctccggtccgcagagggagggaggaggacgccagttgccactgccgcgccgctcccgcctccctctctccatccgacgagctcgagaagccaccatgatctccgcgcgcaccgccgcagcttcccccgcctccctgtggaagcggggaggacaaagtgagggcggcggcagttgcgacggatgtcggacctacaggaacactttgcggagggccgcagcagcgaaggtgcgtgccttgccgtcgagggcggtggaggcggtcaaaatgggctccgccgcggaggtggagcaggaggaggcggaggtagccgcggccgcggacggcgtcgtcgtcgaggaccactacggcgaggacagcgccaccgaggagctgcccatcatgccctgggccttctccgtcgcaagcggttacaccctcttgagggatccacatcacaacaagggtcttgctttcatggagaaggagagggatgcacaccacttgcgggggctgcttcctcctgcagttgtgcctcaagaactccaaattaagaagatcatgcacaacctgcggcagtaccaggtccctttgcagcgctatatggccatgatggaccttcaggagaggaacgagaggcttttctacaagcttttaattgataacgtggaggagctgcttcctgtggtttatacaccaactgtaggtgaggcctgccagaagtatgggtccatctttcgacaaccacagggtctgtatgtcagcttgagggacaaggggaaggtcctagaagttctaaggaactggccacataggaacattcaagttatctgtgttactgatggtgagcgaatcttgggacttggagatttgggttctcagggaatgggaattcctgtaggcaaacttgctctatacactgctcttggaggagttcgtccatcagcttgtttgcctatcacaatcgatgttggcacaaataatgagaaactgcttaatgatgagttttacattggactccggcaaaaacgtgcaactggcgaggagtatcatgagcttatggaagagttcatggctgctgttaagcaaatctacggcgagaaagtcctcattcagtttgaggacttcgcgaatcataatgcttttaatttgcttgcaaaatatagcaagagccatcttgttttcaatgatgacatccagggcacagcatcagtggtccttgcaggtttgttagcagcactcaaggtggttggtaggaccttggcagagcacacttatttattccttggtgctggggaggctggaactggtattgcagaactcattgctcttgagatttcaaaacagacgtcggctccaattgaagagtgccgcaagaagatttggttggtggactcaaagggtttgattgttgactctcgtaaaaactccgttcagtcattcaaaaaaccttgggcacatgagcatgagcccttgacaaccttgtacgatgctgttcagtccatcaaacctacagttctgattgggacgtctggagttggaagaacattcacaaaagaagttgttgaggccatggcttccttcaatgagaggcctatcatcttttcactgtcaaatccaacctctcattctgaatgtactgctgaagaagcatataactggactcagggtcgtgtaatatttgccagtggcagtccatttgaccctgtggagtacgatgggaaggtttttgtacctggacagtcgaacaacgcctacattttccctggatttggcctcggtcttgttatctctggagccatccgtgtccacgaggacatgcttcttgccgcctcggaagcactagctgctcaggccacacaggagaacttcgacaagggatcaatcttcccgcccttcaccaacattagaaagatctctgcgcgcattgccgcagccgtggctgcaaaagcttatgaactcggtttggcgacccgtctgcctcccccaagggacctggtgaaatatgcacagagctgcatgtacactcctgtctaccgtaactaccggtagtgctgctgggatcaattctgcagtaataaaatatgtcgacgcagatgatcctgcaatgttgtagtttattttttcatttgttggccctgctgctgaccacctttgtggctgctagacactgtacctgtctatgcatatatgatactggaacatttggcgcgctgtgggcgtccctgtcatgagatcaattgcagaaataaaatgcaatttagatttgagcaccaaaataaaaatagtaataatacacaagtgaggcaagcatatgttgaatctgatttgcttcaccttcgattagagatgacaatgagtaaatattcaccttcgattagagatgacaatgagtaaatacccgt

SEQ ID NO: 59369 - DNA, 2644 bp, Zea Mays
aacgattccggatgtaagccgacagaaacgacaagcccttagggcggtacattccaacttaacataaaacacccctctcacaaccagaccccaccgctgccacgtccacgtgcgccgcacacgcgggaaaggggactctacaacacgcatcgccccgagccgagccctctcgcttcccttttataccccttgccacgcgcattcccctctccactgccagctccggtccgcagagggagggaggaggacgccagttgccactgccgcgccgctcccgcctccctctctccatccgacgagctcgagaagccaccatgatctccgcgcgcaccgccgcagcttcccccgcctccctgtggaagcggggaggacaaagtgagggcggcggcagttgcgacggatgtcggacctacaggaacactttgcggagggccgcagcagcgaaggtgcgtgccttgccgtcgagggcggtggaggcggtcaaaatgggctccgccgcggaggtggagcaggaggaggcggaggtagccgcggccgcggacggcgtcgtcgtcgaggaccactacggcgaggacagcgccaccgaggagctgcccatcatgccctgggccttctccgtcgcaagttggttgaaaaaatacgctgaggagtcttatttctacatcagcggttacaccctcttgagggatccacatcacaacaagggtcttgctttcatggagaaggagagggatgcacaccacttgcgggggctgcttcctcctgcagttgtgcctcaagaactccaaattaagaagatcatgcacaacctgcggcagtaccaggtccctttgcagcgctatatggccatgatggaccttcaggagaggaacgagaggcttttctacaagcttttaattgataacgtggaggagctgcttcctgtggtttatacaccaactgtaggtgaggcctgccagaagtatgggtccatctttcgacaaccacagggtctgtatgtcagcttgagggacaaggggaaggtcctagaagttctaaggaactggccacataggaacattcaagttatctgtgttactgatggtgagcgaatcttgggacttggagatttgggttctcagggaatgggaattcctgtaggcaaacttgctctatacactgctcttggaggagttcgtccatcagcttgtttgcctatcacaatcgatgttggcacaaataatgagaaactgcttaatgatgagttttacattggactccggcaaaaacgtgcaactggcgaggagtatcatgagcttatggaagagttcatggctgctgttaagcaaatctacggcgagaaagtcctcattcagtttgaggacttcgcgaatcataatgcttttaatttgcttgcaaaatatagcaagagccatcttgttttcaatgatgacatccagggcacagcatcagtggtccttgcaggtttgttagcagcactcaaggtggttggtaggaccttggcagagcacacttatttattccttggtgctggggaggctggaactggtattgcagaactcattgctcttgagatttcaaaacagacgtcggctccaattgaagagtgccgcaagaagatttggttggtggactcaaagggtttgattgttgactctcgtaaaaactccgttcagtcattcaaaaaaccttgggcacatgagcatgagcccttgacaaccttgtacgatgctgttcagtccatcaaacctacagttctgattgggacgtctggagttggaagaacattcacaaaagaagttgttgaggccatggcttccttcaatgagaggcctatcatcttttcactgtcaaatccaacctctcattctgaatgtactgctgaagaagcatataactggactcagggtcgtgtaatatttgccagtggcagtccatttgaccctgtggagtacgatgggaaggtttttgtacctggacagtcgaacaacgcctacattttccctggatttggcctcggtcttgttatctctggagccatccgtgtccacgaggacatgcttcttgccgcctcggaagcactagctgctcaggccacacaggagaacttcgacaagggatcaatcttcccgcccttcaccaacattagaaagatctctgcgcgcattgccgcagccgtggctgcaaaagcttatgaactcggtttggcgacccgtctgcctcccccaagggacctggtgaaatatgcacagagctgcatgtacactcctgtctaccgtaactaccggtagtgctgctgggatcaattctgcagtaataaaatatgtcgacgcagatgatcctgcaatgttgtagtttattttttcatttgttggccctgctgctgaccacctttgtggctgctagacactgtacctgtctatgcatatatgatactggaacatttggcgcgctgtgggcgtccctgtcatgagatcaattgcagaaataaaatgcaatttagatttgagcaccaaaataaaaatagtaataatacacaagtgaggcaagcatatgttgaatctgatttgcttcaccttcgattagagatgacaatgagtaaatattcaccttcgattagagatgacaatgagtaaatacccgt

SEQ ID NO: 59370 - DNA, 2387 bp, Zea Mays
gccagctccggtccgcagagggagggaggaggacgccagttgccactgccgcgccgctcccgcctccctctctccatccgacgagctcgagaagccaccatgatctccgcgcgcaccgccgcagcttcccccgcctccctgtggaagcagggaggacgaagcgagggcggcggcagctgcgacggatgtcggacttacaggaacactttgcggagggccgcagcagcgaaggtgcgtgccttgccgtcgagggcggtggaggcggtcaaaatgggctccgccgcggagatggagcaggaggaggcggaggtggccgcggccgcggccggcgtcgtcgtcgaggaccactacggcgaggacagcgccaccgaggagctgcccatcctgccctgggccttctccgtcgcaagcggttacaccctcttgagggatccacatcacaacaagggtcttgctttcatggagaaggagagggatgcacaccacttgcgggggctgcttcctcctgcagttgtgcctcaagaactccaaattaagaagatcatgcacaacctgcggcagtaccaggtccctttgcagcgctatatggccatgatggaccttcaggagaggaacgagaggcttttctacaagcttttaattgataacgtggaggagctgcttcctgtggtttatacaccaactgtaggtgaggcctgccagaagtatgggtccatctttcgacaaccacagggtctgtatgtcagcttgagggacaaggggaaggtcctagaagttctaaggaactggccacataggaacattcaagttatctgtgttactgatggtgagcgaatcttgggacttggagatttgggttctcagggaatgggaattcctgtaggcaaacttgctctatacactgctcttggaggagttcgtccatcagcttgtttgcctatcacaatcgatgttggcacaaataatgagaaactgcttaatgatgagttttacattggactccggcaaaaacgtgcaactggcgaggagtatcatgagcttatggaagagttcatggctgctgttaagcaaatctacggcgagaaagtcctcattcagtttgaggacttcgcgaatcataatgcttttaatttgcttgcaaaatatagcaagagccatcttgttttcaatgatgacatccagggcacagcatcagtggtccttgcaggtttgttagcagcactcaaggtggttggtaggaccttggcagagcacacttatttattccttggtgctggggaggctggaactggtattgcagaactcattgctcttgagatttcaaaacagacgtcggctccaattgaagagtgccgcaagaagatttggttggtggactcaaagggtttgattgttgactctcgtaaaaactccgttcagtcattcaaaaaaccttgggcacatgagcatgagcccttgacaaccttgtacgatgctgttcagtccatcaaacctacagttctgattgggacgtctggagttggaagaacattcacaaaagaagttgttgaggccatggcttccttcaatgagaggcctatcatcttttcactgtcaaatccaacctctcattctgaatgtactgctgaagaagcatataactggactcagggtcgtgtaatatttgccagtggcagtccatttgaccctgtggagtacgatgggaaggtttttgtacctggacagtcgaacaacgcctacattttccctggatttggcctcggtcttgttatctctggagccatccgtgtccacgaggacatgcttcttgccgcctcggaagcactagctgctcaggccacacaggagaacttcgacaagggatcaatcttcccgcccttcaccaacattagaaagatctctgcgcgcattgccgcagccgtggctgcaaaagcttatgaactcggtttggcgacccgtctgcctcccccaagggacctggtgaaatatgcacagagctgcatgtacactcctgtctaccgtaactaccggtagtgctgctgggatcaattctgcagtaataaaatatgtcgacgcagatgatcctgcaatgttgtagtttattttttcatttgttggccctgctgctgaccacctttgtggctgctagacactgtacctgtctatgcatatatgatactggaacatttggcgcgctgtgggcgtccctgtcatgagatcaattgcagaaataaaatgcaatttagatttgagcaccaaaataaaaatagtaataatacacaagtgaggcaagcatatgttgaatctgatttgcttcaccttcgattagagatgacaatgagtaaatattcaccttcgattagagatgacaatgagtaaatacccgt

SEQ ID NO: 59371 - DNA, 1727 bp, Zea Mays
acaccctcttgagggatccacatcacaacaagggtcttgctttcacggagaaggagagggatgcacaccacttgcgtgggctgcttcctcctgcagttgttcctcaagaactccaaattaagaagatcatgcacaacctgcggcagtaccaggtccctttgcagcgctatatggccatgatggaccttcaggagaggaacgagaggcttttctacaagcttttaattgataacgtggaggagctgcttcctgtggtttatacaccaactgtaggtgaggcctgccagaagtatgggtccatctttcgacaaccacaggggggaaggtcctagaagttctaaggaactggccacataggaacattcaagttatctgtgttactgatggtgagcgaatcttgggacttggagatttgggttctcagggaatgggaattcctgtaggcaaacttgctctatacactgctcttggaggagttcgtccatcagcttgtttgcctatcacaatcgatgttggcacaaataatgagaaactgcttaatgatgagttttacattggactccggcaaaaacgtgcaactggcgaggagtatcatgagcttatggaagagttcatggctgctgttaagcaaatctacggcgagaaagtcctcattcagtttgaggacttcgcgaatcataatgcttttaatttgcttgcaaaatatagcaagagccatcttgttttcaatgatgacatccagggcacagcatcagtggtccttgcaggtttgttagcagcactcaaggtgtgggcacatgagcatgagcccttgacaaccttgtacgatgctgttcagttctgattgggacgtctggagttggaagaacattcacaaaagaagttgttgaggccatggcttccttcaatgagaggcctatcatcttttcactgtcaaatccaacctctcattctgaatgtactgctgaagaagcatataactggactcagggtcgtgtaatatttgccagtggcagtccatttgaccctgtggagtacgatgggaaggtttttgtacctggacagtcgaacaacgcctacattttccctggatttggcctcggtcttgttatctctggagccatccgtgtccacgaggacatgcttcttgccgcctcggaagcactagctgctcaggccacacaggagaacttcgacaagggatcaatcttcccgcccttcaccaacattagaaagatctctgcgcgcattgccgcagccgtggctgcaaaagcttatgaactcggtttggcgacccgtctgcctcccccaagggacctggtgaaatatgcacagagctgcatgtacactcctgtctaccgtaactaccggtagtgctgctgggatcaattctgcagtaataaaatatgtcgacgcagatgatcctgcaatgttgtagtttattttttcatttgttggccctgctgctgaccacctttgtggctgctagacactgtacctgtctatgcatatatgatactggaacatttggcgcgctgtgggcgtccctgtcatgagatcaattgcagaaataaaatgcaatttagatttgagcaccaaaataaaaatagtaataatacacaagtgaggcaagcatatgttgaatctgatttgcttcaccttcgattagagatgacaatgagtaaatattcaccttcgattagagatgacaatgagtaaatacccgt

SEQ ID NO: 59372 - DNA, 2458 bp, Zea Mays
gccacgcgcattcccctctccactagctccggtccgaagagggagggaggaccggaggaggacgcccgttgccactgccgcgccgctcccgcctccctctctccatccgccgagctcgagaagccaccatgatctccgcgcgcaccgccgcagcttcccccgcttccctgtggaagcagggaggacgaagcgagggcggcggcagctgcgacggatgtcggacttacaggaacactttgcggagggccgcagcagcgaaggtgcgtgccttgccgtcgagggcggtggaggcggtcaaaatgggctccgccgcggagatggagcaggaggaggcggaggtggccgcggccgcggccggcgtcgtcgtcgaggaccactacggcgaggacagcgccaccgaggagctgcccatcctgccctgggccttctccgtcgcaagttggttgaaaaaatacgctgaggagtcttatttctacatcagcggttacaccctcttgagggatccacatcacaacaagggtcttgctttcatggagaaggagagggatgcacaccacttgcgggggctgcttcctcctgcagttgtgcctcaagaactccaaattaagaagatcatgcacaacctgcggcagtaccaggtccctttgcagcgctatatggccatgatggaccttcaggagaggaacgagaggcttttctacaagcttttaattgataacgtggaggagctgcttcctgtggtttatacaccaactgtaggtgaggcctgccagaagtatgggtccatctttcgacaaccacagggtctgtatgtcagcttgagggacaaggggaaggtcctagaagttctaaggaactggccacataggaacattcaagttatctgtgttactgatggtgagcgaatcttgggacttggagatttgggttctcagggaatgggaattcctgtaggcaaacttgctctatacactgctcttggaggagttcgtccatcagcttgtttgcctatcacaatcgatgttggcacaaataatgagaaactgcttaatgatgagttttacattggactccggcaaaaacgtgcaactggcgaggagtatcatgagcttatggaagagttcatggctgctgttaagcaaatctacggcgagaaagtcctcattcagtttgaggacttcgcgaatcataatgcttttaatttgcttgcaaaatatagcaagagccatcttgttttcaatgatgacatccagggcacagcatcagtggtccttgcaggtttgttagcagcactcaaggtggttggtaggaccttggcagagcacacttatttattccttggtgctggggaggctggaactggtattgcagaactcattgctcttgagatttcaaaacagacgtcggctccaattgaagagtgccgcaagaagatttggttggtggactcaaagggtttgattgttgactctcgtaaaaactccgttcagtcattcaaaaaaccttgggcacatgagcatgagcccttgacaaccttgtacgatgctgttcagtccatcaaacctacagttctgattgggacgtctggagttggaagaacattcacaaaagaagttgttgaggccatggcttccttcaatgagaggcctatcatcttttcactgtcaaatccaacctctcattctgaatgtactgctgaagaagcatataactggactcagggtcgtgtaatatttgccagtggcagtccatttgaccctgtggagtacgatgggaaggtttttgtacctggacagtcgaacaacgcctacattttccctggatttggcctcggtcttgttatctctggagccatccgtgtccacgaggacatgcttcttgccgcctcggaagcactagctgctcaggccacacaggagaacttcgacaagggatcaatcttcccgcccttcaccaacattagaaagatctctgcgcgcattgccgcagccgtggctgcaaaagcttatgaactcggtttggcgacccgtctgcctcccccaagggacctggtgaaatatgcacagagctgcatgtacactcctgtctaccgtaactaccggtagtgctgctgggatcaattctgcagtaataaaatatgtcgacgcagatgatcctgcaatgttgtagtttattttttcatttgttggccctgctgctgaccacctttgtggctgctagacactgtacctgtctatgcatatatgatactggaacatttggcgcgctgtgggcgtccctgtcatgagatcaattgcagaaataaaatgcaatttagatttgagcaccaaaataaaaatagtaataatacacaagtgaggcaagcatatgttgaatctgatttgcttcaccttcgattagagatgacaatgagtaaatattcaccttcgattagagatgacaatgagtaaatacccgt

SEQ ID NO: 59373 - DNA, 2212 bp, Zea Mays
gccacgcgcattcccctctccactagctccggtccgaagagggagggaggaccggaggaggacgcccgttgccactgccgcgccgctcccgcctccctctctccatccgccgagctcgagaagccaccatgatctccgcgcgcaccgccgcagcttcccccgcttccctgtggaagcagggaggacgaagcgagggcggcggcagctgcgacggatgtcggacttacaggaacactttgcggagggccgcagcagcgaaggtgcgtgccttgccgtcgagggcggtggaggcggtcaaaatgggctccgccgcggagatggagcaggaggaggcggaggtggccgcggccgcggccggcgtcgtcgtcgaggaccactacggcgaggacagcgccaccgaggagctgcccatcctgccctgggccttctccgtcgcaagcggttacaccctcttgagggatccacatcacaacaagggtcttgctttcatggagaaggagagggatgcacaccacttgcgggggctgcttcctcctgcagttgtgcctcaagaactccaaattaagaagatcatgcacaacctgcggcagtaccaggtccctttgcagcgctatatggccatgatggaccttcaggagaggaacgagaggcttttctacaagcttttaattgataacgtggaggagctgcttcctgtggtttatacaccaactgtaggtgaggcctgccagaagtatgggtccatctttcgacaaccacagggtctgtatgtcagcttgagggacaaggggaaggtcctagaagttctaaggaactggccacataggaacattcaagttatctgtgttactgatggtgagcgaatcttgggacttggagatttgggttctcagggaatgggaattcctgtaggcaaacttgctctatacactgctcttggaggagttcgtccatcagcttgtttgcctatcacaatcgatgttggcacaaataatgagaaactgcttaatgatgagttttacattggactccggcaaaaacgtgcaactggcgaggagtatcatgagcttatggaagagttcatggctgctgttaagcaaatctacggcgagaaagtcctcattcagtttgaggacttcgcgaatcataatgcttttaatttgcttgcaaaatatagcaagagccatcttgttttcaatgatgacatccagggcacagcatcagtggtccttgcaggtttgttagcagcactcaaggtgtgggcacatgagcatgagcccttgacaaccttgtacgatgctgttcagtccatcaaacctacagttctgattgggacgtctggagttggaagaacattcacaaaagaagttgttgaggccatggcttccttcaatgagaggcctatcatcttttcactgtcaaatccaacctctcattctgaatgtactgctgaagaagcatataactggactcagggtcgtgtaatatttgccagtggcagtccatttgaccctgtggagtacgatgggaaggtttttgtacctggacagtcgaacaacgcctacattttccctggatttggcctcggtcttgttatctctggagccatccgtgtccacgaggacatgcttcttgccgcctcggaagcactagctgctcaggccacacaggagaacttcgacaagggatcaatcttcccgcccttcaccaacattagaaagatctctgcgcgcattgccgcagccgtggctgcaaaagcttatgaactcggtttggcgacccgtctgcctcccccaagggacctggtgaaatatgcacagagctgcatgtacactcctgtctaccgtaactaccggtagtgctgctgggatcaattctgcagtaataaaatatgtcgacgcagatgatcctgcaatgttgtagtttattttttcatttgttggccctgctgctgaccacctttgtggctgctagacactgtacctgtctatgcatatatgatactggaacatttggcgcgctgtgggcgtccctgtcatgagatcaattgcagaaataaaatgcaatttagatttgagcaccaaaataaaaatagtaataatacacaagtgaggcaagcatatgttgaatctgatttgcttcaccttcgattagagatgacaatgagtaaatattcaccttcgattagagatgacaatgagtaaatacccgt

SEQ ID NO: 59374 - DNA, 1985 bp, Zea Mays
atattaagctggaaccatattatgcggttacaccctcttgagggatccacatcacaacaagggtcttgctttcatggagaaggagagggatgcacaccacttgcgggggctgcttcctcctgcagttgtgcctcaagaactccaaattaagaagatcatgcacaacctgcggcagtaccaggtccctttgcagcgctatatggccatgatggaccttcaggagaggaacgagaggcttttctacaagcttttaattgataacgtggaggagctgcttcctgtggtttatacaccaactgtaggtgaggcctgccagaagtatgggtccatctttcgacaaccacagggtctgtatgtcagcttgagggacaaggggaaggtcctagaagttctaaggaactggccacataggaacattcaagttatctgtgttactgatggtgagcgaatcttgggacttggagatttgggttctcagggaatgggaattcctgtaggcaaacttgctctatacactgctcttggaggagttcgtccatcagcttgtttgcctatcacaatcgatgttggcacaaataatgagaaactgcttaatgatgagttttacattggactccggcaaaaacgtgcaactggcgaggagtatcatgagcttatggaagagttcatggctgctgttaagcaaatctacggcgagaaagtcctcattcagtttgaggacttcgcgaatcataatgcttttaatttgcttgcaaaatatagcaagagccatcttgttttcaatgatgacatccagggcacagcatcagtggtccttgcaggtttgttagcagcactcaaggtggttggtaggaccttggcagagcacacttatttattccttggtgctggggaggctggaactggtattgcagaactcattgctcttgagatttcaaaacagacgtcggctccaattgaagagtgccgcaagaagatttggttggtggactcaaagggtttgattgttgactctcgtaaaaactccgttcagtcattcaaaaaaccttgggcacatgagcatgagcccttgacaaccttgtacgatgctgttcagttctgattgggacgtctggagttggaagaacattcacaaaagaagttgttgaggccatggcttccttcaatgagaggcctatcatcttttcactgtcaaatccaacctctcattctgaatgtactgctgaagaagcatataactggactcagggtcgtgtaatatttgccagtggcagtccatttgaccctgtggagtacgatgggaaggtttttgtacctggacagtcgaacaacgcctacattttccctggatttggcctcggtcttgttatctctggagccatccgtgtccacgaggacatgcttcttgccgcctcggaagcactagctgctcaggccacacaggagaacttcgacaagggatcaatcttcccgcccttcaccaacattagaaagatctctgcgcgcattgccgcagccgtggctgcaaaagcttatgaactcggtttggcgacccgtctgcctcccccaagggacctggtgaaatatgcacagagctgcatgtacactcctgtctaccgtaactaccggtagtgctgctgggatcaattctgcagtaataaaatatgtcgacgcagatgatcctgcaatgttgtagtttattttttcatttgttggccctgctgctgaccacctttgtggctgctagacactgtacctgtctatgcatatatgatactggaacatttggcgcgctgtgggcgtccctgtcatgagatcaattgcagaaataaaatgcaatttagatttgagcaccaaaataaaaatagtaataatacacaagtgaggcaagcatatgttgaatctgatttgcttcaccttcgattagagatgacaatgagtaaatattcaccttcgattagagatgacaatgagtaaatacccgt

SEQ ID NO: 59375 - DNA, 1306 bp, Zea Mays
ctcagggcaaacttgctctatacactgctcttggaggagttcgtccatcagcttgtttgcctatcacaatcgatgttggcacaaataatgagaaactgcttaatgatgagttttacattggactccggcaaaaacgtgcaactggcgaggagtatcatgagcttatggaagagttcatggctgctgttaagcaaatctacggcgagaaagtcctcattcagtttgaggacttcgcgaatcataatgcttttaatttgcttgcaaaatatagcaagagccatcttgttttcaatgatgacatccagggcacagcatcagtggtccttgcaggtttgttagcagcactcaaggtgtgggcacatgagcatgagcccttgacaaccttgtacgatgctgttcagtccatcaaacctacagttctgattgggacgtctggagttggaagaacattcacaaaagaagttgttgaggccatggcttccttcaatgagaggcctatcatcttttcactgtcaaatccaacctctcattctgaatgtactgctgaagaagcatataactggactcagggtcgtgtaatatttgccagtggcagtccatttgaccctgtggagtacgatgggaaggtttttgtacctggacagtcgaacaacgcctacattttccctggatttggcctcggtcttgttatctctggagccatccgtgtccacgaggacatgcttcttgccgcctcggaagcactagctgctcaggccacacaggagaacttcgacaagggatcaatcttcccgcccttcaccaacattagaaagatctctgcgcgcattgccgcagccgtggctgcaaaagcttatgaactcggtttggcgacccgtctgcctcccccaagggacctggtgaaatatgcacagagctgcatgtacactcctgtctaccgtaactaccggtagtgctgctgggatcaattctgcagtaataaaatatgtcgacgcagatgatcctgcaatgttgtagtttattttttcatttgttggccctgctgctgaccacctttgtggctgctagacactgtacctgtctatgcatatatgatactggaacatttggcgcgctgtgggcgtccctgtcatgagatcaattgcagaaataaaatgcaatttagatttgagcaccaaaataaaaatagtaataatacacaagtgaggcaagcatatgttgaatctgatttgcttcaccttcgattagagatgacaatgagtaaatattcaccttcgattagagatgacaatgagtaaatacccgt

SEQ ID NO: 59376 - DNA, 1001 bp, Zea Mays
cgcaaggttcaccccggttggcacgtcattcgctcaccactcccaccgccaccggcctcaagccaacaccaccagtccacacatgcgcaggcgcacacgcacggccgttgagacttgagacagagacgcaggagcgcggaggaaaaggaggcccagaccaccgacggggaaaaaacatcacgaacaccgttctccatagcgggagtagtgaggaacgaaagagagggggcggcctagggcttcgattccgcagccatggacgccgctgacgtgtggggccgctcatcgtcctcgtcttcttcgtccgccgccgccgcgaggcgcctgcaggcgcgctacgatctgtacatggggatcgacgacgcggacgccggcttggacgaggtgacggagccgcgcggcggggcggagtcctacaactgccccttctgcggcgaggacttcgactttgtcggcctctgctgtcacatcgacgacgagcatgccgttgaggctaagagcgggggctgaaccatcattgtcggagaaagatcagaaggaaagggttcaaaggagcaaattcgtccgagggcttgtgctctcgacaatatttgatgatgataacttgtaaagggggtcatcaaacttgataacagcatcacaatagttaaggaacacgaagagaatcatcagactctgctgctgttgtcgtgatcacacaagaggcccatctaagttcgtatatgtacggatggaatatttatgcatgtatgtatttatgtttatctccctgcatttacccttagtgcaacagggtggtaggggacggttgtagtattccaaatttatgtatcaaataaatgaggacactgtccttggggtgcaattgtgtatataatataataatagggagctactcgccatgatttaggatattttatttaactgttgtaataatatgcagtgttttgtatgatgaccccatttttttatatataactgttcattttagtcctttaatg

SEQ ID NO: 59377 - DNA, 514 bp, Zea Mays
cccggttggcacgtcattcgctcaccactcccaccgccaccggcctcaagccaacaccaccagtccacacatgcgcaggcgcacacgcacggccgttgagacttgagacagagacgcaggagcgcggaggaaaaggaggcccagaccaccgacggggaaaaaacatcacgaacaccgttctccatagcgggagtagtgaggaacgaaagagagggggcggcctagggcttcgattccgcagccatggacgccgctgacgtgtggggccgctcatcgtcctcgtcttcttcgtccgccgccgccgcgaggcgcctgcaggcgcgctacgatctgtacatggggatcgacgacgcggacgccggcttggacgaggtgacggagccgcgcggcggggcggagtcctacaactgccccttctgcggcgaggacttcgactttgtcggcctctgctgtcacatcgacgacgagcatgccgttgaggctaagagcgggggcatgatgaaatcagtgtttg

SEQ ID NO: 59378 - DNA, 949 bp, Zea Mays
caggattcttctcccctccaccccttgtctgaggcatgccccatctgtgctacaagggtcggaatggacttgataggacatttgactatgcaacatggaagttatttcaagatgcaacgcaggcgcagagtccgaaaagtatcttctgggtcccattctttattatctttgttgagaaaggacttgagaaatggcagtttgcagtcatttctcggtggatcatcctatgtatccaatcctcctgctgcagcaccagatccatttgtgtcatctttaatttgtactttgcctgtggctgaaccatccaaagatttacattccgactcatctgacaataactttttgctaaataaattcccagatgaaaagcctgtagagaggtacgtcacctcaagcttgtcctttctgctgcctcactcatctccctctttgccacgataccattggatctgggctgaaccatcattgtcggagaaagatcagaaggaaagggttcaaaggagcaaattcgtccgagggcttgtgctctcgacaatatttgatgatgataacttgtaaagggggtcatcaaacttgataacagcatcacaatagttaaggaacacgaagagaatcatcagactctgctgctgttgtcgtgatcacacaagaggcccatctaagttcgtatatgtacggatggaatatttatgcatgtatgtatttatgtttatctccctgcatttacccttagtgcaacagggtggtaggggacggttgtagtattccaaatttatgtatcaaataaatgaggacactgtccttggggtgcaattgtgtatataatataataatagggagctactcgccatgatttaggatattttatttaactgttgtaataatatgcagtgttttgtatgatgaccccatttttttatatataactgttcattttagtcctttaatg

SEQ ID NO: 59379 - DNA, 874 bp, Zea Mays
gattcttctcccctccaccccttgtctgaggcatgccccatctgtgctacaagggtcggaatggacttgataggacatttgactatgcaacatggaagttatttcaagatgcaacgcaggcgcagagtccgaaaagtatcttctgggtcccattctttattatctttgttgagaaaggacttgagaaatggcagtttgcagtcatttctcggtggatcatcctatgtatccaatcctcctgctgcagcaccagatccatttgtgtcatctttaatttgtactttgcctgtggctgaaccatccaaagatttacattccgactcatctgacaataactttttgctaaataaattcccagatgaaaagcctgtagagagggctgaaccatcattgtcggagaaagatcagaaggaaagggttcaaaggagcaaattcgtccgagggcttgtgctctcgacaatatttgatgatgataacttgtaaagggggtcatcaaacttgataacagcatcacaatagttaaggaacacgaagagaatcatcagactctgctgctgttgtcgtgatcacacaagaggcccatctaagttcgtatatgtacggatggaatatttatgcatgtatgtatttatgtttatctccctgcatttacccttagtgcaacagggtggtaggggacggttgtagtattccaaatttatgtatcaaataaatgaggacactgtccttggggtgcaattgtgtatataatataataatagggagctactcgccatgatttaggatattttatttaactgttgtaataatatgcagtgttttgtatgatgaccccatttttttatatataactgttcattttagtcctttaatg

SEQ ID NO: 59380 - DNA, 955 bp, Zea Mays
atggctatgcttgaaaatgaaccaatggaatactagtaggcatgccccatctgtgctacaagggtcggaatggacttgataggacatttgactatgcaacatggaagttatttcaagatgcaacgcaggcgcagagtccgaaaagtatcttctgggtcccattctttattatctttgttgagaaaggacttgagaaatggcagtttgcagtcatttctcggtggatcatcctatgtatccaatcctcctgctgcagcaccagatccatttgtgtcatctttaatttgtactttgcctgtggctgaaccatccaaagatttacattccgactcatctgacaataactttttgctaaataaattcccagatgaaaagcctgtagagaggtacgtcacctcaagcttgtcctttctgctgcctcactcatctccctctttgccacgataccattggatctgggctgaaccatcattgtcggagaaagatcagaaggaaagggttcaaaggagcaaattcgtccgagggcttgtgctctcgacaatatttgatgatgataacttgtaaagggggtcatcaaacttgataacagcatcacaatagttaaggaacacgaagagaatcatcagactctgctgctgttgtcgtgatcacacaagaggcccatctaagttcgtatatgtacggatggaatatttatgcatgtatgtatttatgtttatctccctgcatttacccttagtgcaacagggtggtaggggacggttgtagtattccaaatttatgtatcaaataaatgaggacactgtccttggggtgcaattgtgtatataatataataatagggagctactcgccatgatttaggatattttatttaactgttgtaataatatgcagtgttttgtatgatgaccccatttttttatatataactgttcattttagtcctttaatg

SEQ ID NO: 59381 - DNA, 722 bp, Zea Mays
tgatcatttgcatttttacatttttcacattatactacagtgaagatacataggtgtcagggtccggcgcacgtcacgggcccggcggcgcctggagtacgtgcgcccgaccatgaccgcgaccatgacaatagatgaaaagcctgtagagaggtacgtcacctcaagcttgtcctttctgctgcctcactcatctccctctttgccacgataccattggatctgggctgaaccatcattgtcggagaaagatcagaaggaaagggttcaaaggagcaaattcgtccgagggcttgtgctctcgacaatatttgatgatgataacttgtaaagggggtcatcaaacttgataacagcatcacaatagttaaggaacacgaagagaatcatcagactctgctgctgttgtcgtgatcacacaagaggcccatctaagttcgtatatgtacggatggaatatttatgcatgtatgtatttatgtttatctccctgcatttacccttagtgcaacagggtggtaggggacggttgtagtattccaaatttatgtatcaaataaatgaggacactgtccttggggtgcaattgtgtatataatataataatagggagctactcgccatgatttaggatattttatttaactgttgtaataatatgcagtgttttgtatgatgaccccatttttttatatataactgttcattttagtcctttaatg

SEQ ID NO: 59382 - DNA, 177 bp, Zea Mays
atgatgcaggcaaagttggttcctttggaatacaaaaaattagaacgatactatagaaatttacctagactgaagaagattggactcagaaatataattgtagacattttgaatcccccacagagcagaagaggtatcatgcatgccctgaaaaccagctcctcagtaaatggtgcc

SEQ ID NO: 59383 - DNA, 803 bp, Zea Mays
cttgaaaccaaataataaatggcatatccggcctgaaattaagatatgccttgccggccggtcgattcgtgtgcaaggccgcatccatcattcatccttataaatgccaagctccacttgacagcaaaccacgcgcgctcgctctccctccctccctctgtttacatcgaatcattttcgatttagctatagcaggtctcgatcggcggccatgagcggtagccgcagcaagaagtcgtggccggaggtggaggggctgccgtccgaggtggccaagcagaaaattctggccgaccgcccggacgtccaggtggtcgttctgcccgacggctccttcgtcaccactgatttcaacgacaagcgcgtccgggtcttcgtcgacaacgccgacaacgtcgccaaagtccccaagatcggctagctagctagctaggcccaatcgttctaatcagctagtttctttctttcataaataaaagtcctctctcgtacccggactgtgatgtttccctagttgtctcgtacgtgttgttttctgtcttaatggatgccatggcgcccgcgcgcgcctccatcatgaaaagctacatttgaaacgatttttagtattctttgctgttaatatatatagtcgtcatcttttgactggaaatgcaagcagctcaacaaccgcgccacaagttcacagcactattaatgtacggatcgagtgcgtggttacccttaccctctccggcagcgaggttggcgtagaggtcgacgatgttggggcatccccggaggcaggccgcagagcagacggc

SEQ ID NO: 59384 - DNA, 482 bp, Zea Mays
gtcagctgctcgcacaccaccctcgcccctgccaggaaaccgaacagccagcaacacaacaagagtaagaagaacagcaggccgtgctagctagctgccggacatataccaccatggtccatggctaccgtcgtaccaagtgcagaggagaggagaagcgacacggagaagacgaaagccggaagctttgcgtgcaggacggaagccatgatggatacgcgctgatgctgctcgagctggtggacttgagcttaagacttgtgctggggtgaacgatgtatatatcagtagactagaaggggtttaaagctgtgccggcccgtgttcaaagactgcctaacatctccggtttgagtcaagctgattgtcgttacctccttcgttctttgggtttccttgttgtaaacctaatacaagcgtttgtgcgtcgtcggaacaggaaacaactattaaatatatttgtaagtttcatttatgtttaa

SEQ ID NO: 59385 - DNA, 368 bp, Zea Mays
cacggattcacgaatcacgatcacagcacaccaggtgtgaaaaagaatatagtaatcattccttcatatgtcgtaacatttttcttttcgtcatcatcataaaaaaaatacccaacatcgctcatatacctccaccccaaatgcatgctaacaaatctattacgtacacagatgctaatgctctgcctacactattgtttcaacttttgaatggcagctattatctgggaaaaaaacaattctcttttacaagagccatctggcacagtaaacaacattgctgttgctggatggttactggggtcctaatctgccgcatggatagggtacagatgttgtatggtcaatgctttagaggttggatgtga

SEQ ID NO: 59386 - DNA, 2320 bp, Zea Mays
gtaaacctgcattccacaagagaacagtaagctaatagaaggaaattggcatttgattgattttccagttccacagatgcagtgcagaaaaatctttaaaaaggtctaatggttattttatttgtactcttgtgcagaaatctttgcatgcatctatggtaaataaagcatacaatatagggaatactcaccgcccagttaggcaagagtgccagaatagttggggataggccgcgatacattccccggaaaccttcttgttgagcaatctgctgcaagctcccaataattacactacctagtattgattcacacaacacataaaaagccaattcaaatgtaatagccagtgttcttaaggcgtcgcctaggcgtccaggcgcccaggcaaaactggccgccttgctcgccatacccgcctaggcgtcgcctaggcgctaaggcggttttctggtccacttgctcgcctaggcgccttaagaacactggtaatagctcaaggcatttcctgatacaacaatacaactgttctagtgcagctgctatgataaagacggccatctttccttggctggaaaaaagaattccgcgccgaaacccttctgcaagctaaccgcttttctgaagagaaatcaactcttttctcctcgcttgtaaattcctatagatagcagatagttcttttccctgtgctctagttagtttatttctggtttatgtcttgggagcgactgctcatgctctttgtccgctttcttctttatattaataaatatctaccacagcaggggaagccctgctgtacattttcaaaaaaaaaactgttctagtgcagaacacagatgtagcataaaaaatgagctaagcatcacaagtttggtagtaacaagaaatacaaagcacatatgtatgtgataatctgccagcatgagaacatctatactcatagcactcatggttacattatagcagtttaaatttatttgcattcacaatatgcttgttcagttagacacttagacgtagtataatatcagcaaaacttgatgtgtacctcaaaaacaccaggcttggaatatcagctaatacattattttacatgtataaccaaagaactaactccatatatggcaaacaagacattcataatcataacgcaaaatgacagtagacatgtcatgcccagagacacacttacagttttgtgtgcattgtttgaaacttcgacgaatttggtattgataactaacaagcaacacatggggcatatgtatcatgtatgcgatgatctgccagcgtgaggacattctgacagttttaaacttttttgtattcatggtatgcatgttgtgcattggttctacataacataatacaagcaaaactcaatacaaatctcaaaaaaaccagattaagaaatattaggtatactctattttacacgtataaccaaagaactaactccatatatgtcaaaaaagacattcataatggaaaatgacaatagacatcatgcccacagacacttaatcttgtgtgcattgtttggaacttcgaatatatgtctaatctctgactttttcacgtgcatagacgaataagtacaaaccctgctagtgagagtttgcatgttttttccactctcgaacctgcatgacattgtaaattcacaacgacaacacaacactcgtgatacctccccttgtcccattcccatgaaagcactgatacttcaaatcatgcagggggatacaaatgaccgttagacaactacacaacccaacaatagtaaaccttaaggataagacatccgtccaagaaaaatatttgaactgttacaaaacctaaatgtggatcctcagttactaaaaagattctctcacaattccccgaatcttggatggtccaggtcaccaagagacaccacaagcgaaaacttaagaagtctccccatactaagcaggttttctctaacctctctgaatttcaaattgtccacatgacatcacagacaaaaccaagcacaaaaatcacataggttgactacaatgcgccacctcttcccatgcaaacattccatacttcccagcatatacacccctcctacatcctcagcacaactcaataacaccaggataagctcgctgttccaaacaggtttgtgcgtgtttctaactcaaaaagcaacaaattgaagcaaaattcacaaggaattgttggagggagtcatcacctccaattgtacctgtggcaagcttgggccagccgtggacctggaacctggtcttgatgacatcgagtgggcacacgaacgtcgccg

SEQ ID NO: 59387 - DNA, 1294 bp, Zea Mays
cagcaatggacacctttcttgagtccaacgttctcttgtgcatggcttaggatatggaagctgatgacgacgagctcgagttagcgaccatcagctacctcaggcgtcggcttgaacgcaaccagcgtcgacatggtggttccgttcccgactgagttggatccccggagaccattttggtggtcactcaaggattgtagccgactacttctcatatcatccagcttacattgatgcccaattctgaaggaggtttcgcatgtgtcgccatgtgttcgagcgccttgtgggtacagtccaacaggttgacccatacttcgtgcagcgtcctaactgcgtcggagggatgggactctacactgtgcagaaggttgttggcgacatccgcatcctcgcctatggtgttcctcctaatgtcgtggatgagtacgtgctcattgcagagttcactgcacatgaggctcttcaacgcttctgtaaggccatcgtaactgcatttgctctgtgctacctgcgcccgcatacaccccatgatctcacacgactactccaagtctgtgagtcacgtagatttctaggatacttggaagcatcaattgcatgcattgggagtgaaaaaactgccctaccacgtccgtgtggaagggtatgttcacaggccaagggaagcacccgaccatgatcctagaagcggatgcatcttatgacttatggatatggcacacatactttggcatgcccgatagcagtaatgacgtcaatgttttgcatcgcccacacattcgaaaaggcatctcaatgtggaggaaccttcagttgctttcacggtcaacggtaaccaatacgacatggggtattaccttgcggacgatatttcgcttattggttggcttttgtgaaaacagtctgacgcccttctgagcctcgcacaaagcactttgcaacaaagcaagagttcgctagaaaggatatagaaagagcgtttgatgtgcttcaggctaggtgtgcagtgatatgtggtcctgtgtacggttggtcgacaaccaacattcacgacatcatgacgacatgcatcatacttcacaatatgatagttgaggacgaaattcctatggtcgtgcatgctaccttcgacaacacaactgaatttgtagatccaactcacagatctttggaagaacgcaatcgcttcatcctcaaacaacacgagaagcttaaggatccacagaagtaccagcaactgcagagggacctgattgagcatcactgggcacgtatcggcgccgacatttag

SEQ ID NO: 59388 - DNA, 958 bp, Zea Mays
gcaaaggctgggtcccaccgtccaccaacaaaaaaacgaacgactgttgctcggcccgaatctcccgtgcttccctttccctcccccattccccccctccctccgggctctgcctccgctcaccgctcaccgctcatgggcgagtaccaccgtccctaccggggcgacctccgctcgccgccgtcctccgtgccggacccggccttcacgcacgccaacggctacttctcctcctccgcctccccgaactccaacaacggctacttctctcccgtcttcgcgaagaatgacgctttccctgggaccggcgctggcgcaggcggcgccggcggcggcaggaaagcgggaggtggtgggggcggggccagcatgtggtgcctcagcgatccggagatgaagcggcggcgaagggtggcgagctacaaggcctactcggtggagggcaaggtgaaggcgtcgctgcggcgcggcctccggtggttcaagggcaagtgctccgagatcttccaccatggatggtaacctccgatggctggctggctggctggctggccggctctccttcttggacggtggcaggccccccccaagaaaggaaccaaacttctgaatatgttcgcgatttacttttcttttcctttttgaaaataatgatgctcatgctccagatgtctatctatctatgtatctgttcgcctactaatttcgagatggatttgagactgtgagtgtatattcgtaaagctattttgccaagggatgcgcgctctgaacactcgagcggattgatctgttagtgctactgcagggtggctgtcgtatttgttattagtaatcaaatcaaacagttaggaattccatattaccaccatgctttgcttgtcctacttgctatgcattgataggatagccaggaatgtatggcatgtttgttgagattggctttgttcatcatttc

SEQ ID NO: 59389 - DNA, 808 bp, Zea Mays
atgggtctaggagcagatcaaactagtatttctagaaggtcaaaacatgcaaacctcgaggggaagcaaagcaaacaagctaaaaccatcaattccccattcgcaagccgtcgccaccgccgtcgccggcgtctcctcctctgccacccagcccaccctcctccgccacagacacaccgctatcgcttcccacatcatctctccagcgtccgccgagggatggagaacggtggaatcgaggaggccgacgacgcactgccggagcccgcgccgcccaatgggcggcggtaccggccagtcgggtcgagcgaccgtgccgtgatccagatgacttccatggagccgggatcctcgtctgccaccatcgatgccgtcgtgactccccagccgccaaggaacctgaagcctgatgctaatctaactattgatccaagtatgcgggaaggttctcctgatgatcatgttacatccagtggatctcaaggggattcaaagctagaactctttggttttgattctcttgtaaatatattgggtcttaagagcatgacaggagagcaggttcaggccccttcaagtcctagggatggcgaggatgttgcaattaccattggccggcccaagcaaagtggacctaagttcggcaccatgatgggtgtctttgttccatgcttgcagaatatcttgggaatcatttattatatccgttttacctggtaaggtattccatacacttttgttatgatctcagtacatcgtttctatttgttatttttctgaaaatgcttcactggccatacagatgctg

SEQ ID NO: 59390 - DNA, 2867 bp, Zea Mays
atgacggtcatgatgataagcgccgcagggggacaggaggcggtgggggaggaggtggaaggtgccacgggaggagcaactcggttcggtcctcggtcggatcgttttgataacgatcgcagccgcaccgccactacatgggaaatgaggaggatgcgggagaggaggtggaaggcgtcacaagaggagttgctcgattcggtccttggccagatcttatcaatcgacggctacagccgcaccgctgagagtgtaacagttgtcaacaatacattagtgaatggtacagaaactactggcacgtcaactatatctacacccagcttgcatgatcttcaagtgtatggtgttattgtgactatactgctgtgttttattgtgtttggtggtgtcaaaatcatcaacaaggttgcacctgctttcttaataccagtcctgttctctttgctgtgcatttatcttggtgtcttcattgcaccaaggcataatgctccaagggggatcactgggttgagtataaccacattgaaagacaattggggtgaagactatcaacgtacaaacaatgctggcgttcctgatccaagtggatcaatatattgggatttcaatgctctggtaggtctctttttcccagcggtcactggaattatggctggctcaaaccgatctgcctcactgaaagatacacagcgttcaataccaatcggcacattatatgcaactcttacaacaactgccatgtatctattctctgtgcttctatttggagccttggctacacgggaggagcttctaactgataggtgcagcactgcagagtttgactggggctccaaggttgcttgcagcaattgctaatgatgacattcttcctgttcttaattacttcaaagtttctgagggatctgagccgcatgcggccactttattcacggccttcatctgtatttgctgtgttgttattggaaacttggatttgattacacccacgatcacaatgtttttccttctgtgctatgctggcgtgaacctgtcatgctttctgcttgatctccttgatgctcctagttggcgccccagatggaaatttcaccattggagcctttcacttgttggggcattgttctgtgttgcctcatctattactatgtgagcataaaagggaaggctggagactggggagatgggttcaaaagtgcatactttcaattggcactccgaagtctcagatcactcggagcaaaccaagtccatcctaagaattggtaccccattcctctgatattctgccgtccatggggcaaactgccggaaaatgttccttgtcatccaaaacttgcagactttgctaattgtatgaagaagaaaggccgtggtatgtccatttttgtctctataattgatggtgattatcatgaactagctgaggatgcaaagactgcctgccgccaattggatgcttacattgactacaagcgctgtgagggtgttgcggagatcattgtagctcctactatgtctgacggcttccgcagcatcgtgcagacaatgggcctaggaaacttgaagccaaacattgttgtgatgcggtaccctgagatctggaggcgtgagaatttgacacagataccgtcaacatttgtcagcataataaatgattgcattattgctaacaaggcagtagtcattgtgaagggactcgatgagtggcctaatgagtaccagcgtcagtatgggactattgacctctactggattgtaagggatggaggattgatgcttcttctgtcccaactcctgctgacaaaggagagctttgagagctgtaagatccaagtcttctgcatatctgaagaggataccgacgcagaggagctgaaagctgatgtcaaaaagttcttgtatgatcttaggatgcaagctgaggtcattgttgtcactatgaaatcatgggagtcacacatggagagcagcagtagcggtgttcagcaggataactcccatgaggcttacacaagtgcacagcaaaggatcgaaacataccttgacgagatgaaggaaactgctcaaagagaaaggcagccactaaaggagaatgggaggcaagttgttgtgaatgaacagaaggttgataaattcctttacacaatgttgaaattgaactccacgatactcaggtactccagaatggcagctgtagttcttgtgagccttccaccaccaccactaaatcatcctgcatatttctacatggagtacatggatttgcttgtagagaatgtcccacgcatgttaatagttaggggatatacgagagatgttgtcacatttttcacatgattatacatataatataaacttcccacctggagactctagtgtcgtctggctgttgtactatcttagcagagactggttacacaagattcaagcgtggattctgccatcgaaatgacaagccctcaccttgaaggcaaccatgatgagatgtcaaatgtcaagggctcttgttcgggcttattgggttcgtgaactactgaactgcagtgtcttcattcttttctggattttaaagatccacatagcgagctttgattcttacagattttgtagtcatcatatgtaaacacttaccatctagtaagcatacttacatgctgccccaatgacagaatgcgatccttaccttctcacaaacatttatatatgtattttctttgcatcacttaagtccatctaaaacttatggacctgtggagatgagcagagagccagagatgcgaattttgaatggctacccccaacaaatgaattttggttgtgctctgtcgcaaattcttggttttcatacattgctcgatgag

SEQ ID NO: 59391 - DNA, 3244 bp, Zea Mays
atgacggtcatgatgataagcgccgcagggggacaggaggcggtgggggaggaggtggaaggtgccacgggaggagcaactcggttcggtcctcggtcggatcgttttgataacgatcgcagccgcaccgccactacatgggaaatgaggaggatgcgggagaggaggtggaaggcgtcacaagaggagttgctcgattcggtccttggccagatcttatcaatcgacggctacagccgcaccgctgagagtgtaacagttgtcaacaatacattagtgaatggtacagaaactactggcacgtcaactatatctacacccagcttgcatgatcttcaagtgtatggtgttattgtgactatactgctgtgttttattgtgtttggtggtgtcaaaatcatcaacaaggttgcacctgctttcttaataccagtcctgttctctttgctgtgcatttatcttggtgtcttcattgcaccaaggcataatgctccaagggggatcactgggttgagtataaccacattgaaagacaattggggtgaagactatcaacgtacaaacaatgctggcgttcctgatccaagtggatcaatatattgggatttcaatgctctggtaggtctctttttcccagcggtcactggaattatggctggctcaaaccgatctgcctcactgaaagatacacagcgttcaataccaatcggcacattatatgcaactcttacaacaactgccatgtatctattctctgtgcttctatttggagccttggctacacgggaggagcttctaactgataggctccttactgctacggtggcttggcctgctcctgcagtgatttacattggtattattctgtccaccttaggtgcagcactgcagagtttgactggggctccaaggttgcttgcagcaattgctaatgatgacattcttcctgttcttaattacttcaaagtttctgagggatctgagccgcatgcggccactttattcacggccttcatctgtatttgctgtgttgttattggaaacttggatttgattacacccacgatcacaatgtttttccttctgtgctatgctggcgtgaacctgtcatgctttctgcttgatctccttgatgctcctagttggcgccccagatggaaatttcaccattggagcctttcacttgttggggcattgttctgtgttggtatggttcttaatacttttaccattttattttgttttatcacaatcttcagcatgaacagttgatacttgagttaggtccttggtttgagactttgtccacttctattatttttaatctaaccaccttctcttcacctacaatactcaattattatttatcatgttttacaatagcaaatatctaactgaaacagccatgaaagcatttataattataagtgttgacatgaatctttgtatcaatttcagtgattatgtttctgatctcctggtctttcactgttgtctcccttgcccttgcaagcctcatctattactatgtgagcataaaagggaaggctggagactggggagatgggttcaaaagtgcatactttcaattggcactccgaagtctcagatcactcggagcaaaccaagtccatcctaagaattggtaccccattcctctgatattctgccgtccatggggcaaactgccggaaaatgttccttgtcatccaaaacttgcagactttgctaattgtatgaagaagaaaggccgtggtatgtccatttttgtctctataattgatggtgattatcatgaactagctgaggatgcaaagactgcctgccgccaattggatgcttacattgactacaagcgctgtgagggtgttgcggagatcattgtagctcctactatgtctgacggcttccgcagcatcgtgcagacaatgggcctaggaaacttgaagccaaacattgttgtgatgcggtaccctgagatctggaggcgtgagaatttgacacagataccgtcaacatttgtcagcataataaatgattgcattattgctaacaaggcagtagtcattgtgaagggactcgatgagtggcctaatgagtaccagcgtcagtatgggactattgacctctactggattgtaagggatggaggattgatgcttcttctgtcccaactcctgctgacaaaggagagctttgagagctgtaagatccaagtcttctgcatatctgaagaggataccgacgcagaggagctgaaagctgatgtcaaaaagttcttgtatgatcttaggatgcaagctgaggtcattgttgtcactatgaaatcatgggagtcacacatggagagcagcagtagcggtgttcagcaggataactcccatgaggcttacacaagtgcacagcaaaggatcgaaacataccttgacgagatgaaggaaactgctcaaagagaaaggcagccactaaaggagaatgggaggcaagttgttgtgaatgaacagaaggttgataaattcctttacacaatgttgaaattgaactccacgatactcaggtactccagaatggcagctgtagttcttgtgagccttccaccaccaccactaaatcatcctgcatatttctacatggagtacatggatttgcttgtagagaatgtcccacgcatgttaatagttaggggatatacgagagatgttgtcacatttttcacatgattatacatataatataaacttcccacctggagactctagtgtcgtctggctgttgtactatcttagcagagactggttacacaagattcaagcgtggattctgccatcgaaatgacaagccctcaccttgaaggcaaccatgatgagatgtcaaatgtcaagggctcttgttcgggcttattgggttcgtgaactactgaactgcagtgtcttcattcttttctggattttaaagatccacatagcgagctttgattcttacagattttgtagtcatcatatgtaaacacttaccatctagtaagcatacttacatgctgccccaatgacagaatgcgatccttaccttctcacaaacatttatatatgtattttctttgcatcacttaagtccatctaaaacttatggacctgtggagatgagcagagagccagagatgcgaattttgaatggctacccccaacaaatgaattttggttgtgctctgtcgcaaattcttggttttcatacattgctcgatgag

SEQ ID NO: 59392 - DNA, 2938 bp, Zea Mays
atgacggtcatgatgataagcgccgcagggggacaggaggcggtgggggaggaggtggaaggtgccacgggaggagcaactcggttcggtcctcggtcggatcgttttgataacgatcgcagccgcaccgccactacatgggaaatgaggaggatgcgggagaggaggtggaaggcgtcacaagaggagttgctcgattcggtccttggccagatcttatcaatcgacggctacagccgcaccgctgagagtgtaacagttgtcaacaatacattagtgaatggtacagaaactactggcacgtcaactatatctacacccagcttgcatgatcttcaagtgtatggtgttattgtgactatactgctgtgttttattgtgtttggtggtgtcaaaatcatcaacaaggttgcacctgctttcttaataccagtcctgttctctttgctgtgcatttatcttggtgtcttcattgcaccaaggcataatgctccaagggggatcactgggttgagtataaccacattgaaagacaattggggtgaagactatcaacgtacaaacaatgctggcgttcctgatccaagtggatcaatatattgggatttcaatgctctggtaggtctctttttcccagcggtcactggaattatggctggctcaaaccgatctgcctcactgaaagatacacagcgttcaataccaatcggcacattatatgcaactcttacaacaactgccatgtatctattctctgtgcttctatttggagccttggctacacgggaggagcttctaactgataggctccttactgctacggtggcttggcctgctcctgcagtgatttacattggtattattctgtccaccttaggtgcagcactgcagagtttgactggggctccaaggttgcttgcagcaattgctaatgatgacattcttcctgttcttaattacttcaaagtttctgagggatctgagccgcatgcggccactttattcacggccttcatctgtatttgctgtgttgttattggaaacttggatttgattacacccacgatcacaatgtttttccttctgtgctatgctggcgtgaacctgtcatgctttctgcttgatctccttgatgctcctagttggcgccccagatggaaatttcaccattggagcctttcacttgttggggcattgttctgtgttgcctcatctattactatgtgagcataaaagggaaggctggagactggggagatgggttcaaaagtgcatactttcaattggcactccgaagtctcagatcactcggagcaaaccaagtccatcctaagaattggtaccccattcctctgatattctgccgtccatggggcaaactgccggaaaatgttccttgtcatccaaaacttgcagactttgctaattgtatgaagaagaaaggccgtggtatgtccatttttgtctctataattgatggtgattatcatgaactagctgaggatgcaaagactgcctgccgccaattggatgcttacattgactacaagcgctgtgagggtgttgcggagatcattgtagctcctactatgtctgacggcttccgcagcatcgtgcagacaatgggcctaggaaacttgaagccaaacattgttgtgatgcggtaccctgagatctggaggcgtgagaatttgacacagataccgtcaacatttgtcagcataataaatgattgcattattgctaacaaggcagtagtcattgtgaagggactcgatgagtggcctaatgagtaccagcgtcagtatgggactattgacctctactggattgtaagggatggaggattgatgcttcttctgtcccaactcctgctgacaaaggagagctttgagagctgtaagatccaagtcttctgcatatctgaagaggataccgacgcagaggagctgaaagctgatgtcaaaaagttcttgtatgatcttaggatgcaagctgaggtcattgttgtcactatgaaatcatgggagtcacacatggagagcagcagtagcggtgttcagcaggataactcccatgaggcttacacaagtgcacagcaaaggatcgaaacataccttgacgagatgaaggaaactgctcaaagagaaaggcagccactaaaggagaatgggaggcaagttgttgtgaatgaacagaaggttgataaattcctttacacaatgttgaaattgaactccacgatactcaggtactccagaatggcagctgtagttcttgtgagccttccaccaccaccactaaatcatcctgcatatttctacatggagtacatggatttgcttgtagagaatgtcccacgcatgttaatagttaggggatatacgagagatgttgtcacatttttcacatgattatacatataatataaacttcccacctggagactctagtgtcgtctggctgttgtactatcttagcagagactggttacacaagattcaagcgtggattctgccatcgaaatgacaagccctcaccttgaaggcaaccatgatgagatgtcaaatgtcaagggctcttgttcgggcttattgggttcgtgaactactgaactgcagtgtcttcattcttttctggattttaaagatccacatagcgagctttgattcttacagattttgtagtcatcatatgtaaacacttaccatctagtaagcatacttacatgctgccccaatgacagaatgcgatccttaccttctcacaaacatttatatatgtattttctttgcatcacttaagtccatctaaaacttatggacctgtggagatgagcagagagccagagatgcgaattttgaatggctacccccaacaaatgaattttggttgtgctctgtcgcaaattcttggttttcatacattgctcgatgag

SEQ ID NO: 59393 - DNA, 2096 bp, Zea Mays
gagtctttgtcccatccaacatctcgatccatcccagcatcatccccacaattgaggcgattgaagcagaaaaaatcaatcgcgttccccagcacggggcagggagcggaggggaacgccgccacgcaggcggagttccccagagcggaggaagggttcgcctgctagggcacggtctcctgctgcgaagtcaagtgcgtcgcatagggacagggagaggtcgcctccgagggagaaggtgaaggagcgtgtcaggtcgccagagtctcctgctaaggtcagcctgttgcacaaggggagagagaggtcgtctcccagggagaaggcgaaggaccagcgggtcaggtcgccgaaacgtaagcaggagcagtcacgatcaccctcacctgctaggcgacacttctctaggtcgccctcgccgcgctccaagaggacgaggggagcgcagggtgagcgggaggcggtgcagtttactggcagtgatcgccggaaggcaagtcacagggaggagcaggatacactgaggcacagggagcatgatgaggggagggatgcttcaagagacaggaaagtggatcgggaggcagtgcatgtaacaaatggtgatcgccgcaagccctctcatggggaagagagggactcatggggcaagcacagggaacatgatgaagggagggttgcatcgatagataggaagtcggatcgagaggataccagaggtactgcaaaagataagaaatatgttcgtgatgatgagaaggatcattctagggagaggggggctgggagggatgataagtatggtgcttcaaaggtggcattgccggtctgggatgatgatagacatggaaggcctaatcggggtgactggaaatctgcttcttcaagggagcaaaggctggactctggtgacagaagggattcaacaagagtgaaaccaacagatcatgatgggagcaatgggggatcgggaaggtctttcaggcatggtcgttcaatgtctccagaagagcacaggcatcggggcaggcatgaatctcatccatcatcgagagtgtccagaagtgcagcacatatcgaggatattaactcgagaggaggtgaagcatcccggaatggagatcctgatgctttggcaacaatgaacgcaactgcagaagctcttgaagcaaaagaaaagcaaaagccatcgtttgaattgtctggaaagcttgctgaggagaccaacagagttgcaggtgtaaatctattatattcagaacccccagaggctcgaaagtcagagattagatggaggctctatgtatttaaagatggtgaaccactgaatgaaccactgtatgttcatcggatgacctgctacctttttggaagagaaaggaaagttgcagatgtccccacagatcatccctcctgcagcaagcaacatgcagttcttcaatacagacttgtggagaaggagcaactagatggcatgatgacaaagaaaataaggccttatctgatggatcttgatagtacaaatggaactttcatcaatggaaatcgcattgagcctcggcgatattatgagttatttgaaaaggacacaatcaagtttggcaatagtagccgggagtatgttttgctccacgaaaattcaacagaatgagttttgagaaaattcaacagaatgaggattgaaacaatcagccttttatgctgtagaagaaaaatacagcaaaaacatgaggttttgcatgttttaaaatttttagactggagattggccggcttgaacttctggtctgtgatttcttcacgtgttcaagtctataaggatattttgtgaaccaacatgtagtgctattgtaatgaaaagagctagctgcctgtagcagatagccctggggtattgtttgtattcaagcatgttttgcaccgctggcattcacatcattcggtatcggaggcagctgtttatggatcaatgccatagtaatcttaatgagttaatcatggatttactagttcgataatttaaactttatcacagatgtgtccacctttcaatatatactacgccgtctttccctaggggagtgtaggggagaacg

SEQ ID NO: 59394 - DNA, 2177 bp, Zea Mays
gagtctttgtcccatccaacatctcgatccatcccagcatcatccccacaattgaggcgattgaagcagaaaaaatcagtcgccgtagcagcgccgcctccgccgccgtggggaggtagcatctaggcccattccgccgcctccatctccggccagcaatggcttcggcggtggagcggcggagggaggagcacgcgcggagatcgcgttccccagcacggggcagggagcggaggggaacgccgccacgcaggcggagttccccagagcggaggaagggttcgcctgctagggcacggtctcctgctgcgaagtcaagtgcgtcgcatagggacagggagaggtcgcctccgagggagaaggtgaaggagcgtgtcaggtcgccagagtctcctgctaaggtcagcctgttgcacaaggggagagagaggtcgtctcccagggagaaggcgaaggaccagcgggtcaggtcgccgaaacgtaagcaggagcagtcacgatcaccctcacctgctaggcgacacttctctaggtcgccctcgccgcgctccaagaggacgaggggagcgcagggtgagcgggaggcggtgcagtttactggcagtgatcgccggaaggcaagtcacagggaggagcaggatacactgaggcacagggagcatgatgaggggagggatgcttcaagagacaggaaagtggatcgggaggcagtgcatgtaacaaatggtgatcgccgcaagccctctcatggggaagagagggactcatggggcaagcacagggaacatgatgaagggagggttgcatcgatagataggaagtcggatcgagaggataccagaggtactgcaaaagataagaaatatgttcgtgatgatgagaaggatcattctagggagaggggggctgggagggatgataagtatggtgcttcaaaggtggcattgccggtctgggatgatgatagacatggaaggcctaatcggggtgactggaaatctgcttcttcaagggagcaaaggctggactctggtgacagaagggattcaacaagagtgaaaccaacagatcatgatgggagcaatgggggatcgggaaggtctttcaggcatggtcgttcaatgtctccagaagagcacaggcatcggggcaggcatgaatctcatccatcatcgagagtgtccagaagtgcagcacatatcgaggatattaactcgagaggaggtgaagcatcccggaatggagatcctgatgctttggcaacaatgaacgcaactgcagaagctcttgaagcaaaagaaaagcaaaagccatcgtttgaattgtctggaaagcttgctgaggagaccaacagagttgcaggtgtaaatctattatattcagaacccccagaggctcgaaagtcagagattagatggaggctctatgtatttaaagatggtgaaccactgaatgagaaaggaaagttgcagatgtccccacagatcatccctcctgcagcaagcaacatgcagttcttcaatacagacttgtggagaaggagcaactagatggcatgatgacaaagaaaataaggccttatctgatggatcttgatagtacaaatggaactttcatcaatggaaatcgcattgagcctcggcgatattatgagttatttgaaaaggacacaatcaagtttggcaatagtagccgggagtatgttttgctccacgaaaattcaacagaatgagttttgagaaaattcaacagaatgaggattgaaacaatcagccttttatgctgtagaagaaaaatacagcaaaaacatgaggttttgcatgttttaaaatttttagactggagattggccggcttgaacttctggtctgtgatttcttcacgtgttcaagtctataaggatattttgtgaaccaacatgtagtgctattgtaatgaaaagagctagctgcctgtagcagatagccctggggtattgtttgtattcaagcatgttttgcaccgctggcattcacatcattcggtatcggaggcagctgtttatggatcaatgccatagtaatcttaatgagttaatcatggatttactagttcgataatttaaactttatcacagatgtgtccacctttcaatatatactacgccgtctttccctaggggagtgtaggggagaacg

SEQ ID NO: 59395 - DNA, 2219 bp, Zea Mays
gagtctttgtcccatccaacatctcgatccatcccagcatcatccccacaattgaggcgattgaagcagaaaaaatcagtcgccgtagcagcgccgcctccgccgccgtggggaggtagcatctaggcccattccgccgcctccatctccggccagcaatggcttcggcggtggagcggcggagggaggagcacgcgcggagatcgcgttccccagcacggggcagggagcggaggggaacgccgccacgcaggcggagttccccagagcggaggaagggttcgcctgctagggcacggtctcctgctgcgaagtcaagtgcgtcgcatagggacagggagaggtcgcctccgagggagaaggtgaaggagcgtgtcaggtcgccagagtctcctgctaaggtcagcctgttgcacaaggggagagagaggtcgtctcccagggagaaggcgaaggaccagcgggtcaggtcgccgaaacgtaagcaggagcagtcacgatcaccctcacctgctaggcgacacttctctaggtcgccctcgccgcgctccaagaggacgaggggagcgcagggtgagcgggaggcggtgcagtttactggcagtgatcgccggaaggcaagtcacagggaggagcaggatacactgaggcacagggagcatgatgaggggagggatgcttcaagagacaggaaagtggatcgggaggcagtgcatgtaacaaatggtgatcgccgcaagccctctcatggggaagagagggactcatggggcaagcacagggaacatgatgaagggagggttgcatcgatagataggaagtcggatcgagaggataccagaggtactgcaaaagataagaaatatgttcgtgatgatgagaaggatcattctagggagaggggggctgggagggatgataagtatggtgcttcaaaggtggcattgccggtctgggatgatgatagacatggaaggcctaatcggggtgactggaaatctgcttcttcaagggagcaaaggctggactctggtgacagaagggattcaacaagagtgaaaccaacagatcatgatgggagcaatgggggatcgggaaggtctttcaggcatggtcgttcaatgtctccagaagagcacaggcatcggggcaggcatgaatctcatccatcatcgagagtgtccagaagtgcagcacatatcgaggatattaactcgagaggaggtgaagcatcccggaatggagatcctgatgctttggcaacaatgaacgcaactgcagaagctcttgaagcaaaagaaaaggtgcaaaagccatcgtttgaattgtctggaaagcttgctgaggagaccaacagagttgcaggtgtaaatctattatattcagaacccccagaggctcgaaagtcagagattagatggaggctctatgtatttaaagatggtgaaccactgaatgaaccactgtatgttcatcggatgacctgctacctttttggaagagaaaggaaagttgcagatgtccccacagatcatccctcctgcagcaagcaacatgcagttcttcaatacagacttgtggagaaggagcaactagatggcatgatgacaaagaaaataaggccttatctgatggatcttgatagtacaaatggaactttcatcaatggaaatcgcattgagcctcggcgatattatgagttatttgaaaaggacacaatcaagtttggcaataccgggagtatgttttgctccacgaaaattcaacagaatgagttttgagaaaattcaacagaatgaggattgaaacaatcagccttttatgctgtagaagaaaaatacagcaaaaacatgaggttttgcatgttttaaaatttttagactggagattggccggcttgaacttctggtctgtgatttcttcacgtgttcaagtctataaggatattttgtgaaccaacatgtagtgctattgtaatgaaaagagctagctgcctgtagcagatagccctggggtattgtttgtattcaagcatgttttgcaccgctggcattcacatcattcggtatcggaggcagctgtttatggatcaatgccatagtaatcttaatgagttaatcatggatttactagttcgataatttaaactttatcacagatgtgtccacctttcaatatatactacgccgtctttccctaggggagtgtaggggagaacg

SEQ ID NO: 59396 - DNA, 2179 bp, Zea Mays
gggcccctcttaacactggctggtataggcactggcgggtggtggcatttggattatcctaatcctcccacgaggacaagagaagccactgccagtgcctccatggctacttaaagcccccccccttcagttcttcttcctcggtgcatttgcaagcgttaggaaagggagaagagaaaggaattaatggaacgtgaagaggagctgccttcatcttcttcttccttgggttacatgatgcagtgcagggtctgccatgaggaagaggatcaagggcgtgcgaccatggagtctccttgtggatgctccggctctctcaagtacgctcacaggggatgtgtgcagagatggtgtgacgagaaggggagcaccctctgtgagatctgccttcagaatttcaagccaggctacacaatgcctcccaagaaaaccccggtggttgaaacggcggtcactatcagtgaacacgaggacatgcaacatttggaacctccggagggcttggttgacggtgcagattacaccaggtgctcctacgccgcagatcaatgcgccacatggtgccggtcgctggcgatcacgttcaccattgtgacgctcgcatggcatctggttgcagtggcgacggctgaagcagcagagcactgcgcgttcagtctcctcacaatgtacttacttcgtgctgctggtatcctgctgccgctctaccttgtcatgcgaatgattggcgtcgtccaaagtgggcagaggcagtaccggttgcagctgctggaggaacaaagaagaaatgcatcaactatatgaattatatgcgtgtccaggaagaggaccagctagtaattaatattcattagccaattcatttaaataaatcttatggaaggttgtattaatgggaaaactttcaaacagaacatcatttgtaaactttcagtatacatacagttggtgcagtgaaacagcagcattttatccctgcttttcgcaatggcgttcagattctgggttgcatgaaaaaaaatatcccttgctatgtaggtgctgcagggaatgttcaaacagaacattatcgcatatcttcaataagaatgtaaagttacacttatttgcttttggtttttctcagtagaaaaagaagaatataggctcaaataaggagaagataaaatggagtcaagttaacacattcatatttatcaatttttcacagatgatattggtggtatcaaggagatgattttaatctagcaagtcaataatttagagggaaaatcctaatataacctcaaggaacgaagaaaagaaaaacataactaatagagcaccgtgcttcatctccattccagtggcaagtggagaaactaagcaagatgacaacctcaaataataaaatgatgtcagtcaattatacagggaagaaacaatttactgctatctcgcttgtactctggacacacagtttctgtgtgttagaaaaatcatgcgtccaggatgtcagatattttttgacataaattaggataatacattaatccaggtcaggtttcacatgcttatgtatttattcacgtgaaatacacaagtgcagtctgtcgaaggaccacgggagtactaaaagaagtaaagaactcaatgaccagcagatgcagttcagacgcaaagattcgaaccaaatgaacagtcggatcttgtgcaaaattcaggcccagagtcatgtcattctcatttctttcagttttatcctactaatctagtgatccaaacagattaattatgagcgaagcaatagaaaacaagatttgcagactgcagatataagaattaactaagagcagggattggaacatagaaaattgagttcaccaaacataataaccataccaaagtcacaaaatggtgaagcagtgcccagagtcacgggagctaacaaactcaatagtagatatttgttagcctcataccagcagagtgccatgctggaaacacccagcacatggtagaccaaaagatttgcatgtgctgcatgcaatacatttattaaggtttgttgtcttgtacccttgtttaaatctagttacaggaataccgagtataagaagacagaagagcatttcaataatgtacaattcgatggaactgaaagtttgatgggaagtaaaattactaacatgttagtgat

SEQ ID NO: 59397 - DNA, 2095 bp, Zea Mays
aatcctcccacgaggacaagagaagccactgccagtgcctccatggctacttaaagcccccccccttcagttcttcttcctcggtgcatttgcaagcgttaggaaagggagaagagaaaggaattaatggaacgtgaagaggagctgccttcatcttcttcttccttgggttacatgatgcagtgcagggtctgccatgaggaagaggatcaagggcgtgcgaccatggagtctccttgtggatgctccggctctctcaagagatggtgtgacgagaaggggagcaccctctgtgagatctgccttcagaatttcaagccaggctacacaatgcctcccaagaaaaccccggtggttgaaacggcggtcactatcagtgaacacgaggacatgcaacatttggaacctccggagggcttggttgacggtgcagattacaccaggtgctcctacgccgcagatcaatgcgccacatggtgccggtcgctggcgatcacgttcaccattgtgacgctcgcatggcatctggttgcagtggcgacggctgaagcagcagagcactgcgcgttcagtctcctcacaatgtacttacttcgtgctgctggtatcctgctgccgctctaccttgtcatgcgaatgattggcgtcgtccaaagtgggcagaggcagtaccggttgcagctgctggaggaacaaagaagaaatgcatcaactatatgaattatatgcgtgtccaggaagaggaccagctagtaattaatattcattagccaattcatttaaataaatcttatggaaggttgtattaatgggaaaactttcaaacagaacatcatttgtaaactttcagtatacatacagttggtgcagtgaaacagcagcattttatccctgcttttcgcaatggcgttcagattctgggttgcatgaaaaaaaatatcccttgctatgtaggtgctgcagggaatgttcaaacagaacattatcgcatatcttcaataagaatgtaaagttacacttatttgcttttggtttttctcagtagaaaaagaagaatataggctcaaataaggagaagataaaatggagtcaagttaacacattcatatttatcaatttttcacagatgatattggtggtatcaaggagatgattttaatctagcaagtcaataatttagagggaaaatcctaatataacctcaaggaacgaagaaaagaaaaacataactaatagagcaccgtgcttcatctccattccagtggcaagtggagaaactaagcaagatgacaacctcaaataataaaatgatgtcagtcaattatacagggaagaaacaatttactgctatctcgcttgtactctggacacacagtttctgtgtgttagaaaaatcatgcgtccaggatgtcagatattttttgacataaattaggataatacattaatccaggtcaggtttcacatgcttatgtatttattcacgtgaaatacacaagtgcagtctgtcgaaggaccacgggagtactaaaagaagtaaagaactcaatgaccagcagatgcagttcagacgcaaagattcgaaccaaatgaacagtcggatcttgtgcaaaattcaggcccagagtcatgtcattctcatttctttcagttttatcctactaatctagtgatccaaacagattaattatgagcgaagcaatagaaaacaagatttgcagactgcagatataagaattaactaagagcagggattggaacatagaaaattgagttcaccaaacataataaccataccaaagtcacaaaatggtgaagcagtgcccagagtcacgggagctaacaaactcaatagtagatatttgttagcctcataccagcagagtgccatgctggaaacacccagcacatggtagaccaaaagatttgcatgtgctgcatgcaatacatttattaaggtttgttgtcttgtacccttgtttaaatctagttacaggaataccgagtataagaagacagaagagcatttcaataatgtacaattcgatggaactgaaagtttgatgggaagtaaaattactaacatgttagtgat

SEQ ID NO: 59398 - DNA, 901 bp, Zea Mays
tgacaatggcaaactgaaaaaggtagcagttctccttagtaatcaaatttcaagcaccatcacagcatgccacattcctgctggcagcatagtaatcttagaacattctattaccaatctgaaggtacatttctcttcacccgactcttcattctatctgcccactgatagaacacattagatacatctaatttcccagcaaatttcactttctgagccaactcaaacaatatatctggtttcccagcctttgagaaatctgcagcaaacttattatagtctatttgtggagctttcatccctttattaatcatctcctcgatatatttatatgcctcctctggcctgccatgtcgtatatgcccattaatgaacactgtgtaagagttcacatcagggcaaatacccctctggtgcatctcctcccacactgcacaacccattgcatagttgctatcaccaacgaaatatgacttcatcatcatgttgtaagtatggattgtgggctcaagtcccttcttgatcatcttcttgtatatccttgcagcatcgtctggcatattcctatttgttagcaacttaatcagtgcattgtaagtccgagcatcaggggggcatcccttctgtgtcatctcctccaacacagcagtcactctgtccatttgttttgcattcccatatccaaccagcaaacatgtataggtagcaacatctggttggcatttagcctcctgcatctcctcaaagcactccattgccatgtccatcttcccctgcttacaatggtcacggattaacattgtgtaagtccacacatttggtggaggcccctttgccttcatcagctcaaacatcttcacggcctcgggtcgcctctgcccacgcagcaacccctcaatca

SEQ ID NO: 59399 - DNA, 2153 bp, Zea Mays
acgagtccacgcattccgctacccttgggccgaacagtcggccccgcggccgcgaggtagcgcccaaccaccccgcttgtcctcggctccctcttgaagagcgtgccccccgcctcataaataaacatcgggcaaaacaagcaaagtgaagaaagctgccggcctgccgctgcctgctcgcagttgccagcccccgccgccgcggaggacggaaggaagcgaatcaaccgcgactgtctccgacgggaataaagcaggcgggcgcaggtcgccgcggtcttcgcgctcgccgcactgctgggggtctccgtgctctacgacaacgcccacatcgccgcctcgctgcggaggcacggcggcccgaggacgtacgccaagctctcctccttcgaaggcgccaccgctgtccccagcatcgccaaggaagaggcggcggcggcggtggcgcgggcaacggagtcggtgccggtgcacggcgcggatcgggccgactcgcccccgcacgagcggcaggaggagatcgaggagcgcgcatcgaagcctggagcgacggccgggagctccctgcaggacgcgccgctaatcgaggaggtggtgcaaggaggaagcggaggccacgacggcgacggcgacggcgacggcggcgcgcaggcgcaggagcagcccccggccccggggacctgcgacctgtacaagggccgctgggtgtacgacgagtcccgcgcgccgctgtacaaggagtccgactgcagcttcctcacggagcaggtcacctgtatgcgcaacggccgacgcgacgacgactatcagaagtggcgctggcagcccgacggctgcgatctccccagatttgaagctaagttgcttctggagaagctaaggaacaaaaggctgatgtttgtgggggattccctgaatcggaaccagtgggagtccatggtgtgcctggtccagtcagaggctccatgggacaaaaagtcccttgtcaagaatggttctcttaatgtgttccatcttcaggagtacaatgcaacggttgagttctattggtctcctttcctagtggagtcgaactcagatgacccagacattcatagcatcagtgaccgcatgatcaagccgacatcgatcgctaagcatgcggcgaactgggaaggggtggactacctgatcttcaacacttacatctggtggatgaacacgccacagatgaaaactctgcacggtggatctttttcgaggaaacatgtcaagtatgacgaaatcgaacgtgtggaggcgtaccggaaggtcctcaagacatggtctagatgggtagaggcgcacgtagatcccaagagaacaacggtcttattcatgagcgtgtcaccagtacatatgcagagcgaaggttggggcagccccaacgccgtaaaatgcttctccgagacacagccggcgatcagctacaataagaaactggaggtgggcacggactgggacctcttcgcgaccgcccagcgcgtgacgaggtcgatgaagaaggtacccgtgcacttcgtcaacataactgcgctgtcggagatccgcaaggacgcgcacacctccgtgcacacgctgcggcaggggaagctcctgacgccggagcagaaggcgaacccgaggaagttcgcggactgcatccactggtgcctccccggtgtgccggacacgtggaacgagtttgtttatggccatatcgtgtcgagcaccccgccgccgcagcagcagcagcagcagaagataaccgaggatgaacctcacagatgacggctagaaaatacttcacatggtagcgcaattttagtgagagaagaagatttgtgatcgaggccataagttatttttttttgtctgttctaggtttagaagcctatgctatgctgctggttcacctaagcatttgttggaaggtaacaccaagcagccgtgaacagccacggtcacctgaggagccttctcgcagtgtctggatgtggttgtttgagcctctgaggggaaatgccctgcgcgcttctgtgcttctcgtgtttctacctggcaaccacgtgcacataattttaccagaatccgattgtttccattcgtgtagcagtatttctctataaaatgccagaaagtttcagtcaagattt

SEQ ID NO: 59400 - DNA, 745 bp, Zea Mays
tcaaattcccatccctagctgggcaactccctctgccctgtggccctagccgtcatctcactcacgtttcgccgtgtggaccccagtggtcaggccgacgcttccttcttcctcggatcgtgggacgccgacttccgcgcgccataccaaccgcgcgagaaccgcgggctctggaggatccacgacttcccctcacgattcatccgctcgggagataaatactctctcggagactcgaaaagctacacgcacctgtctctctgccatcaccaggacctgtgagcgagtgaagccctgccgtcgccactatccttcgccggcgacgtggctagacttccgtggtgaaacccgagtgcctattgggtgcagaaaggcttcagctccaccgatttggcgaatcttgcctcggggttcctcgtcgtagttactcctccgtcgcggaagtcgctgtacagcgtggccagtcgtcgccccagcccttggacgagcaagccaccgaggacccaggtgttcagcacgtggagactgctgagcaggagctcgttgaaggcaagttgtgtcattgatcacttctatttacctaataatgttcctgttaatcattatgatctgcatatgttaattttgatgggacccaatatgtcaccctagtttggctatctttgtaccttgtttaccactgaacttttggatagtacttgctattgttttacgtggttttgggtattgagatacacattattca

SEQ ID NO: 59401 - DNA, 1723 bp, Zea Mays
tcctatcttttcttttctttcttcgtcgctactagcgacatacgagcgccaccttatcggttcccctctctggccctcccggcctcactcaccagcatcggctcttcagtcttcaccatggccgccgcccacctcctcgccgctttgtcctcctccaccgccttgcgccctcctctccgcctccgttctccacagcatccaccacatatccgcttcaactgtactgggaggcggccgttcccggtggtacgcgcggctgagaccgacgccaaaaacggcgaacgccaaggccccgaataaggcacccgcggcggatggctccagtttcaaccagctgctcggtatcaagggtgctaagcaagagagcgacatatggaagatccgtcttcaacttactaagccggtgacatggcctccgcttgtttggggagttctctgtggagcagctgcctctggaaatttccactggacagttgaagatgtcgcaaaatctattgtatgcatgataatgtctggtccatgccttacaggatacacacagacacttaatgactggtatgatcgagacattgatgcaattaatgagccttatcggcctattccatcaggtgctatatcagaaaacgaggtaataacccagatctgggtgctattgctaggagggcttggattgggtgctttgttagatgtgtgggcaggacatgattttcctattgtgttttatcttgctgtgggtggctccttactttcttacatatattcagcaccacctctcaagctcaagcagaatggatggattgggaacttcgctctgggtgcgagttacatcagcttgccctggtgggctggccaggcgttatttggaactcttacaccagatatcattgtcttgactactttgtacagcatagctgggctagggattgctattgtaaatgatttcaagagtattgaaggggataggactctggggcttcagtcacttcctgttgcttttgggatggaaactgcaaaatggatttgtgttggagcaattgatatcactcaattatctgttgcaggttacctattgagcaccggtaagctgtattatgccctggtgttgcttgggctaacaattcctcaggtgttctttcagttccagtacttcctgaaggaccctgtgaagtatgatgtcaaatatcaggcaagcgcacaaccattcttcgtactgggcctactggtgacagcactggcaaccagccattaatgaaggcaaacttaaacagaacgagcaaccgttctgataccgaagaggcacgtctggtgaccattaataagctagctgcttgtgtgcagggtaggaagagaacgtctttttacttgtagaacacagatcgattttgtaagggttatgtggtgggaggaaaagttagcaatagcactggatgttgttgtagtaggatctgtagttgcacggtaagatcgttacttcgccattgttagcggttgaactggcaatgctttgaacaaacagttttgtgtatcggccgtattgttgtatgatcaaccctggaagattgtacaacctccgttctgagtatttgcacctcgttctcgagtatttgtatttttcgtctgttagcacgtggataccatgtatgttgttcgacaacaattagttgtctactggactggtgcactagatccattatatatatatggagcttaagctctttcaaac

SEQ ID NO: 59402 - DNA, 1724 bp, Zea Mays
tcctatcttttcttttctttcttcgtcgctactagcgacatacgagcgccaccttatcggttcccctctctggccctcccggcctcactcaccagcatcggctcttcagtcttcaccatggccgccgcccacctcctcgccgctttgtcctcctccaccgccttgcgccctcctctccgcctccgttctccacagcatccaccacatatccgcttcaactgtactgggaggcggccgttcccggtggtacgcgcggctgagaccgacgccaaaaacgcgaaggcgaacgccaaggccccgaataaggcacccgcggcggatggctccagtttcaaccagctgctcggtatcaagggtgctaagcaagagagcgacatatggaagatccgtcttcaacttactaagccggtgacatggcctccgcttgtttggggagttctctgtggagcagctgcctctggaaatttccactggacagttgaagatgtcgcaaaatctattgtatgcatgataatgtctggtccatgccttacaggatacacacagacacttaatgactggtatgatcgagacattgatgcaattaatgagccttatcggcctattccatcaggtgctatatcagaaaacgaggtaataacccagatctgggtgctattgctaggagggcttggattgggtgctttgttagatgtgtgggacatgattttcctattgtgttttatcttgctgtgggtggctccttactttcttacatatattcagcaccacctctcaagctcaagcagaatggatggattgggaacttcgctctgggtgcgagttacatcagcttgccctggtgggctggccaggcgttatttggaactcttacaccagatatcattgtcttgactactttgtacagcatagctgggctagggattgctattgtaaatgatttcaagagtattgaaggggataggactctggggcttcagtcacttcctgttgcttttgggatggaaactgcaaaatggatttgtgttggagcaattgatatcactcaattatctgttgcaggttacctattgagcaccggtaagctgtattatgccctggtgttgcttgggctaacaattcctcaggtgttctttcagttccagtacttcctgaaggaccctgtgaagtatgatgtcaaatatcaggcaagcgcacaaccattcttcgtactgggcctactggtgacagcactggcaaccagccattaatgaaggcaaacttaaacagaacgagcaaccgttctgataccgaagaggcacgtctggtgaccattaataagctagctgcttgtgtgcagggtaggaagagaacgtctttttacttgtagaacacagatcgattttgtaagggttatgtggtgggaggaaaagttagcaatagcactggatgttgttgtagtaggatctgtagttgcacggtaagatcgttacttcgccattgttagcggttgaactggcaatgctttgaacaaacagttttgtgtatcggccgtattgttgtatgatcaaccctggaagattgtacaacctccgttctgagtatttgcacctcgttctcgagtatttgtatttttcgtctgttagcacgtggataccatgtatgttgttcgacaacaattagttgtctactggactggtgcactagatccattatatatatatggagcttaagctctttcaaac

SEQ ID NO: 59403 - DNA, 1397 bp, Zea Mays
gatgaagcgtgccctagtcatagaggaaacattccctctatggtgctccatgccaccgccacggtggtgtttgtcggtggtgtttgtcgccacctatgtcatgacatattttgctatggatgagagaaggaaatttccactggacagttgaagatgtcgcaaaatctattgtatgcatgataatgtctggtccatgccttacaggatacacacagacacttaatgactggtatgatcgagacattgatgcaattaatgagccttatcggcctattccatcaggtgctatatcagaaaacgaggtaataacccagatctgggtgctattgctaggagggcttggattgggtgctttgttagatgtgtgggcaggacatgattttcctattgtgttttatcttgctgtgggtggctccttactttcttacatatattcagcaccacctctcaagctcaagcagaatggatggattgggaacttcgctctgggtgcgagttacatcagcttgccctggtgggctggccaggcgttatttggaactcttacaccagatatcattgtcttgactactttgtacagcatagctgggctagggattgctattgtaaatgatttcaagagtattgaaggggataggactctggggcttcagtcacttcctgttgcttttgggatggaaactgcaaaatggatttgtgttggagcaattgatatcactcaattatctgttgcaggttacctattgagcaccggtaagctgtattatgccctggtgttgcttgggctaacaattcctcaggtgttctttcagttccagtacttcctgaaggaccctgtgaagtatgatgtcaaatatcaggcaagcgcacaaccattcttcgtactgggcctactggtgacagcactggcaaccagccattaatgaaggcaaacttaaacagaacgagcaaccgttctgataccgaagaggcacgtctggtgaccattaataagctagctgcttgtgtgcagggtaggaagagaacgtctttttacttgtagaacacagatcgattttgtaagggttatgtggtgggaggaaaagttagcaatagcactggatgttgttgtagtaggatctgtagttgcacggtaagatcgttacttcgccattgttagcggttgaactggcaatgctttgaacaaacagttttgtgtatcggccgtattgttgtatgatcaaccctggaagattgtacaacctccgttctgagtatttgcacctcgttctcgagtatttgtatttttcgtctgttagcacgtggataccatgtatgttgttcgacaacaattagttgtctactggactggtgcactagatccattatatatatatggagcttaagctctttcaaac

SEQ ID NO: 59404 - DNA, 1073 bp, Zea Mays
gtttgacacagtctatctgcaaaagtgtaataacccagatctgggtgctattgctaggagggcttggattgggtgctttgttagatgtgtgggcaggacatgattttcctattgtgttttatcttgctgtgggtggctccttactttcttacatatattcagcaccacctctcaagctcaagcagaatggatggattgggaacttcgctctgggtgcgagttacatcagcttgccctggtgggctggccaggcgttatttggaactcttacaccagatatcattgtcttgactactttgtacagcatagctgggctagggattgctattgtaaatgatttcaagagtattgaaggggataggactctggggcttcagtcacttcctgttgcttttgggatggaaactgcaaaatggatttgtgttggagcaattgatatcactcaattatctgttgcaggttacctattgagcaccggtaagctgtattatgccctggtgttgcttgggctaacaattcctcaggtgttctttcaggcaagcgcacaaccattcttcgtactgggcctactggtgacagcactggcaaccagccattaatgaaggcaaacttaaacagaacgagcaaccgttctgataccgaagaggcacgtctggtgaccattaataagctagctgcttgtgtgcagggtaggaagagaacgtctttttacttgtagaacacagatcgattttgtaagggttatgtggtgggaggaaaagttagcaatagcactggatgttgttgtagtaggatctgtagttgcacggtaagatcgttacttcgccattgttagcggttgaactggcaatgctttgaacaaacagttttgtgtatcggccgtattgttgtatgatcaaccctggaagattgtacaacctccgttctgagtatttgcacctcgttctcgagtatttgtatttttcgtctgttagcacgtggataccatgtatgttgttcgacaacaattagttgtctactggactggtgcactagatccattatatatatatggagcttaagctctttcaaac

SEQ ID NO: 59405 - DNA, 631 bp, Zea Mays
cttatgtctaacactgcatgtctgaaacatgaacaacgtagcggagttccagtacttcctgaaggaccctgtgaagtatgatgtcaaatatcaggcaagcgcacaaccattcttcgtactgggcctactggtgacagcactggcaaccagccattaatgaaggcaaacttaaacagaacgagcaaccgttctgataccgaagaggcacgtctggtgaccattaataagctagctgcttgtgtgcagggtaggaagagaacgtctttttacttgtagaacacagatcgattttgtaagggttatgtggtgggaggaaaagttagcaatagcactggatgttgttgtagtaggatctgtagttgcacggtaagatcgttacttcgccattgttagcggttgaactggcaatgctttgaacaaacagttttgtgtatcggccgtattgttgtatgatcaaccctggaagattgtacaacctccgttctgagtatttgcacctcgttctcgagtatttgtatttttcgtctgttagcacgtggataccatgtatgttgttcgacaacaattagttgtctactggactggtgcactagatccattatatatatatggagcttaagctctttcaaac

SEQ ID NO: 59406 - DNA, 1332 bp, Zea Mays
aattaagctaaataagatattttttatactattattagtaagatgctttactataaaaagaagttacagaatagaaataaattctactaataccatcatttcttatcctacaccccatccccataaatccataaatttaatataggcttatatgaattatatgaatttttattgagtgaagatccaaacggcccgtaagaaaagtttagaagaattgagaagggttaaaggctagtttgaaagccactagccctgccctccaatctctctggttctcctccagaactaaactagtcctaaaagttgaggatgacgacatgataattactaccacaatatgggagaaattaactagtgcagagcaggagatacaacaagcagataataacaaggaaccgccaaactttcattacactacttgattattgaggagtcgtgaaacaggctatcaaactacaaagccctgacgcgaacctgccatattgacgacttgacgacgtgactgattaagctaggatacccttctggaagcatacatgcatgctgctagctacattattatcattcagctactccaaagtagagagtagcactagctacggccaaggtacactacgcagacagctacgaacgctgcgtacgcacgcacgcgataggactacttggtgaacttggactcgtcgatgctgacgccctccctggcggcgcgctcgccgccggactcgtccgtggtgctcagaccgcccttcttccccatctcgctgtacccctgctgccccagctgctccctgcgagtctggcctccgcggctgcgccctgcaaacgtagaggcaatcactcagtacgtgcaagcaacatttcagaacatatcaggtagccacactactcgtgtaattaaagccaacgacagtgaattaacatatgcagatggttagccgcagtcggctatatataccttcggcgaggtgctcctgggcctcgacgctcttgccgccggtcccgccggggacgacggtctcgccctcgcgggccttgcggtccagctccttcctgctttcctgacctgacgccatatcgtcgcctgaactagctaggtcaccgaggtgcgcgcttggctagcttggatactctgctctcgaaacgtcggcggcgctacttgctatcggtgagtgttgtctggggctgtcgttgatgacgactactcagacccggtgtgccgcccttttatagcagctgatgggcggtgcgccgcaagggcaggcgccggcgcgtgtgcgccgacgcggacgctacgctgggacaccccgtgaagtcgttaccaccgcagcgcgc

SEQ ID NO: 59407 - DNA, 1860 bp, Zea Mays
ggacgctcagcatcccccgaatccccgatgtcccgatcccgcagtcccggactcccggtcccagtctccaaaccctatacgctatacccacttgccgcactggccatcctccggccccaccggccagtgatacgcactcctcccctcaaagccctagccagacgccgccgccgcacccgatctggctgcctcggtcgatttctaattctcctcgcgagcccaaaccctaaacctaaacctttcacccgccgccgccgccaccaccagcactgccactccgccaccaccgtcccgaagccccctcccagcgccatcgacttcatctcggattgaagcaatgtcgtcggacgatgaggtcagggaggagaaggagctcgacctctcctccaacgacgttgtcaccaagtacaaggctgccgccgaaatcctcaacaacgctctgaagattgttgtgtctcagtgcaagccaaaagtcaagattgttgacctttgcgagaagggcgactctttcataagagagcaaactgggaatgtttacaagaacgcaaagaggaagattgaaaggggtattgctttcccaacctgtgtatccgtcaatgacacagtttgccacttctcaccgcttgcaaccgatgatgccgttctggaagaaaatgacatggttaaaattgatatgggctgtcatattgatggctttattgctgtggtggcacatacacatgtaattacaaatgggcctgtcacaggaagggctggtgatgtgcttgctgctgccaacacagcagcagaagtcgcaatgcggcttgtgagacctgggaagaaaaataaggatgttactgaagcaattcagaaagttgctgctgcttatgattgcaaaattgtggaaggtgttcttagccatcaactgaaacaatttgtgattgatggtaacaaagttgtgctcagtgtctccaatgctgatacaaaggttgatgatgctgaatttgaagaaaatgaagtatatgcaatcgatattgtcaccagcactggggaggggaagcccaagttattggatgagaaacagaccaccatctacaaaagggccgtagacaagaattatcacttgaagatgaaagcgtcaaggtttattttcagtgagatcagccagaagttcccaatcatgccttttactgctagggcattagaagagaagcgtgcgcgtttaggcttggtggaatgcatgaaccatgaactattgcagccgtaccctgtacttcatgagaagccaggcgatcttgttgcacacataaagttcactgtgctgctgatgcccaatggatcagataagataacatcacatcctctacaggagttaaagcccaccaaatccattgaagacaatgcagagataaaggcatggcttgctttggggacgaaatcaaagaagaagggtggtgggaagaagaagaaaggcaagaaaggagatgcagcagaagcagatcccatggaggaggcgacaaacggtgctacaagccaagaataattctgatttttggaattactgccaccagcttttttcttgtttcttcgctgcatctgatggtgttatattacattcagttgtggaaaaattgagtactatttctagcttctaagaaatgaagcatcctattatcgcatctaatggcgcaaagataatcgacaaggcatgcccagtgttcgttctctgttcttcgtgacgacgctcgtcacttggatttttcggagttcctcccagcccggaaatttcttcctggacattgccaactgctgagatgtagcatccggatacaaatgttcgaattacgtatacaatgttactgtgtatgttttctcggctaa

SEQ ID NO: 59408 - DNA, 1411 bp, Zea Mays
atgtcgtcggacgatgaggtcagggaggagaaggagctcgacctctcctccaacgacgttgtcaccaagtacaaggctgccgccgaaatcctcaacaacgctctgaagattgttgtgtctcagtgcaagccaaaagtcaagattgttgacctttgcgagaagggcgactctttcataagagagcaaactgggaatgtttacaagaacgcaaagaggaagattgaaaggggtattgctttcccaacctgtgtatccgtcaatgacacagtttgccacttctcaccgcttgcaaccgatgatgccgttctggaagaaaatgacatggttaaaattgatatgggctgtcatattgatggctttattgctgtggtggcacatacacatgtaattacaaatgggcctgtcacaggaagggctggtgatgtgcttgctgctgccaacacagcagcagaagtcgcaatgcggcttgtgagacctgggaagaaattgtgctcagtgtctccaatgctgatacaaaggttgatgatgctgaatttgaagaaaatgaagtatatgcaatcgatattgtcaccagcactggggaggggaagcccaagttattggatgagaaacagaccaccatctacaaaagggccgtagacaagaattatcacttgaagatgaaagcgtcaaggtttattttcagtgagatcagccagaagttcccaatcatgccttttactgctagggcattagaagagaagcgtgcgcgtttaggcttggtggaatgcatgaaccatgaactattgcagccgtaccctgtacttcatgagaagccaggcgatcttgttgcacacataaagttcactgtgctgctgatgcccaatggatcagataagataacatcacatcctctacaggagttaaagcccaccaaatccattgaagacaatgcagagataaaggcatggcttgctttggggacgaaatcaaagaagaagggtggtgggaagaagaagaaaggcaagaaaggagatgcagcagaagcagatcccatggaggaggcgacaaacggtgctacaagccaagaataattctgatttttggaattactgccaccagcttttttcttgtttcttcgctgcatctgatggtgttatattacattcagttgtggaaaaattgagtactatttctagcttctaagaaatgaagcatcctattatcgcatctaatggcgcaaagataatcgacaaggcatgcccagtgttcgttctctgttcttcgtgacgacgctcgtcacttggatttttcggagttcctcccagcccggaaatttcttcctggacattgccaactgctgagatgtagcatccggatacaaatgttcgaattacgtatacaatgttactgtgtatgttttctcggctaa

SEQ ID NO: 59409 - DNA, 1515 bp, Zea Mays
atgtcgtcggacgatgaggtcagggaggagaaggagctcgacctctcctccaacgacgttgtcaccaagtacaaggctgccgccgaaatcctcaacaacgctctgaagattgttgtgtctcagtgcaagccaaaagtcaagattgttgacctttgcgagaagggcgactctttcataagagagcaaactgggaatgtttacaagaacgcaaagaggaagattgaaaggggtattgctttcccaacctgtgtatccgtcaatgacacagtttgccacttctcaccgcttgcaaccgatgatgccgttctggaagaaaatgacatgtgatatgggctgtcatattgatggctttattgctgtggtggcacatacacatgtaattacaaatgggcctgtcacaggaagggctggtgatgtgcttgctgctgccaacacagcagcagaagtcgcaatgcggcttgtgagacctgggaagaaaaataaggatgttactgaagcaattcagaaagttgctgctgcttatgattgcaaaattgtggaaggtgttcttagccatcaactgaaacaatttgtgattgatggtaacaaagttgtgctcagtgtctccaatgctgatacaaaggttgatgatgctgaatttgaagaaaatgaagtatatgcaatcgatattgtcaccagcactggggaggggaagcccaagttattggatgagaaacagaccaccatctacaaaagggccgtagacaagaattatcacttgaagatgaaagcgtcaaggtttattttcagtgagatcagccagaagttcccaatcatgccttttactgctagggcattagaagagaagcgtgcgcgtttaggcttggtggaatgcatgaaccatgaactattgcagccgtaccctgtacttcatgagaagccaggcgatcttgttgcacacataaagttcactgtgctgctgatgcccaatggatcagataagataacatcacatcctctacaggagttaaagcccaccaaatccattgaagacaatgcagagataaaggcatggcttgctttggggacgaaatcaaagaagaagggtggtgggaagaagaagaaaggcaagaaaggagatgcagcagaagcagatcccatggaggaggcgacaaacggtgctacaagccaagaataattctgatttttggaattactgccaccagcttttttcttgtttcttcgctgcatctgatggtgttatattacattcagttgtggaaaaattgagtactatttctagcttctaagaaatgaagcatcctattatcgcatctaatggcgcaaagataatcgacaaggcatgcccagtgttcgttctctgttcttcgtgacgacgctcgtcacttggatttttcggagttcctcccagcccggaaatttcttcctggacattgccaactgctgagatgtagcatccggatacaaatgttcgaattacgtatacaatgttactgtgtatgttttctcggctaa

SEQ ID NO: 59410 - DNA, 619 bp, Zea Mays
ctggtcataccatagcttcttactaaggcgatcttgttgcacacataaagttcactgtgctgctgatgcccaatggatcagataagataacatcacatcctctacaggagttaaagcccaccaaatccattgaagacaatgcagagataaaggcatggcttgctttggggacgaaatcaaagaagaagggtggtgggaagaagaagaaaggcaagaaaggagatgcagcagaagcagatcccatggaggaggcgacaaacggtgctacaagccaagaataattctgatttttggaattactgccaccagcttttttcttgtttcttcgctgcatctgatggtgttatattacattcagttgtggaaaaattgagtactatttctagcttctaagaaatgaagcatcctattatcgcatctaatggcgcaaagataatcgacaaggcatgcccagtgttcgttctctgttcttcgtgacgacgctcgtcacttggatttttcggagttcctcccagcccggaaatttcttcctggacattgccaactgctgagatgtagcatccggatacaaatgttcgaattacgtatacaatgttactgtgtatgttttctcggctaa

SEQ ID NO: 59411 - DNA, 711 bp, Zea Mays
ctctgaaagtgggcctatcctcgctggtcacgtctcctctccgcgcacgaaaaccctagcacgcaggcgcagccagccctgctccaattcccaaagcttctggaaaacacctactcgtctctcatcccttccccgccgtcgcgtcctcttcgaactgaatcgcgccgcgatcacccaccttatggcggacaaggagcctgtcgtggagcgatccgaggcgtctgaggaggaggacgcctccgccgcggccgccgcgggggaggaagaggacacgggtgcccaggtggcccccatcgtgcggcttgaggaggtactcgtcaccaccggtgaggaggacgaggacgtcctgctcgacatgaaggcgaagctgtaccggtttgataaagacgggaaccaatggaaggaacggggcacgggcaccgtcaagcttctcaagaacaaggagaccggcaaggtccgactggtcatgcgccaggccaagacgcttaagatatgcgcgaaccacctcgtggcccccaccacgagaatgcaggaacatgccggcagcgacaaatcgtgcgtctggcacgcttctgactttgcggatggcgaactcaaggaggagatgtttgccatcaggtttggttcggtagaaagcaaagctgcctagcccaggcatgaatttcaggcgtccaatcctggaggcctggcagtggcgaagctagagtaaat

SEQ ID NO: 59412 - DNA, 1124 bp, Zea Mays
ctctgaaagtgggcctatcctcgctggtcacgtctcctctccgcgcacgaaaaccctagcacgcaggcgcagccagccctgctccaattcccaaagcttctggaaaacacctactcgtctctcatcccttccccgccgtcgcgtcctcttcgaactgaatcgcgccgcgatcacccaccttatggcggacaaggagcctgtcgtggagcgatccgaggcgtctgaggaggaggacgcctccgccgcggccgccgcgggggaggaagaggacacgggtgcccaggtggcccccatcgtgcggcttgaggaggtactcgtcaccaccggtgaggaggacgaggacgtcctgctcgacatgaaggcgaagctgtaccggtttgataaagacgggaaccaatggaaggaacggggcacgggcaccgtcaagcttctcaagaacaaggagaccggcaaggtccgactggtcatgcgccaggccaagacgcttaaggagaatgcaggaacatgccggcagcgacaaatcgtgcgtctggcacgcttctgactttgcggatggcgaactcaaggaggagatgtttgccatcaggtttggttcggtagaaaactgcaagaagttcaaggagttggttgaggagattgctgagtcacttacagagaacgaggacaaggaaggtcaagatggctcatccacggccggattgctggagaagctcactgtgagcgagggcaaatctgaggaaagtggcaagtcggagtccactgattctggcaaagtgaccgaaaccaaagccgatgcagccccagccgagtagttggtgtggttgcacgcagatcctccccgtgctgaatcagttcctctgccctttagccatgaaatatgtttgctaatttttttggggcgagttggagcagtctcatgtgtttgggtttgttcttaaaaactttgagttaattggggttggaacgttcggtatgcaagtgtagtatttcactgcgtggatcgttatggattgcggtaaattcatataaggtgcatctattttttgatttctttcagtacacatacatgtgttgtgctaatactttacggctttacgccactgtccacggggagagttgaatgt

SEQ ID NO: 59413 - DNA, 563 bp, Zea Mays
gaaaatcttgctaccggcctagcatctgcacagtatatcaggactgcaagaagttcaaggagttggttgaggagattgctgagtcacttacagagaacgaggacaaggaaggtcaagatggctcatccacggccggattgctggagaagctcactgtgagcgagggcaaatctgaggaaagtggcaagtcggagtccactgattctggcaaagtgaccgaaaccaaagccgatgcagccccagccgagtagttggtgtggttgcacgcagatcctccccgtgctgaatcagttcctctgccctttagccatgaaatatgtttgctaatttttttggggcgagttggagcagtctcatgtgtttgggtttgttcttaaaaactttgagttaattggggttggaacgttcggtatgcaagtgtagtatttcactgcgtggatcgttatggattgcggtaaattcatataaggtgcatctattttttgatttctttcagtacacatacatgtgttgtgctaatactttacggctttacgccactgtccacggggagagttgaatgt

SEQ ID NO: 59414 - DNA, 1969 bp, Zea Mays
ctcgtattcgccgctcaccacacccatctgccctcccggtttccctttcccccctcctcctcctcagcgtcatgatgtcctcgacgccgctgtcgcagccggccaccgccggcgacgacgacgacgatatggagtccctcccccttgccgccgcctccgactacgcctcagtcgcctccacctttgaccccctcttctcctccacctccgccaccgccacctcgccccgctcccctcccacgcgcgccgccgctttcaccctctccccgaccttttcctcctccttcgttgacccgccctcctacgccgacgccaccggcgccggcgccggcgccgtctcctcctccccgtgctccgcctcctcaccctcctccgcgtcgccgagatccgcgcgcgtggcggcctccgagtactccttcctcgccgtctccgacccggagactgaagcagagcctgccgccacctcgctcgtccccggatccgcgcccacctacgtctcctacctcgtcaccagcgtccgccgcggggaccccgaccagcgccgccattccgtgcgccgccgcttccgcgacttcgtcacgcttgcagaccgcctcgccgacgccttccggggccatttcgtgccgccgcgcccggacaagaacaccgtcgagagccaggtcatgcagcgggacgagttcgtggctcagcgccgtgctgcgctcgagcggtatctctggcgactcgccgagcacccggccatcggccccagcgacgagctgcgcgtctttctgcaggccgagggcaagatgccactgcccggcaccactgatatggcatcgcggatgctggatggtgcagcaaggctgccgcggcagctcattgctggggaagataccgtcaccgcaccacaggaagtcgtgcagcctgccaagggcggcagggacctgcttaggatattcaaggagctcaagcagtcggtggtaactgactgggctggtgtcaagccacccttggtagaggaggatagggagttcctggagaagaaagagaagctgcaggagtgggaacagcagctcaccagtgcgtcacaacaggcagaagcacttgtcaaggctcaacaagatatggctgaaacaatgggagcgcttgggttggcattcgttagactaacaaagtttgaaaccgaggaggcaatgtatgactctcagaggatgagagcagctgacagcaggcgtgtagccactgcagctgttaaagctagcagggcatgtcgagacttgaatgcgcaaactgttaaatatctggatacgctgcatgaacatttaagcataatgttgtctgtccgcactgcattttctgatcgggcaagtgcattattgactgtgcaaacacttatgtcggatttggcatcattagagtccaggatcgagaaactcgaggctgcatccttgaagatatttggtggtgataaagctaggactcgcaaagttgaagagctaagggaaacaattagggctactgaagatgctaagttctgcgctttaagagagtacgagagaattaaggaaaataacaggagcgaactccagcgactagacagcgaaaggaaagaagaattcatgaggatgctaaaaggatttgttgcaagcggcctacgcggacaaaatcgtggatggatgggagacggtagcggaggagacgagcggttatgttggtgtgcgtggatctgatagcatgacttcgtagcttcgtttggttggatgtcaagtgtttgtacaatgtaatctaggttatggatttgggaatagaagaaaggtgcgccaggttcgatttgtttgtataatcaaataaaggtactgccatggagccacgatttcacgtcctggatgtcaagtatacgttgttcttctgtggataccacaaatatatcattgctccggttcgttccagagcaggatacgacctattcacatttccgataaaaaat

SEQ ID NO: 59415 - DNA, 1749 bp, Zea Mays
caccacacccatctgccctcccggtttccctttcccccctcctcctcctcagcgtcatgatgtcctcgacgccgctgtcgcagccggccaccgccggcgacgacgacgacgatatggagtccctcccccttgccgccgcctccgactacgcctcagtcgcctccacctttgaccccctcttctcctccacctccgccaccgccacctcgccccgctcccctcccacgcgcgccgccgctttcaccctctccccgaccttttcctcctccttcgttgacccgccctcctacgccgacgccaccggcgccggcgccggcgccgtctcctcctccccgtgctccgcctcctcaccctcctccgcgtcgccgagatccgcgcgcgtggcggcctccgagtactccttcctcgccgtctccgacccggagactgaagcagagcctgccgccacctcgctcgtccccggatccgcgcccacctacgtctcctacctcgtcaccagcgtccgccgcggggaccccgaccagcgccgccattccgtgcgccgccgcttccgcgacttcgtcacgcttgcagaccgcctcgccgacgccttccggggccatttcgtgccgccgcgcccggacaagaacaccgtcgagagccaggtcatgcagcgggacgagttcgtggctcagcgccgtgctgcgctcgagcggtatctctggcgactcgccgagcacccggccatcggccccagcgacgagctgcgcgtctttctgcaggccgagggcaagatgccactgcccggcaccactgatatggcatcgcggatgctggatggtgcagcaaggctgccgcggcagctcattgctggggaagataccgtcaccgcaccacaggaagtcgtgcagcctgccaagggcggcagggacctgcttaggatattcaaggagctcaagcagtcggtggtaactgactgggctggtgtcaagccacccttggtagaggaggatagggagttcctggagaagaaagagaagctgcaggagtgggaacagcagctcaccagtgcgtcacaacaggatacgctgcatgaacatttaagcataatgttgtctgtccgcactgcattttctgatcgggcaagtgcattattgactgtgcaaacacttatgtcggatttggcatcattagagtccaggatcgagaaactcgaggctgcatccttgaagatatttggtggtgataaagctaggactcgcaaagttgaagagctaagggaaacaattagggctactgaagatgctaagttctgcgctttaagagagtacgagagaattaaggaaaataacaggagcgaactccagcgactagacagcgaaaggaaagaagaattcatgaggatgctaaaaggatttgttgcaagtcaggcggcctacgcggacaaaatcgtggatggatgggagacggtagcggaggagacgagcggttatgttggtgtgcgtggatctgatagcatgacttcgtagcttcgtttggttggatgtcaagtgtttgtacaatgtaatctaggttatggatttgggaatagaagaaaggtgcgccaggttcgatttgtttgtataatcaaataaaggtactgccatggagccacgatttcacgtcctggatgtcaagtatacgttgttcttctgtggataccacaaatatatcattgctccggttcgttccagagcaggatacgacctattcacatttccgataaaaaat

SEQ ID NO: 59416 - DNA, 2189 bp, Zea Mays
ccgcccttccccaccgcacctccgttgtctccatcgcaatcaccgcggcggcttcaccatgtcccccaatcaccgcagacctcggctactcgtcagcacaatcagaggatagcaatgttgttgagaggtgcctggcagcagtaaatgctcttgcttcataccatttcagagaaagattaggagggagaggaggacagaactcgtagctcatggaatctgcaggaccaaatggcaaactgcaggaaagcataccaactcaattcttcatacttctattgtaaatacttctttttgaagatctcgggtgagctgtgtactgataatttgttttttattttgattgttttcaatattaagcgaagtacttatcaatttgttattatcttgtttaatcacaccgcaaattgtgtctgaagggaaccagaccatcaaagcatccattggtatttggacttgttcacatttaacttcagtctgctagattttttatataccgtgtgttctctgcaacaattactctatacatatgtaccataacgtgaggttgaaaagatttatgttcacaactctatagatttgtaaagagtttcatgagaaatgtggttacctttctgcccagctcctcttagtggccttctttctatttcccacatctttgcactgctgctgactgaatttcatccacagatatttcaccaattcactgcttcctcactatgaatcacctgctgctgctgctgcaatcaacattcagtcgacacaaaccagacaattcacctggacacaaaactgcagcagcagctgtgaaccattcatttaaatttagacaaagcagcaacaatttcagtcaatcattctaactcaaaccaagcagcggcagtgtcgaccattcttacaaattcagagcaagcagcctcactgccgaccattgtttccactttagaccaagaagcagcagtgtcaaccattctttcaaattcagagcaatcaacctcagtgtcgaccattatttccaatttagactaacatgcaacagtgtcaaccatttagtcaaccattctttccccaagctgaatgactagaggggcaattagcaggagcagaaggagcatgtgtcgctaatcatgttgttagccttttttattctttgctccagaaatttgttatcacatttcttttgccttgaaacttgaataaactttcttgtagcaattgctaatactagaggctaagcctatatttgggtgctttttcctcctatgattggcatacagacatgcagatggatattgataatatgtattatgaggtactatcttttatcatgtcttatcctgcctggatgttagaggggttttgttataggattattttctttgtggaggattctgctaggcgtgtgaacctctgtctccgcgctctcgcttgactgttgatttgactaatttggttgcttagatgtggctcttattaaaaaccatatgtagataggcttgcactacgtacacggtggcatggtaaacgttgtgaccacgctgtgataatgcatggattccatcagtttattttattcgtcaattgatcatggttgtgatctattttgtttagatactctatgatttgaatttcccctcttttttcgttatatttctcccttaactatatgattgtgatgaaactttattgttgtggaatttctcatatatgttataagatagctatttaccactttgaggtctgaaataaaacataatgacactcttaggctcactttgaggtctgaaataaaacataatagcactcttacatgattaccacatagctattcaccactttgaggtctgcaggtctcaggctcactttgagaggctagcagatttgcttacttcagatattttgaagccttataccaagccaccaaggagcagggttgcatcggtattactgccaatgatgatccatataattctaatgaaatgagcccaagtgaccaaagacaaaaccatgtttcaacatcgagaaaaaagcctatttccctcccaaaaagtgaagaagcaaaaactggtaaacctacataaaatctttgtagaaataaatttgatactggaatgttattatttatccatatgagttaagtctgtcaagatagttattatgtattctccagttttccctcttattggttgatg

SEQ ID NO: 59417 - DNA, 1851 bp, Zea Mays
cgcccttccccaccgcacctccgttgtctccatcgcaatcaccgcggcggcttcaccatgtcccccaatcaccgcagacctcggctactcgtcagcacaatcagaggatagcaatgttgttgagaggtgcctggcagcagtaaatgctcttgcttcataccatttcagagaaagattaggagggagaggaggacagaactcgtagctcatggaatctgcaggaccaaatggcaaactgcaggaaagcataccaactcaattcttcatacttctattgtaaatacttctttttgaagatctcgggtgagctgtgtactgataatttgttttttattttgattgttttcaatattaagcgaagtacttatcaatttgttattatcttgtttaatcacaccgcaaattgtgtctgaagggaaccagaccatcaaagcatccattggtatttggacttgttcacatttaacttcagtctgctagattttttatataccgtgtgttctctgcaacaattactctatacatatgtaccataacgtgaggttgaaaagatttatgttcacaactctatagatttgtaaagagtttcatgagaaatgtggttacctttctgcccagctcctcttagtggccttctttctatttcccacatctttgcactgctgctgactgaatttcatccacagatatttcaccaattcactgcttcctcactatgaatcacctgctgctgctgctgcaatcaacattcagtcgacacaaaccagacaattcacctggacacaaaactgcagcagcagctgtgaaccattcatttaaatttagacaaagcagcaacaatttcagtcaatcattctaactcaaaccaagcagcggcagtgtcgaccattcttacaaattcagagcaagcagcctcactgccgaccattgtttccactttagaccaagaagcagcagtgtcaaccattctttcaaattcagagcaatcaacctcagtgtcgaccattatttccaatttagactaacatgcaacagtgtcaaccatttagtcaaccattctttccccaaggttctcttcttttcttttattaatcgtttgattactttttgtttcagctatttatgtggcaacaaactcactagacatatacccccaagactagggaacatgagtaattttagctacttgtaaattattgttaactaaataattgtgtgctgctgttgtccgtaattttaatgaaggttaatatttgttccatccatgcagctgaatgactagaggggcaattagcaggagcagaaggagcatgtgtcgctaatcatgttgttagccttttttattctttgctccagaaatttgttatcacatttcttttgccttgaaacttgaataaactttcttgtagcaattgctaatactagaggctaagcctatatttgggtgctttttcctcctatgattggcatacagacatgcagatggatattgataatatgtattatgaggtctcaggctcactttgagaggctagcagatttgcttacttcagatattttgaagccttataccaagccaccaaggagcagggttgcatcggtattactgccaatgatgatccatataattctaatgaaatgagcccaagtgaccaaagacaaaaccatgtttcaacatcgagaaaaaagcctatttccctcccaaaaagtgaagaagcaaaaactggtaaacctacataaaatctttgtagaaataaatttgatactggaatgttattatttatccatatgagttaagtctgtcaagatagttattatgtattctccagttttccctcttattggttgatg

SEQ ID NO: 59418 - DNA, 2308 bp, Zea Mays
cggctactcgtcagcacaatcagaggatagcaatgttgttgagaggtgcctggcagcagtaaatgctcttgcttcataccatttcagagaaagattaggagggagaggaggacagaactcgtagctcatggaatctgcaggaccaaatggcaaactgcaggaaagcataccaactcaattcttcatacttctattgtaaatacttctttttgaagatctcgggtgagctgtgtactgataatttgttttttattttgattgttttcaatattaagcgaagtacttatcaatttgttattatcttgtttaatcacaccgcaaattgtgtctgaagggaaccagaccatcaaagcatccattggtatttggacttgttcacatttaacttcagtctgctagattttttatataccgtgtgttctctgcaacaattactctatacatatgtaccataacgtgaggttgaaaagatttatgttcacaactctatagatttgtaaagagtttcatgagaaatgtggttacctttctgcccagctcctcttagtggccttctttctatttcccacatctttgcactgctgctgactgaatttcatccacagatatttcaccaattcactgcttcctcactatgaatcacctgctgctgctgctgcaatcaacattcagtcgacacaaaccagacaattcacctggacacaaaactgcagcagcagctgtgaaccattcatttaaatttagacaaagcagcaacaatttcagtcaatcattctaactcaaaccaagcagcggcagtgtcgaccattcttacaaattcagagcaagcagcctcactgccgaccattgtttccactttagaccaagaagcagcagtgtcaaccattctttcaaattcagagcaatcaacctcagtgtcgaccattatttccaatttagactaacatgcaacagtgtcaaccatttagtcaaccattctttccccaaggttctcttcttttcttttattaatcgtttgattactttttgtttcagctatttatgtggcaacaaactcactagacatatacccccaagactagggaacatgagtaattttagctacttgtaaattattgttaactaaataattgtgtgctgctgttgtccgtaattttaatgaaggttaatatttgttccatccatgcagctgaatgactagaggggcaattagcaggagcagaaggagcatgtgtcgctaatcatgttgttagccttttttattctttgctccagaaatttgttatcacatttcttttgccttgaaacttgaataaactttcttgtagcaattgctaatactagaggctaagcctatatttgggtgctttttcctcctatgattggcatacagacatgcagatggatattgataatatgtattatgaggtactatcttttatcatgtcttatcctgcctggatgttagaggggttttgttataggattattttctttgtggaggattctgctaggcgtgtgaacctctgtctccgcgctctcgcttgactgttgatttgactaatttggttgcttagatgtggctcttattaaaaaccatatgtagataggcttgcactacgtacacggtggcatggtaaacgttgtgaccacgctgtgataatgcatggattccatcagtttattttattcgtcaattgatcatggttgtgatctattttgtttagatactctatgatttgaatttcccctcttttttcgttatatttctcccttaactatatgattgtgatgaaactttattgttgtggaatttctcatatatgttataagatagctatttaccactttgaggtctgaaataaaacataatgacactcttaggctcactttgaggtctgaaataaaacataatagcactcttacatgattaccacatagctattcaccactttgaggtctgcaggtctcaggctcactttgagaggctagcagatttgcttacttcagatattttgaagccttataccaagccaccaaggagcagggttgcatcggtattactgccaatgatgatccatataattctaatgaaatgagcccaagtgaccaaagacaaaaccatgtttcaacatcgagaaaaaagcctatttccctcccaaaaagtgaagaagcaaaaactggtaaacctacataaaatctttgtagaaataaatttgatactggaatgttattatttatccatatgagttaagtctgtcaagatagttattatgtattctccagttttccctcttattggttgatg

SEQ ID NO: 59419 - DNA, 2556 bp, Zea Mays
ccaataccagcccggctcctcgctgtaatcactgcagcggccagatctgacctcgcccgcgacccatggcatgcgcccgagctacccgcgtcccccaaaatccaccccggatcctctcccttccccggtatgccaaaacccgtcccggctgctccccgccacatcgcggtgcctcaatactcaagacgcagcaaccccaatctagcgcaacttcttcaccgccgactgcgttgtgtcgccgtggtgggaccgggtccagcttgcccgacactggatagcaatgttgttgagaggtgcctggcagcagtaaatgctcttgcttcataccatttcagagaaagattaggagggagaggaggacagaactcgtagctcatggaatctgcaggaccaaatggcaaactgcaggaaagcataccaactcaattcttcatacttctattgtaaatacttctttttgaagatctcgggtgagctgtgtactgataatttgttttttattttgattgttttcaatattaagcgaagtacttatcaatttgttattatcttgtttaatcacaccgcaaattgtgtctgaagggaaccagaccatcaaagcatccattggtatttggacttgttcacatttaacttcagtctgctagattttttatataccgtgtgttctctgcaacaattactctatacatatgtaccataacgtgaggttgaaaagatttatgttcacaactctatagatttgtaaagagtttcatgagaaatgtggttacctttctgcccagctcctcttagtggccttctttctatttcccacatctttgcactgctgctgactgaatttcatccacagatatttcaccaattcactgcttcctcactatgaatcacctgctgctgctgctgcaatcaacattcagtcgacacaaaccagacaattcacctggacacaaaactgcagcagcagctgtgaaccattcatttaaatttagacaaagcagcaacaatttcagtcaatcattctaactcaaaccaagcagcggcagtgtcgaccattcttacaaattcagagcaagcagcctcactgccgaccattgtttccactttagaccaagaagcagcagtgtcaaccattctttcaaattcagagcaatcaacctcagtgtcgaccattatttccaatttagactaacatgcaacagtgtcaaccatttagtcaaccattctttccccaaggttctcttcttttcttttattaatcgtttgattactttttgtttcagctatttatgtggcaacaaactcactagacatatacccccaagactagggaacatgagtaattttagctacttgtaaattattgttaactaaataattgtgtgctgctgttgtccgtaattttaatgaaggttaatatttgttccatccatgcagctgaatgactagaggggcaattagcaggagcagaaggagcatgtgtcgctaatcatgttgttagccttttttattctttgctccagaaatttgttatcacatttcttttgccttgaaacttgaataaactttcttgtagcaattgctaatactagaggctaagcctatatttgggtgctttttcctcctatgattggcatacagacatgcagatggatattgataatatgtattatgaggtactatcttttatcatgtcttatcctgcctggatgttagaggggttttgttataggattattttctttgtggaggattctgctaggcgtgtgaacctctgtctccgcgctctcgcttgactgttgatttgactaatttggttgcttagatgtggctcttattaaaaaccatatgtagataggcttgcactacgtacacggtggcatggtaaacgttgtgaccacgctgtgataatgcatggattccatcagtttattttattcgtcaattgatcatggttgtgatctattttgtttagatactctatgatttgaatttcccctcttttttcgttatatttctcccttaactatatgattgtgatgaaactttattgttgtggaatttctcatatatgttataagatagctatttaccactttgaggtctgaaataaaacataatgacactcttaggctcactttgaggtctgaaataaaacataatagcactcttacatgattaccacatagctattcaccactttgaggtctgcaggtctcaggctcactttgagaggctagcagatttgcttacttcagatattttgaagccttataccaagccaccaaggagcagggttgcatcggtattactgccaatgatgatccatataattctaatgaaatgagcccaagtgaccaaagacaaaaccatgtttcaacatcgagaaaaaagcctatttccctcccaaaaagtgaagaagcaaaaactggtaaacctacataaaatctttgtagaaataaatttgatactggaatgttattatttatccatatgagttaagtctgtcaagatagttattatgtattctccagttttccctcttattggttgatg

SEQ ID NO: 59420 - DNA, 2014 bp, Zea Mays
taccagcccggctcctcgctgtaatcactgcagcggccagatctgacctcgcccgcgacccatggcatgcgcccgagctacccgcgtcccccaaaatccaccccggatcctctcccttccccggtatgccaaaacccgtcccggctgctccccgccacatcgcggtgcctcaatactcaagacgcagcaaccccaatctagcgcaacttcttcaccgccgactgcgttgtgtcgccgtggtgggaccgggtccagcttgcccgacactggatagcaatgttgttgagaggtgcctggcagcagtaaatgctcttgcttcataccatttcagagaaagattaggagggagaggaggacagaactcgtagctcatggaatctgcaggaccaaatggcaaactgcaggaaagcataccaactcaattcttcatacttctattgtaaatacttctttttgaagatctcgggtgagctgtgtactgataatttgttttttattttgattgttttcaatattaagcgaagtacttatcaatttgttattatcttgtttaatcacaccgcaaattgtgtctgaagggaaccagaccatcaaagcatccattggtatttggacttgttcacatttaacttcagtctgctagattttttatataccgtgtgttctctgcaacaattactctatacatatgtaccataacgtgaggttgaaaagatttatgttcacaactctatagatttgtaaagagtttcatgagaaatgtggttacctttctgcccagctcctcttagtggccttctttctatttcccacatctttgcactgctgctgactgaatttcatccacagatatttcaccaattcactgcttcctcactatgaatcacctgctgctgctgctgcaatcaacattcagtcgacacaaaccagacaattcacctggacacaaaactgcagcagcagctgtgaaccattcatttaaatttagacaaagcagcaacaatttcagtcaatcattctaactcaaaccaagcagcggcagtgtcgaccattcttacaaattcagagcaagcagcctcactgccgaccattgtttccactttagaccaagaagcagcagtgtcaaccattctttcaaattcagagcaatcaacctcagtgtcgaccattatttccaatttagactaacatgcaacagtgtcaaccatttagtcaaccattctttccccaaggttctcttcttttcttttattaatcgtttgattactttttgtttcagctatttatgtggcaacaaactcactagacatatacccccaagactagggaacatgagtaattttagctacttgtaaattattgttaactaaataattgtgtgctgctgttgtccgtaattttaatgaaggttaatatttgttccatccatgcagctgaatgactagaggggcaattagcaggagcagaaggagcatgtgtcgctaatcatgttgttagccttttttattctttgctccagaaatttgttatcacatttcttttgccttgaaacttgaataaactttcttgtagcaattgctaatactagaggctaagcctatatttgggtgctttttcctcctatgattggcatacagacatgcagatggatattgataatatgtattatgaggtctcaggctcactttgagaggctagcagatttgcttacttcagatattttgaagccttataccaagccaccaaggagcagggttgcatcggtattactgccaatgatgatccatataattctaatgaaatgagcccaagtgaccaaagacaaaaccatgtttcaacatcgagaaaaaagcctatttccctcccaaaaagtgaagaagcaaaaactggtaaacctacataaaatctttgtagaaataaatttgatactggaatgttattatttatccatatgagttaagtctgtcaagatagttattatgtattctccagttttccctcttattggttgatg

SEQ ID NO: 59421 - DNA, 1724 bp, Zea Mays
cccggctcctcgctgtaatcactgcagcggccagatctgacctcgcccgcgacccatggcatgcgcccgagctacccgcgtcccccaaaatccaccccggatcctctcccttccccggtatgccaaaacccgtcccggctgctccccgccacatcgcggtgcctcaatactcaagacgcagcaaccccaatctagcgcaacttcttcaccgccgactgcgttgtgtcgccgtggtgggaccgggtccagcttgcccgacactggatagcaatgttgttgagaggtgcctggcagcagtaaatgctcttgcttcataccatttcagagaaagattaggagggagaggaggacagaactcgtagctcatggaatctgcaggaccaaatggcaaactgcaggaaagcataccaactcaattcttcatacttctattgtaaatacttctttttgaagatctcgggtgagctgtgtactgataatttgttttttattttgattgttttcaatattaagcgaagtacttatcaatttgttattatcttgtttaatcacaccgcaaattgtgtctgaagggaaccagaccatcaaagcatccattggtatttggacttgttcacatttaacttcagtctgctagattttttatataccgtgtgttctctgcaacaattactctatacatatgtaccataacgtgaggttgaaaagatttatgttcacaactctatagatttgtaaagagtttcatgagaaatgtggttacctttctgcccagctcctcttagtggccttctttctatttcccacatctttgcactgctgctgactgaatttcatccacagatatttcaccaattcactgcttcctcactatgaatcacctgctgctgctgctgcaatcaacattcagtcgacacaaaccagacaattcacctggacacaaaactgcagcagcagctgtgaaccattcatttaaatttagacaaagcagcaacaatttcagtcaatcattctaactcaaaccaagcagcggcagtgtcgaccattcttacaaattcagagcaagcagcctcactgccgaccattgtttccactttagaccaagaagcagcagtgtcaaccattctttcaaattcagagcaatcaacctcagtgtcgaccattatttccaatttagactaacatgcaacagtgtcaaccatttagtcaaccattctttccccaagctgaatgactagaggggcaattagcaggagcagaaggagcatgtgtcgctaatcatcaattgctaatactagaggctaagcctatatttgggtgctttttcctcctatgattggcatacagacatgcagatggatattgataatatgtattatgaggtctcaggctcactttgagaggctagcagatttgcttacttcagatattttgaagccttataccaagccaccaaggagcagggttgcatcggtattactgccaatgatgatccatataattctaatgaaatgagcccaagtgaccaaagacaaaaccatgtttcaacatcgagaaaaaagcctatttccctcccaaaaagtgaagaagcaaaaactggtaaacctacataaaatctttgtagaaataaatttgatactggaatgttattatttatccatatgagttaagtctgtcaagatagttattatgtattctccagttttccctcttattggttgatg

SEQ ID NO: 59422 - DNA, 1561 bp, Zea Mays
cggctcctcgctgtaatcactgcagcggccagatctgacctcgcccgcgacccatggcatgcgcccgagctacccgcgtcccccaaaatccaccccggatcctctcccttccccggtatgccaaaacccgtcccggctgctccccgccacatcgcggtgcctcaatactcaagacgcagcaaccccaatctagcgcaacttcttcaccgccgactgcgttgtgtcgccgtggtgggaccgggtccagcttgcccgacactggatagcaatgttgttgagaggtgcctggcagcagtaaatgctcttgcttcataccatttcagagaaagattaggagggagaggaggacagaactcgtagctcatggaatctgcaggaccaaatggcaaactgcagatatttcaccaattcactgcttcctcactatgaatcacctgctgctgctgctgcaatcaacattcagtcgacacaaaccagacaattcacctggacacaaaactgcagcagcagctgtgaaccattcatttaaatttagacaaagcagcaacaatttcagtcaatcattctaactcaaaccaagcagcggcagtgtcgaccattcttacaaattcagagcaagcagcctcactgccgaccattgtttccactttagaccaagaagcagcagtgtcaaccattctttcaaattcagagcaatcaacctcagtgtcgaccattatttccaatttagactaacatgcaacagtgtcaaccatttagtcaaccattctttccccaaggttctcttcttttcttttattaatcgtttgattactttttgtttcagctatttatgtggcaacaaactcactagacatatacccccaagactagggaacatgagtaattttagctacttgtaaattattgttaactaaataattgtgtgctgctgttgtccgtaattttaatgaaggttaatatttgttccatccatgcagctgaatgactagaggggcaattagcaggagcagaaggagcatgtgtcgctaatcatgttgttagccttttttattctttgctccagaaatttgttatcacatttcttttgccttgaaacttgaataaactttcttgtagcaattgctaatactagaggctaagcctatatttgggtgctttttcctcctatgattggcatacagacatgcagatggatattgataatatgtattatgaggtctcaggctcactttgagaggctagcagatttgcttacttcagatattttgaagccttataccaagccaccaaggagcagggttgcatcggtattactgccaatgatgatccatataattctaatgaaatgagcccaagtgaccaaagacaaaaccatgtttcaacatcgagaaaaaagcctatttccctcccaaaaagtgaagaagcaaaaactggtaaacctacataaaatctttgtagaaataaatttgatactggaatgttattatttatccatatgagttaagtctgtcaagatagttattatgtattctccagttttccctcttattggttgatg

SEQ ID NO: 59423 - DNA, 2230 bp, Zea Mays
aatcactgcagcggccagatctgacctcgcccgcgacccatggcatgcgcccgagctacccgcgtcccccaaaatccaccccggatcctctcccttccccggtatgccaaaacccgtcccggctgctccccgccacatcgcggtgcctcaatactcaagacgcagcaaccccaatctagcgcaacttcttcaccgccgactgcgttgtgtcgccgtggtgggaccgggtccagcttgcccgacactggatagcaatgttgttgagaggtgcctggcagcagtaaatgctcttgcttcataccatttcagagaaagattaggagggagaggaggacagaactcgtagctcatggaatctgcaggaccaaatggcaaactgcaggaaagcataccaactcaattcttcatacttctattgtaaatacttctttttgaagatctcgggtgagctgtgtactgataatttgttttttattttgattgttttcaatattaagcgaagtacttatcaatttgttattatcttgtttaatcacaccgcaaattgtgtctgaagggaaccagaccatcaaagcatccattggtatttggacttgttcacatttaacttcagtctgctagattttttatataccgtgtgttctctgcaacaattactctatacatatgtaccataacgtgaggttgaaaagatttatgttcacaactctatagatttgtaaagagtttcatgagaaatgtggttacctttctgcccagctcctcttagtggccttctttctatttcccacatctttgcactgctgctgactgaatttcatccacagatatttcaccaattcactgcttcctcactatgaatcacctgctgctgctgctgcaatcaacattcagtcgacacaaaccagacaattcacctggacacaaaactgcagcagcagctgtgaaccattcatttaaatttagacaaagcagcaacaatttcagtcaatcattctaactcaaaccaagcagcggcagtgtcgaccattcttacaaattcagagcaagcagcctcactgccgaccattgtttccactttagaccaagaagcagcagtgtcaaccattctttcaaattcagagcaatcaacctcagtgtcgaccattatttccaatttagactaacatgcaacagtgtcaaccatttagtcaaccattctttccccaagctgaatgactagaggggcaattagcaggagcagaaggagcatgtgtcgctaatcataggctaagcctatatttgggtgctttttcctcctatgattggcatacagacatgcagatggatattgataatatgtattatgaggtactatcttttatcatgtcttatcctgcctggatgttagaggggttttgttataggattattttctttgtggaggattctgctaggcgtgtgaacctctgtctccgcgctctcgcttgactgttgatttgactaatttggttgcttagatgtggctcttattaaaaaccatatgtagataggcttgcactacgtacacggtggcatggtaaacgttgtgaccacgctgtgataatgcatggattccatcagtttattttattcgtcaattgatcatggttgtgatctattttgtttagatactctatgatttgaatttcccctcttttttcgttatatttctcccttaactatatgattgtgatgaaactttattgttgtggaatttctcatatatgttataagatagctatttaccactttgaggtctgaaataaaacataatgacactcttaggctcactttgaggtctgaaataaaacataatagcactcttacatgattaccacatagctattcaccactttgaggtctgcaggtctcaggctcactttgagaggctagcagatttgcttacttcagatattttgaagccttataccaagccaccaaggagcagggttgcatcggtattactgccaatgatgatccatataattctaatgaaatgagcccaagtgaccaaagacaaaaccatgtttcaacatcgagaaaaaagcctatttccctcccaaaaagtgaagaagcaaaaactggtaaacctacataaaatctttgtagaaataaatttgatactggaatgttattatttatccatatgagttaagtctgtcaagatagttattatgtattctccagttttccctcttattggttgatg

SEQ ID NO: 59424 - DNA, 2209 bp, Zea Mays
gcgaaattattgcgagtttgctagccccaaccacaccaacaccacccgctccgcgtggccatcttcctcctcgtctccactctccactgcaagagctagacgaattaatgctgaggcgtctagctcttccctcgccggcactggccgcatgctaaggcgagagtggccttcttctcatgaccagtgcatggttggtccgggcgtacgttcccatgttgctccgtagcagaatctcgtcggcgtccatggagaagacgcgccgtcaccgggtgctggctgtgctgctgctgctggtggtggtgctggtctccgctctccctgatctcgggagctgccacaaagatgatgccggacaaggaggaactacgaacccagaggaagatatggtctctgtctccgaagctaggacaacccaccacggtgaccggaccaggaaattcctgcacgagcagcagcagcagaacaggtactggtccggggatttcggcgacaaggtgtcgtcgttgacagactccagccagtaccctccagacagtggaggcagttcttctcaaagcccagcgtcgacgttcaagccagaccagtggcagccatggctaccgtgggcacccaaggccccgccaccgatgagcgttcctccagcgcaggccccggcacctttccccgcgggggtggtctcaaaccctgggcacagcatcgcgctgcccccgcagccggcggtggtggtgccggccgacgccggcagtaggccggcggtgggtgccggcgttccggctggaggagcgggagcgaggccgcgctctggcggtgttggcaggcctgtctacgccatggctgcggccggggcctccctcgccgcggccgcggccgtggcgctcctcgtcctctgctaccggtccagcagcgtggtcaccgtcaggccctgggcgacggggctcagcgggcagctgcagaaggcgttcgtcacgggcgtgccgtcgctcaagaggtcggagctcgaggccgcgtgcgaggacttcagcaacgtcatcggctccctgtcggattacatggtgtataaggggacgctgtccaccggcgtggagatcgccgtggtgtccaccaccaagaactctgccaaggagtggtccaagcactgcgagtcacaattcaggaagaagataacaagcctgtccagagtgaaccacaagaacttcgtcaacctgctgggctactgccaggaagagcagccgtttacgaggatgatggtgttcgagtacgctccaaacggcacgctcttcgagcatctgcacgtcagagaagacggttacctggactggcccactcgcctgcgcgtggcggtcggcgtcgcctactgcctggagcacatgcaccagctgagcccgccggagatcctgcgggcgctggacacgtccaccatctgcctcaccgacgacttcgcggccaagatctccgacgtcttcttctgcgacgagccccgccggcaggaggggagcctgtccctgtcggcgctgtcggaccgggagagcgtggtgtacagctacgggatggtgctgctggagaccatgaccggccggttcacggcgtccgacggcggcctgctagaggcctgggccgcggcctacctgagaggggagcggcagctccgggacgtgatggatcccgccctgcggcggtccttccacgccgccaccgtggacaggctggacggcgtcatcaggggctgcaccgaccgggagcccaggaggcggctgaccatagcggaggtcgccaagcgcctgagggagatcactgccatgtcacccgacgcggccacccccaaggtttcgccgctgtggtgggcggagctggagatcatctgcgcagaggtcaactgaggtcaacctgagacggacgtgccaatgtttgtcgtgaaaaggctgtttcgtggtagatacacaggttgcttctttttgatatttttattttttaggtttatgttgaagtttgtgtccatctgtacatatgaacaaaatgaagtgtgcaaccaagctgattgttttaaaatattattttaataattaattattaaaaagaattgcaaaagttgtacgatttcaagatctgtctgtcttaagagctggttccaaccttcataggtaacgatatctcttcgcaatttatttgagctcttaacaaattttagttaaaaaatgaatagaaataaata

SEQ ID NO: 59425 - DNA, 2234 bp, Zea Mays
atctaactatgctagctgaaaagccaataccgattcagctttgacttctttcatgtagcagatgacacatcttcagcgccatgcctttcagttttcacctggaaacagcgaatagaaaaaatcaatgcggatcacctgtatattcggcacacctatatatctacccttcatgcatggatcacatttcacaaactgtacgtagtaccaaccaacaactacactactgtcgatagaaacaaggatgggcttggaatcatccatccatccattggttgtcaggaattgacagctgaaccaacgacacacaccaaggcaccaagcagcctcatccctcagatgatgatgacacatcgacgcttctcagattgttctgcgcctcttgtgctcacactcctttttgcctccgctcaattattgccttattggcagcaggacaacccaccacggtgaccggaccaggaaattcctgcacgagcagcagcagcagaacaggtactggtccggggatttcggcgacaaggtgtcgtcgttgacagactccagccagtaccctccagacagtggaggcagttcttctcaaagcccagcgtcgacgttcaagccagaccagtggcagccatggctaccgtgggcacccaaggccccgccaccgatgagcgttcctccagcgcaggccccggcacctttccccgcgggggtggtctcaaaccctgggcacagcatcgcgctgcccccgcagccggcggtggtggtgccggccgacgccggcagtaggccggcggtgggtgccggcgttccggctggaggagcgggagcgaggccgcgctctggcggtgttggcaggcctgtctacgccatggctgcggccggggcctccctcgccgcggccgcggccgtggcgctcctcgtcctctgctaccggtccagcagcgtggtcaccgtcaggccctgggcgacggggctcagcgggcagctgcagaaggcgttcgtcacgggcgtgccgtcgctcaagaggtcggagctcgaggccgcgtgcgaggacttcagcaacgtcatcggctccctgtcggattacatggtgtataaggggacgctgtccaccggcgtggagatcgccgtggtgtccaccaccaagaactctgccaaggagtggtccaagcactgcgagtcacaattcaggaagaagataacaagcctgtccagagtgaaccacaagaacttcgtcaacctgctgggctactgccaggaagagcagccgtttacgaggatgatggtgttcgagtacgctccaaacggcacgctcttcgagcatctgcacgcagagaagacggttacctggactggcccactcgcctgcgcgtggcggtcggcgtcgcctactgcctggagcacatgcaccagctgagcccgccggagatcctgcgggcgctggacacgtccaccatctgcctcaccgacgacttcgcggccaagatctccgacgtcttcttctgcgacgagccccgccggcaggaggggagcctgtccctgtcggcgctgtcggaccgggagagcgtggtgtacagctacgggatggtgctgctggagaccatgaccggccggttcacggcgtccgacggcggcctgctagaggcctgggccgcggcctacctgagaggggagcggcagctccgggacgtgatggatcccgccctgcggcggtccttccacgccgccaccgtggacaggctggacggcgtcatcaggggctgcaccgaccgggagcccaggaggcggctgaccatagcggaggtcgccaagcgcctgagggagatcactgccatgtcacccgacgcggccacccccaaggtttcgccgctgtggtgggcggagctggagatcatctgcgcagaggtcaactgaggtcaacctgagacggacgtgccaatgtttgtcgtgaaaaggctgtttcgtggtagatacacaggttgcttctttttgatatttttattttttaggtttatgttgaagtttgtgtccatctgtacatatgaacaaaatgaagtgtgcaaccaagctgattgttttaaaatattattttaataattaattattaaaaagaattgcaaaagttgtacgatttcaagatctgtctgtcttaagagctggttccaaccttcataggtaacgatatctcttcgcaatttatttgagctcttaacaaattttagttaaaaaatgaatagaaataaata

SEQ ID NO: 59426 - DNA, 2153 bp, Zea Mays
gaaaatatttcgtgaaagttgtccatagttcactgagcctctttgtcgagtgtcacactcggcaaagcctttgtcgagtgcttcagacactcggcaaataagttgtttccagtagtgacattaatagaaaaagagtgcatagttcgttcacatagctaactaattggttcattacaaagaaacattagaacaagcataatgatgacttggacataatgaaataaaatacataggttgagggaaccaaacataatggaacacagaacaaatagaggacaacatcatagaaaacgacataacttcacatgggttttacgccaattgctccacgccaagtccataagtgctcgatgagatcatgttgaagttggttgtatcatttgagactagtgatgttgtggtgggagcatagccactctgtacgaacttcagggattgtgatgagagatccacgtgcactccaattgcggcaaactcaacattacttgcacgtgggaccttgtcctcgacaaatatgttgtgtgttatgatacaagctgtcattctttctccaagatgattctgagcccaaccaaaagcaggatcccgaagaacaacacaacgtgcatgtaaaaccccaaaagctcgctccacatctttcctgcaactctcttgcatttaagtgaaatagactttcttctcttcccatgggtgcctaattgccttaacgaatattagccaatctggatagataccatcaacaagatcataacccatgttataagaggtgtcgtttaaggtgtactccaccagtggcataatgcccctccataaaggattgaagaccgaggatatttggagaatgttaatatcgttgttggtaccatacatcttaaagaaagcatgtcggatccacagatcgtaaaaggctatagcctctaggatcatactaggactcaagttcctacaacaaaactgcccccgccaaactatcaggcaattcctccattcccagtgcatgcaattaattgatcctagcatgcctaggaatccacgtgcctcactttgatgaagtatacgagcaatatcgttagcatttgagatcctaaggtaccatgcactaaaggctattatgagtgcacgataaatcgaatgaggcattctctagcagtgaacctgcctatctggatgtactcgtccactacatatgatggtagaccataagcaaggattcacaatgtggcacatttttttggaaaggaccgagattggctaaaccagtagcatcaactcgctaggtgaagtagtcatctaccagttgaattgattgcataatctgcaagaacatgtgacaacgtatcctaaacctacgtacaaataaaatgtattaggatcaatactaaaagggtgtgtgtgaatataaatatttagttcaaattattaccttcgtcggaaaatgttggatggatagacaaggttgggcctgaagaagtgcctaaggattagccgctctccagcaccgtgatcccttgcaatgagggtgctagggatgtagttggaacgccgtcgagaagaggcatggtcgccctcaagtcgtttagtatctaccataaatttgtatgtgtacatatcagcgcatgtgttttacaattaggttataataatgttagttattatgtttagctttaaccgtaggcttcatttatctgttttctaaatgctttatttttttggtttataatgtttatttttattagttatttagattaggctatttatctacattaatttgaaaagtttagattgtgttataaggaaaagagactattttttagaacactttgttttaatagacacaggaccgaggcgagataagtagcaaaaataggattatctcaaagatttatatccagatgtatcttgcaaggatacacttgtccatcgtggcccacctatattgtaattatgattgtggtaagatatcccaggtgtttttaccaagtcatttagatacatatgcactttgcttctacacatgcgattgttttaatgtaaataattgttttacaaatattctatttcattgtttcttgatatgtgttattaaattgctattaagttcatgtcgtcaacttgtttaggaccaagagtgttttttctttcaatggttcgat

SEQ ID NO: 59427 - DNA, 2169 bp, Zea Mays
gcgaagctgagtgcagacgtccgatccccgatccatggctccttttctggcacttgagagatgtgtgtgtggtagacggtggctgtgcgtggtggagaagcagggcacgtgcattaccatccaatgccgccgggtgggtgggtggaatggatggatggttcttgatgtgcccatcttctccaccgagcacgaactgtcttggatccgcgcgcgcgtgccgtacatacctcgtcatgcaggagttcaggtgctgcctaatcctcggcggccctcaccgcgccaccggcgtctcgcgtcgtcgctgccgatcgatcgatcgtccagcccgccgccagttgagttccgaaccccgatgcttatagcctcccatccctggttagcaagcatcgtgtgtatcttgcatctcagacttgcttcctcttcatcattcattcattcatactcaagcattaattattcaggaccaagcaagcggtagaattcaaattcaattcgcacaaccctttgcttgtcagctagcttaccttgtgtattggatttgaatacatgctggtaatccatctaataagaaagcgctgtgtggcgctacctgtccgtagtatggccgcgccgactgtctgtcggctggcatggcatgatatacattctagttatcttgaaccaaaggcgactgtccgtagagttgcttgctcttgcttcagcaggtgggaatggcgccgtgcacttgggttcgcctgtctcagttaccagaggagcctaatcccatcgtcgctcgtacgtcgctcggatgtcggcatcaacgaccagcgcggcagccagcatgcacaggcgcgccgagaatgatcagggggtgccgtctctatccttcattcagcgattcgctttctgaaaagaacattgcacaaaaacagcaagatggctctgggtgcggatgaatgctagctccatgttccgtcactttttgtttgtgcggttcttcactgactttgagtctagtcttggcgttctaactaaagaccgtcatgttgcgagtatacatgcaggtgttagagtagccgttcctcgtgcatgccttgcatattgctcatcatattaataatgatctgtcgtcacccatcttcatctcaactgtagaagatgcgagctgagatcggccatggatcctgcatattattcatccagggccaaattttcttgttctctgtgtgggtttcgtttttttttcatgtgaatgaaatcccttatttcatgaagcaagatttctatgagatttgtctatgtgtgtttttgatatggtgcaagctcactactagccagtagccactcatgattcatgaagacagtagagctaccctttcatgaacaatgtcactatattaaatgtccttgatagtccttccatgaataagacttgtgtctttcagagcccgtgtaatttattgagctgaagatcgatcaatcgatgtactactagcttagctggtgggctaactgattgatcacattttgaaaccgatataacctataggaggcaggcacgccttttgaagtgaacaaccattgcatggacctgcagaatggcaggcagcaggctactaagaaaaacaacggatggcatctctggcgacggtctaatggaatggatctcgcacctaatgccggccggcagtgggcagtggtcctgctgaaataataatgcgtctgaaatggattgcatacatgccatcaccttggttgagcttgagagtcagagaggggagagtggtccgcctgctgcagcatgtctgtcggatccgaatccgatccacatccacactcctctgtcatgtgtgtgggtgtggcctttgctcctcctccatcctgcaccctctcgcagtggcaggccttgtctcttctctacccagctgcagcagctggtagccgatcgatggccctgtgccggccggagccaacctacccggggagggggggttgcttccagatctaggaaaggaaagtggattcctgcgttgcgttgcgcccaagtggccaggcagacgcagacctcaccaccggatctcaactcgatctccccttttggtgcgccggcttttgttattattatcagtaaaaacaaaagatccataccgtcccgacctagtgacgggggaaggaggcaaagaaaaaaaa

SEQ ID NO: 59428 - DNA, 2666 bp, Zea Mays
gatacgtccgcggcggtcgtcgtaggtggggaagggggactaggaaggcgggacttttcgatggatagtggacgccgatggtggggcgaggagagtggatcgcgccttccttgttgagctggggctcagtcacaccttccatggccttccatggggagccagggcagggttgtcgtggtggggcgagagactattgattgcgggaggccatggagagttggggctcggtcgtcgcgccttccatggagagctggggctggatcggcatggtaaggcgaggacgtgttgattgcgggagcgaggagagtggatccacgtggtgggatagtggatcgtgccttccatggagagctggggctcggttgtcggggtgtccaaggcgttcgggtctaagatctacgtcgatagggagaaaaactctgactaccacccagaggctggcgcacgtcgcgccggagatcctcgtcgccgacgacgccgcgccctccacccgcttccacgtcctgccgttcccgtggctgtcggagcgggccatggagatcctcacgcaggcgcgcgccgcgcgccagctggagcccctcatcatcaggccctcctcgcagtggtcgcgccttccacagccttccatggagagccgaggcggggtcggcgcgttgggggcgaggagagtggatcgtcgatggtgggagcgagaagagtggatctaggaagaggagagccggggcagagaagtgttccgcgttgcttcagcgatggtggggcagaggcgtccgtccgttgttggtagtctctgcgccgccatccgcccgttggagggcgttcagggaaggttccatcgatggtggggaggagggtggggtggattggcatggggaggagggcccacgctgtcgatggcgcgcgcaggcaatcttccatgacggcgatgctgatatcgcgtatgggttggcgcggatcatcagccaccttccgctatcggagacgggcgttgatggcgcagatcctcaccaaccttccgctattggagatgggcgttgtttatggagcagaggagtgtgttgatggaaggttccatccaaggtggggaggagggtggggcggatcgacgtggggaggagggtggggatcctcggcaggcagaaccgtgcacgaactcttgtggacgcctacagtaatgtcttaaggagtagtagagagttgaaccattttatttgatctctactagataagtgctcttactggggataatgttgatgaacttctggaaactgtcatgcttgttcccctggaaactctagtgggagcaaattttaggctgaggttaaaaatatcattcgctagttcccctggttgtgtgcacacgagacagacttgacctatggcgggcggattcccatgtaggggctaggagactcaaagcacgagtaaagatctggcttataggggtggatctccatgctgcacagggccagcttttgtgacctttctcagtcgggctatggttgagcttcttaatataataccatggggagtggggacggtcttttcctaccgactgagttttttctttaaaaatataagattgttggaacaacaaaattgagagtgggggttggatctctagagccattagttcgcattgggctcctaatgcaagataactatggaaagagagacaaatgaaggctaaagttaacctggtaagagacaataaaaggaaatttgaatggatggaatatacccaaggatttagcctcgaataggagtgcatgaaaaataactattcatgtgcctgaactttgacttgtggtttttgtttggtttcaactctaacataccctaactttcttgggattaaaaggctttgttgttccggtacaataaaactggatcttgataactaacatatatcaccatgatgaggactatatgcgagattagttatgaattaaacctcggtacacatttgttggataaggctggactttagaaattcactgtgtcagcatggattttcctaagcagtgcaacaaaatgaaaatagctatgttttcaagcttgcattatacctccgaaggatgattccttttgttttaaccagtggttgaacgctcatggaatagcggtgatataagcatcctaactttttaagaaaaattctttacaggttattggttgtaacatccgaaaatttaacccgaggtttggaaccctaatctcctaaccccccttaatcactccatagactccacctcataggacatctcatcatatgcatacactatgattgttagaagcacctcacatagaatatatattttttagcacctaagatatttagctaattatttgttcaaaagaaaaggcgataaaagaaatagaaaaagaaaaaggaaaaacctcacccccctcggttgggccgtttccggtccaactctcccccgagcgcctcgtccccgtccggcccacgcgacccgtttctcccgcgcgcccgcccgcgctggcgccgcgccccctctcccgctgccagcccggccccacccatcagccgctctcaccctcgctctctctctggcaagcgggccccacttgtcagcactttcctcgcgcccgtgaccgggctagcgacgcgatcgccgccggccactgcccgccccgtcgccttg

SEQ ID NO: 59429 - DNA, 1076 bp, Zea Mays
gtaagttgccagcagcacacatatgctcgggagaaatcagtaaacaactgattcaagtttggccagatctgataaagtcaaagatgaagagcacccatgtgtgagtcattcagccatgcatatatagtataaaagaatccatacctcttatactcaaccaattaattccatattactttatatgcagtagatggcaggctaggttttggttggttccctttaaacttattttctatataagtatatatgtactaaattgctatttttggtatcattttgtgatccaaacttagtaagagatgagataggtgtccaattgttgcatggatggatcaagtagatcaaaacatattttaggctaaaaagatatccacgttctgaaatagtttattatgcaatctagtcttttcaattagtatcagccagatttagttcacttaaacttttggtacaagagtacttgattcctggcaactatgtttaagtttagctactattgcaaaagaggtgtagcgaagcaaaaaaaaaaatcagtgcctattgaaacaaacatttatgcggtgggtcactaaaatttctagattctatccatcaatcaaactccagtttctaatttgtttcattgaaaatccagtaacatggtagcaaagttaaacatttatctggacaatgcaatgctagaatgtcccacaactgcaattctaataccaagcatctaagatctgtagaattatcgcacatggacgaaaagtgcgtactaactgaacccaacaaatgaccacccaatgtgacagatatgcttcattaatttcattgtgaaattctgcatgaacaacggtatatggccagcaggcagcatatgtataacaagtagtacgacttacattgcacccaatatgacatgtgaatcgaagcgcatcaaaacatcaatgtatcatgcaaacacacaaaatcaagcagaaatgttgatctaaataaaatatttgcacaaattctgtcacctggcacgaggaggctcgggcaggcttcacgagcagctatctcctcagcgtcgccattgctttcggcatgtggac

SEQ ID NO: 59430 - DNA, 307 bp, Zea Mays
gtaaagtgcggggaggagctcagactctaccgggttttaataaaagtatactagcttcctaaaggatcgatgtcggctatctccaatcagaagaaacgcaccttggaagcccttcagcaacagtatactgctgcaaaagctaagaaattgcaagatgaacaggttaagagtcagaagaagagcaattttaatacccctaagcctaaatttgatgcaccaaggggaagcaaaggtctagtaatcactcctcgacgaacatatgtccagccttctcataaaagatgtagcattttctagttctaattgt

SEQ ID NO: 59431 - DNA, 3244 bp, Zea Mays
cctgccttggccttcctcacacagttcgatccagcccaaccgaaccaaatctctagcagacgggaacctgggaacctgaaccctcaaaccccgccccttggcctcccatacctttcgcgccgaacacccgccgtcaccaaaactgacggctcctccccctctcccctctccccttttgtgattggactgaagtgggattcatatatcaggtgtttggattcttctctttcctctgctggtgaggacgtcggtttcttctttttgtgctgtttcccccctttatcttctcattcagcgatcttcaaattcaatatgttgtccgtcggattggcgctctagtctggtgggtttgctttcagatttgccgagtatcaatccgggtctccattcggtggtggctgaagcttgatttctccatgtcgctccgtgcagcttcatgaatccatgttctcaagtgtatttgatcatgattctataaacaaccatcttatattactaatctgtaggagtttttttacatgttggtggtccaagctgaaaaaaataatttaggacaaagctagattgtcttttacatttgtgattggaaggagtaggctttttcattatccagtggcagttatagacagttgttgcgctcgtgcagcttcaaatattttgggatgttgccatgttaaggtattagccttttgttgtttcagtatactagcttcctaaaggatcgatgtcggctatctccaatcagaagaaacgcaccttggaagcccttcagcaacagtatactgctgcaaaagctaagaaattgcaagatgaacaggttaagagtcagaagaagagcaattttaatacccctaagcctaaatttgatgcaccaaggggaagcaaaggtctagtaatcactcctcgacgaacatatgcccagccttctcctcataaagatgtagcattttctagttctaattgtcaacaaaagccttccacgtcctcaggtgaagaaatcaatcctgtgtatgctgaactttcttgtgcttttcatgacactttgtccaaaggatttggatggcacagaggttgttcacaatgttatatatgacataattcagaaaggtggagatgctgggaaaattacaaagggagccaaaaagttgaaactggaaaagggatccttttggatgagggaaatttggatccataccattaaaagatcaccactttggatccataccattactatctcacttacatgtgggtccacatgagtcaatgacatgtggggtccatggtatatatctaaagtttggatcttttaatggtatagatccaattgttcctttggataattatgttcaaaggggttctagattagtggatgaccaagcaagatctttgctaattcattcaaagtgataaaaaggcacatgtctctgaaacaacataagaaatgtggttcatttgatttagatggtacattccacaagtactacctctataagctaatgcatgagatgtggaaggactatatcaaagagcttatggatatgagcccatacgactccacaacagtctttgagtgttcttgttatgagcggcagatggctgcgagggttagaggacgatggctagggttagagggcgacagctatggttaggggcgctggggaggtcggccgcagggatttgcccacgaccggcaagagagaagggatttttcttctaatctcttgtttaccttcaattgatacaatcactcttcttatatagtgagggttacttgacccctaagcactagatctaatcttattccaaactaatctatctttatctaaacaaccttgaggggtgtgctacagtgcgccgttactgtagtgggccctcttgggccctgacagttctgctgcttttggtctcaaaattttgactcttgagtcagcggcggagtcgctgtccacccctctgggccgccggctgggctcattggcgaagttcaaaagaaatatttctttatatcaaacaaaaatactataatttgctagctaaattttttgcataatgtgggttgtccagacacctgaaagcttttggctacgctactgtctccacttgaacttttttgtcgtttaatacaaaggcaggagaagctacagatcattgcattaatgagaaagtattttagtggacaaccccacacaagcacaccacccaacatatattgaactgggttctattgagaatgctatagtgataggtggatagtataacgtgatggatttaaacccactatgtctaatgtagcaaatagttaaagggcacggatttccagactttatacaatacaataaaatgagctttcttgtataagctacgtcgagaccactcaaagactctagttttcttgaactgaaatttattgaccatatgaattatgaactaaactaaaaacactaaatcatttgttaccatataagcattatattttatgaaatatcaacgaatttgaagatttgaacaaacaagaaagacaataattaacctgagtgtgaagcaagcgcattcagagtagtggaccaactcgagcttttggaaaactttaatgtaaaccctattattgtgcctgttcctgtaatatgtacccttgagctaattacatgtcctgtcttcaccacaggaaaaataaatttactgagaaccttctttcagcagatcttcatggggcccttctaatagtggcagaacacaaagctgcttcatataaaagtgtaaacggaatcatgattcgagatactgcagagacgtttggaattatatccgaggacaaccgcttccgggtttatcaaaagctggttcagttttcgtacttcaagcagaccgctggaagttcacactgatcggcgacaagctctcgcccagggagaagttgaaggaggatcagcgtcaacaacgtgcgcaatcgctaatcagatagtttccaatgtgccagctgttctctcacaaaatttttgctccacggaatacttgcttttgtttaggtcctgccactgtagcatggtagttttagcgctctagaggcgttgacatttcttagcgacttactggcagctcgagttgtggaggggtgtgtgatcatgagccatgtactccggtgactgattattgattagtataggcgaagcaagtccatttacgtttgtttcatctagtcacacaaacctgtggcaaatatttattacgccttgtttctgtcgcc

SEQ ID NO: 59432 - DNA, 2889 bp, Zea Mays
cctgccttggccttcctcacacagttcgatccagcccaaccgaaccaaatctctagcagacgggaacctgggaacctgaaccctcaaaccccgccccttggcctcccatacctttcgcgccgaacacccgccgtcaccaaaactgacggctcctccccctctcccctctccccttttgtgattggactgaagtgggattcatatatcaggtgtttggattcttctctttcctctgctgtatactagcttcctaaaggatcgatgtcggctatctccaatcagaagaaacgcaccttggaagcccttcagcaacagtatactgctgcaaaagctaagaaattgcaagatgaacaggttaagagtcagaagaagagcaattttaatacccctaagcctaaatttgatgcaccaaggggaagcaaaggtctagtaatcactcctcgacgaacatatgcccagccttctcctcataaagatgtagcattttctagttctaattgtcaacaaaagccttccacgtcctcaggtgaagaaatcaatcctgtgtatgctgaactttcttgtgcttttcatgacactttgtccaaaggatttggatggcacagaggttgttcacaatgttatatatgacataattcagaaaggtggagatgctgggaaaattacaaagggagccaaaaagttgaaactggaaaagggatccttttggatgagggaaatttggatccataccattaaaagatcaccactttggatccataccattactatctcacttacatgtgggtccacatgagtcaatgacatgtggggtccatggtatatatctaaagtttggatcttttaatggtatagatccaattgttcctttggataattatgttcaaaggggttctagattagtggatgaccaagcaagatctttgctaattcattcaaagtgataaaaaggcacatgtctctgaaacaacataagaaatgtggttcatttgatttagatggtacattccacaagtactacctctataagctaatgcatgagatgtggaaggactatatcaaagagcttatggatatgagcccatacgactccacagtatccttttgtctgttattttggacctcttatcttccttttttattttctacatatttttagcggaaataaatccatgtgttatactgaaactcaacaaaataaaagacagtctttgagtgttcttgttatgagcggcagatggctgcgagggttagaggacgatggctagggttagagggcgacagctatggttaggggcgctggggaggtcggccgcagggatttgcccacgaccggcaagagagaagggatttttcttctaatctcttgtttaccttcaattgatacaatcactcttcttatatagtgagggttacttgacccctaagcactagatctaatcttattccaaactaatctatctttatctaaacaaccttgaggggtgtgctacagtgcgccgttactgtagtgggccctcttgggccctgacagttctgctgcttttggtctcaaaattttgactcttgagtcagcggcggagtcgctgtccacccctctgggccgccggctgggctcattggcgaagttcaaaagaaatatttctttatatcaaacaaaaatactataatttgctagctaaattttttgcataatgtgggttgtccagacacctgaaagcttttggctacgctactgtctccacttgaacttttttgtcgtttaatacaaaggcaggagaagctacagatcattgcattaatgagaaagtattttagtggacaaccccacacaagcacaccacccaacatatattgaactgggttctattgagaatgctatagtgataggtggatagtataacgtgatggatttaaacccactatgtctaatgtagcaaatagttaaagggcacggatttccagactttatacaatacaataaaatgagctttcttgtataagctacgtcgagaccactcaaagactctagttttcttgaactgaaatttattgaccatatgaattatgaactaaactaaaaacactaaatcatttgttaccatataagcattatattttatgaaatatcaacgaatttgaagatttgaacaaacaagaaagacaataattaacctgagtgtgaagcaagcgcattcagagtagtggaccaactcgagcttttggaaaactttaatgtaaaccctattattgtgcctgttcctgtaatatgtacccttgagctaattacatgtcctgtcttcaccacaggaaaaataaatttactgagaaccttctttcagcagatcttcatggggcccttctaatagtggcagaacacaaagctgcttcatataaaagtgtaaacggaatcatgattcgagatactgcagagacgtttggaattatatccgaggacaaccgcttccgggtttatcaaaagctggttcagttttcgtacttcaagcagaccgctggaagttcacactgatcggcgacaagctctcgcccagggagaagttgaaggaggatcagcgtcaacaacgtgcgcaatcgctaatcagatagtttccaatgtgccagctgttctctcacaaaatttttgctccacggaatacttgcttttgtttaggtcctgccactgtagcatggtagttttagcgctctagaggcgttgacatttcttagcgacttactggcagctcgagttgtggaggggtgtgtgatcatgagccatgtactccggtgactgattattgattagtataggcgaagcaagtccatttacgtttgtttcatctagtcacacaaacctgtggcaaatatttattacgccttgtttctgtcgcc

SEQ ID NO: 59433 - DNA, 2004 bp, Zea Mays
cctgccttggccttcctcacacagttcgatccagcccaaccgaaccaaatctctagcagacgggaacctgggaacctgaaccctcaaaccccgccccttggcctcccatacctttcgcgccgaacacccgccgtcaccaaaactgacggctcctccccctctcccctctccccttttgtgattggactgaagtgggattcatatatcaggtgtttggattcttctctttcctctgctgatttgccgagtatcaatccgggtctccattcggtggtggctgaagcttgatttctccatgtcgctccgtgcagcttcatgaatccatgttctcaagtgtatttgatcatgattctataaacaaccatcttatattactaatctgtaggagtttttttacatgttggtggtccaagctgaaaaaaataatttaggacaaagctagattgtcttttacatttgtgattggaaggagtaggctttttcattatccagtggcagttatagacagttgttgcgctcgtgcagcttcaaatattttgggatgttgccatgttaaggtattagccttttgttgtttcagtatactagcttcctaaaggatcgatgtcggctatctccaatcagaagaaacgcaccttggaagcccttcagcaacagtatactgctgcaaaagctaagaaattgcaagatgaacaggttaagagtcagaagaagagcaattttaatacccctaagcctaaatttgatgcaccaaggggaagcaaaggtctagtaatcactcctcgacgaacatatgcccagccttctcctcataaagatgtagcattttctagttctaattgtcaacaaaagccttccacgtcctcaggtgaagaaatcaatcctgtgtatgctgaactttcttgtgcttttcatgacactttgtccaaaggatttggatggcacagaggttgttcacaatgttatatatgacataattcagaaaggtggagatgctgggaaaattacaaagggagccaaaaagttgaaactggaaaagggatccttttggatgagggaaatttggatccataccattaaaagatcaccactttggatccataccattactatctcacttacatgtgggtccacatgagtcaatgacatgtggggtccatggtatatatctaaagtttggatcttttaatggtatagatccaattgttcctttggataattatgttcaaaggggttctagattagtggatgaccaagcaagatctttgctaattcattcaaagtgataaaaaggcacatgtctctgaaacaacataagaaatgtggttcatttgatttagatggtacattccacaagtactacctctataagctaatgcatgagatgtggaaggactatatcaaagagcttatggatatgagcccgaaaaataaatttactgagaaccttctttcagcagatcttcatggggcccttctaatagtggcagaacacaaagctgcttcatataaaagtgtaaacggaatcatgattcgagatactgcagagacgtttggaattatatccgaggacaaccgcttccgggtttatcaaaagctggttcagttttcgtacttcaagcagaccgctggaagttcacactgatcggcgacaagctctcgcccagggagaagttgaaggaggatcagcgtcaacaacgtgcgcaatcgctaatcagatagtttccaatgtgccagctgttctctcacaaaatttttgctccacggaatacttgcttttgtttaggtcctgccactgtagcatggtagttttagcgctctagaggcgttgacatttcttagcgacttactggcagctcgagttgtggaggggtgtgtgatcatgagccatgtactccggtgactgattattgattagtataggcgaagcaagtccatttacgtttgtttcatctagtcacacaaacctgtggcaaatatttattacgccttgtttctgtcgcc

SEQ ID NO: 59434 - DNA, 2138 bp, Zea Mays
cctgccttggccttcctcacacagttcgatccagcccaaccgaaccaaatctctagcagacgggaacctgggaacctgaaccctcaaaccccgccccttggcctcccatacctttcgcgccgaacacccgccgtcaccaaaactgacggctcctccccctctcccctctccccttttgtgattggactgaagtgggattcatatatcaggtgtttggattcttctctttcctctgctggtgaggacgtcggtttcttctttttgtgctgtttcccccctttatcttctcattcagcgatcttcaaattcaatatgttgtccgtcggattggcgctctagtctggtgggtttgctttcagatttgccgagtatcaatccgggtctccattcggtggtggctgaagcttgatttctccatgtcgctccgtgcagcttcatgaatccatgttctcaagtgtatttgatcatgattctataaacaaccatcttatattactaatctgtaggagtttttttacatgttggtggtccaagctgaaaaaaataatttaggacaaagctagattgtcttttacatttgtgattggaaggagtaggctttttcattatccagtggcagttatagacagttgttgcgctcgtgcagcttcaaatattttgggatgttgccatgttaaggtattagccttttgttgtttcagtatactagcttcctaaaggatcgatgtcggctatctccaatcagaagaaacgcaccttggaagcccttcagcaacagtatactgctgcaaaagctaagaaattgcaagatgaacaggttaagagtcagaagaagagcaattttaatacccctaagcctaaatttgatgcaccaaggggaagcaaaggtctagtaatcactcctcgacgaacatatgcccagccttctcctcataaagatgtagcattttctagttctaattgtcaacaaaagccttccacgtcctcaggtgaagaaatcaatcctgtgtatgctgaactttcttgtgcttttcatgacactttgtccaaaggatttggatggcacagaggttgttcacaatgttatatatgacataattcagaaaggtggagatgctgggaaaattacaaagggagccaaaaagttgaaactggaaaagggatccttttggatgagggaaatttggatccataccattaaaagatcaccactttggatccataccattactatctcacttacatgtgggtccacatgagtcaatgacatgtggggtccatggtatatatctaaagtttggatcttttaatggtatagatccaattgttcctttggataattatgttcaaaggggttctagattagtggatgaccaagcaagatctttgctaattcattcaaagtgataaaaaggcacatgtctctgaaacaacataagaaatgtggttcatttgatttagatggtacattccacaagtactacctctataagctaatgcatgagatgtggaaggactatatcaaagagcttatggatatgagcccatacgactccacagaaaaataaatttactgagaaccttctttcagcagatcttcatggggcccttctaatagtggcagaacacaaagctgcttcatataaaagtgtaaacggaatcatgattcgagatactgcagagacgtttggaattatatccgaggacaaccgcttccgggtttatcaaaagctggttcagttttcgtacttcaagcagaccgctggaagttcacactgatcggcgacaagctctcgcccagggagaagttgaaggaggatcagcgtcaacaacgtgcgcaatcgctaatcagatagtttccaatgtgccagctgttctctcacaaaatttttgctccacggaatacttgcttttgtttaggtcctgccactgtagcatggtagttttagcgctctagaggcgttgacatttcttagcgacttactggcagctcgagttgtggaggggtgtgtgatcatgagccatgtactccggtgactgattattgattagtataggcgaagcaagtccatttacgtttgtttcatctagtcacacaaacctgtggcaaatatttattacgccttgtttctgtcgcc

SEQ ID NO: 59435 - DNA, 3345 bp, Zea Mays
ctgccttggccttcctcacacagttcgatccagcccaaccgaaccaaatctctagcagacgggaacctgggaacctgaaccctcaaaccccgccccttggcctcccatacctttcgcgccgaacacccgccgtcaccaaaactgacggctcctccccctctcccctctccccttttgtgattggactgaagtgggattcatatatcaggtgtttggattcttctctttcctctgctggtgaggacgtcggtttcttctttttgtgctgtttcccccctttatcttctcattcagcgatcttcaaattcaatatgttgtccgtcggattggcgctctagtctggtgggtttgctttcagatttgccgagtatcaatccgggtctccattcggtggtggctgaagcttgatttctccatgtcgctccgtgcagcttcatgaatccatgttctcaagtgtatttgatcatgattctataaacaaccatcttatattactaatctgtaggagtttttttacatgttggtggtccaagctgaaaaaaataatttaggacaaagctagattgtcttttacatttgtgattggaaggagtaggctttttcattatccagtggcagttatagacagttgttgcgctcgtgcagcttcaaatattttgggatgttgccatgttaaggtattagccttttgttgtttcagtatactagcttcctaaaggatcgatgtcggctatctccaatcagaagaaacgcaccttggaagcccttcagcaacagtatactgctgcaaaagctaagaaattgcaagatgaacaggttaagagtcagaagaagagcaattttaatacccctaagcctaaatttgatgcaccaaggggaagcaaaggtctagtaatcactcctcgacgaacatatgcccagccttctcctcataaagatgtagcattttctagttctaattgtcaacaaaagccttccacgtcctcaggtgaagaaatcaatcctgtgtatgctgaactttcttgtgcttttcatgacactttgtccaaaggatttggatggcacagaggttgttcacaatgttatatatgacataattcagaaaggtggagatgctgggaaaattacaaagggagccaaaaagttgaaactggaaaagggatccttttggatgagggaaatttggatccataccattaaaagatcaccactttggatccataccattactatctcacttacatgtgggtccacatgagtcaatgacatgtggggtccatggtatatatctaaagtttggatcttttaatggtatagatccaattgttcctttggataattatgttcaaaggggttctagattagtggatgaccaagcaagatctttgctaattcattcaaagtgataaaaaggcacatgtctctgaaacaacataagaaatgtggttcatttgatttagatggtacattccacaagtactacctctataagctaatgcatgagatgtggaaggactatatcaaagagcttatggatatgagcccatacgactccacagtatccttttgtctgttattttggacctcttatcttccttttttattttctacatatttttagcggaaataaatccatgtgttatactgaaactcaacaaaataaaagacagtctttgagtgttcttgttatgagcggcagatggctgcgagggttagaggacgatggctagggttagagggcgacagctatggttaggggcgctggggaggtcggccgcagggatttgcccacgaccggcaagagagaagggatttttcttctaatctcttgtttaccttcaattgatacaatcactcttcttatatagtgagggttacttgacccctaagcactagatctaatcttattccaaactaatctatctttatctaaacaaccttgaggggtgtgctacagtgcgccgttactgtagtgggccctcttgggccctgacagttctgctgcttttggtctcaaaattttgactcttgagtcagcggcggagtcgctgtccacccctctgggccgccggctgggctcattggcgaagttcaaaagaaatatttctttatatcaaacaaaaatactataatttgctagctaaattttttgcataatgtgggttgtccagacacctgaaagcttttggctacgctactgtctccacttgaacttttttgtcgtttaatacaaaggcaggagaagctacagatcattgcattaatgagaaagtattttagtggacaaccccacacaagcacaccacccaacatatattgaactgggttctattgagaatgctatagtgataggtggatagtataacgtgatggatttaaacccactatgtctaatgtagcaaatagttaaagggcacggatttccagactttatacaatacaataaaatgagctttcttgtataagctacgtcgagaccactcaaagactctagttttcttgaactgaaatttattgaccatatgaattatgaactaaactaaaaacactaaatcatttgttaccatataagcattatattttatgaaatatcaacgaatttgaagatttgaacaaacaagaaagacaataattaacctgagtgtgaagcaagcgcattcagagtagtggaccaactcgagcttttggaaaactttaatgtaaaccctattattgtgcctgttcctgtaatatgtacccttgagctaattacatgtcctgtcttcaccacaggaaaaataaatttactgagaaccttctttcagcagatcttcatggggcccttctaatagaacacaaagctgcttcatataaaagtgtaaacggaatcatgattcgagatactgcagagacgtttggaattatatccgaggacaaccgcttccgggtttatcaaaagctggttcagttttcgtacttcaagcagaccgctggaagttcacactgatcggcgacaagctctcgcccagggagaagttgaaggaggatcagcgtcaacaacgtgcgcaatcgctaatcagatagtttccaatgtgccagctgttctctcacaaaatttttgctccacggaatacttgcttttgtttaggtcctgccactgtagcatggtagttttagcgctctagaggcgttgacatttcttagcgacttactggcagctcgagttgtggaggggtgtgtgatcatgagccatgtactccggtgactgattattgattagtataggcgaagcaagtccatttacgtttgtttcatctagtcacacaaacctgtggcaaatatttattacgccttgtttctgtcgcc

SEQ ID NO: 59436 - DNA, 1661 bp, Zea Mays
ctgccttggccttcctcacacagttcgatccagcccaaccgaaccaaatctctagcagacgggaacctgggaacctgaaccctcaaaccccgccccttggcctcccatacctttcgcgccgaacacccgccgtcaccaaaactgacggctcctccccctctcccctctccccttttgtgattggactgaagtgggattcatatatcaggtgtttggattcttctctttcctctgctgtatactagcttcctaaaggatcgatgtcggctatctccaatcagaagaaacgcaccttggaagcccttcagcaacagtatactgctgcaaaagctaagaaattgcaagatgaacaggttaagagtcagaagaagagcaattttaatacccctaagcctaaatttgatgcaccaaggggaagcaaaggtctagtaatcactcctcgacgaacatatgcccagccttctcctcataaagatgtagcattttctagttctaattgtcaacaaaagccttccacgtcctcaggtgaagaaatcaatcctgtgtatgctgaactttcttgtgcttttcatgacactttgtccaaaggatttggatggcacagaggttgttcacaatgttatatatgacataattcagaaaggtggagatgctgggaaaattacaaagggagccaaaaagttgaaactggaaaagggatccttttggatgagggaaatttggatccataccattaaaagatcaccactttggatccataccattactatctcacttacatgtgggtccacatgagtcaatgacatgtggggtccatggtatatatctaaagtttggatcttttaatggtatagatccaattgttcctttggataattatgttcaaaggggttctagattagtggatgaccaagcaagatctttgctaattcattcaaagtgataaaaaggcacatgtctctgaaacaacataagaaatgtggttcatttgatttagatggtacattccacaagtactacctctataagctaatgcatgagatgtggaaggactatatcaaagagcttatggatatgagcccgaaaaataaatttactgagaaccttctttcagcagatcttcatggggcccttctaatagtggcagaacacaaagctgcttcatataaaagtgtaaacggaatcatgattcgagatactgcagagacgtttggaattatatccgaggacaaccgcttccgggtttatcaaaagctggttcagttttcgtacttcaagcagaccgctggaagttcacactgatcggcgacaagctctcgcccagggagaagttgaaggaggatcagcgtcaacaacgtgcgcaatcgctaatcagatagtttccaatgtgccagctgttctctcacaaaatttttgctccacggaatacttgcttttgtttaggtcctgccactgtagcatggtagttttagcgctctagaggcgttgacatttcttagcgacttactggcagctcgagttgtggaggggtgtgtgatcatgagccatgtactccggtgactgattattgattagtataggcgaagcaagtccatttacgtttgtttcatctagtcacacaaacctgtggcaaatatttattacgccttgtttctgtcgcc

SEQ ID NO: 59437 - DNA, 2855 bp, Zea Mays
cttggccttcctcacacagttcgatccagcccaaccgaaccaaatctctagcagacgggaacctgggaacctgaaccctcaaaccccgccccttggcctcccatacctttcgcgccgaacacccgccgtcaccaaaactgacggctcctccccctctcccctctccccttttgtgattggactgaagtgggattcatatatcagtatactagcttcctaaaggatcgatgtcggctatctccaatcagaagaaacgcaccttggaagcccttcagcaacagtatactgctgcaaaagctaagaaattgcaagatgaacaggttaagagtcagaagaagagcaattttaatacccctaagcctaaatttgatgcaccaaggggaagcaaaggtctagtaatcactcctcgacgaacatatgcccagccttctcctcataaagatgtagcattttctagttctaattgtcaacaaaagccttccacgtcctcaggtgaagaaatcaatcctgtgtatgctgaactttcttgtgcttttcatgacactttgtccaaaggatttggatggcacagaggttgttcacaatgttatatatgacataattcagaaaggtggagatgctgggaaaattacaaagggagccaaaaagttgaaactggaaaagggatccttttggatgagggaaatttggatccataccattaaaagatcaccactttggatccataccattactatctcacttacatgtgggtccacatgagtcaatgacatgtggggtccatggtatatatctaaagtttggatcttttaatggtatagatccaattgttcctttggataattatgttcaaaggggttctagattagtggatgaccaagcaagatctttgctaattcattcaaagtgataaaaaggcacatgtctctgaaacaacataagaaatgtggttcatttgatttagatggtacattccacaagtactacctctataagctaatgcatgagatgtggaaggactatatcaaagagcttatggatatgagcccatacgactccacagtatccttttgtctgttattttggacctcttatcttccttttttattttctacatatttttagcggaaataaatccatgtgttatactgaaactcaacaaaataaaagacagtctttgagtgttcttgttatgagcggcagatggctgcgagggttagaggacgatggctagggttagagggcgacagctatggttaggggcgctggggaggtcggccgcagggatttgcccacgaccggcaagagagaagggatttttcttctaatctcttgtttaccttcaattgatacaatcactcttcttatatagtgagggttacttgacccctaagcactagatctaatcttattccaaactaatctatctttatctaaacaaccttgaggggtgtgctacagtgcgccgttactgtagtgggccctcttgggccctgacagttctgctgcttttggtctcaaaattttgactcttgagtcagcggcggagtcgctgtccacccctctgggccgccggctgggctcattggcgaagttcaaaagaaatatttctttatatcaaacaaaaatactataatttgctagctaaattttttgcataatgtgggttgtccagacacctgaaagcttttggctacgctactgtctccacttgaacttttttgtcgtttaatacaaaggcaggagaagctacagatcattgcattaatgagaaagtattttagtggacaaccccacacaagcacaccacccaacatatattgaactgggttctattgagaatgctatagtgataggtggatagtataacgtgatggatttaaacccactatgtctaatgtagcaaatagttaaagggcacggatttccagactttatacaatacaataaaatgagctttcttgtataagctacgtcgagaccactcaaagactctagttttcttgaactgaaatttattgaccatatgaattatgaactaaactaaaaacactaaatcatttgttaccatataagcattatattttatgaaatatcaacgaatttgaagatttgaacaaacaagaaagacaataattaacctgagtgtgaagcaagcgcattcagagtagtggaccaactcgagcttttggaaaactttaatgtaaaccctattattgtgcctgttcctgtaatatgtacccttgagctaattacatgtcctgtcttcaccacaggaaaaataaatttactgagaaccttctttcagcagatcttcatggggcccttctaatagtggcagaacacaaagctgcttcatataaaagtgtaaacggaatcatgattcgagatactgcagagacgtttggaattatatccgaggacaaccgcttccgggtttatcaaaagctggttcagttttcgtacttcaagcagaccgctggaagttcacactgatcggcgacaagctctcgcccagggagaagttgaaggaggatcagcgtcaacaacgtgcgcaatcgctaatcagatagtttccaatgtgccagctgttctctcacaaaatttttgctccacggaatacttgcttttgtttaggtcctgccactgtagcatggtagttttagcgctctagaggcgttgacatttcttagcgacttactggcagctcgagttgtggaggggtgtgtgatcatgagccatgtactccggtgactgattattgattagtataggcgaagcaagtccatttacgtttgtttcatctagtcacacaaacctgtggcaaatatttattacgccttgtttctgtcgcc

SEQ ID NO: 59438 - DNA, 2817 bp, Zea Mays
gccttcctcacacagttcgatccagcccaaccgaaccaaatctctagcagacgggaacctgggaacctgaaccctcaaaccccgccccttggcctcccatacctttcgcgccgaacacccgccgtcaccaaaactgacggctcctccccctctcccctctccccttttgtgattggactgaagtgggattcatatatcaggtgtttggattcttctctttcctctgctgtatactagcttcctaaaggatcgatgtcggctatctccaatcagaagaaacgcaccttggaagcccttcagcaacagtatactgctgcaaaagctaagaaattgcaagatgaacaggttaagagtcagaagaagagcaattttaatacccctaagcctaaatttgatgcaccaaggggaagcaaaggtctagtaatcactcctcgacgaacatatgcccagccttctcctcataaagatgtagcattttctagttctaattgtcaacaaaagccttccacgtcctcaggatttggatggcacagaggttgttcacaatgttatatatgacataattcagaaaggtggagatgctgggaaaattacaaagggagccaaaaagttgaaactggaaaagggatccttttggatgagggaaatttggatccataccattaaaagatcaccactttggatccataccattactatctcacttacatgtgggtccacatgagtcaatgacatgtggggtccatggtatatatctaaagtttggatcttttaatggtatagatccaattgttcctttggataattatgttcaaaggggttctagattagtggatgaccaagcaagatctttgctaattcattcaaagtgataaaaaggcacatgtctctgaaacaacataagaaatgtggttcatttgatttagatggtacattccacaagtactacctctataagctaatgcatgagatgtggaaggactatatcaaagagcttatggatatgagcccatacgactccacagtatccttttgtctgttattttggacctcttatcttccttttttattttctacatatttttagcggaaataaatccatgtgttatactgaaactcaacaaaataaaagacagtctttgagtgttcttgttatgagcggcagatggctgcgagggttagaggacgatggctagggttagagggcgacagctatggttaggggcgctggggaggtcggccgcagggatttgcccacgaccggcaagagagaagggatttttcttctaatctcttgtttaccttcaattgatacaatcactcttcttatatagtgagggttacttgacccctaagcactagatctaatcttattccaaactaatctatctttatctaaacaaccttgaggggtgtgctacagtgcgccgttactgtagtgggccctcttgggccctgacagttctgctgcttttggtctcaaaattttgactcttgagtcagcggcggagtcgctgtccacccctctgggccgccggctgggctcattggcgaagttcaaaagaaatatttctttatatcaaacaaaaatactataatttgctagctaaattttttgcataatgtgggttgtccagacacctgaaagcttttggctacgctactgtctccacttgaacttttttgtcgtttaatacaaaggcaggagaagctacagatcattgcattaatgagaaagtattttagtggacaaccccacacaagcacaccacccaacatatattgaactgggttctattgagaatgctatagtgataggtggatagtataacgtgatggatttaaacccactatgtctaatgtagcaaatagttaaagggcacggatttccagactttatacaatacaataaaatgagctttcttgtataagctacgtcgagaccactcaaagactctagttttcttgaactgaaatttattgaccatatgaattatgaactaaactaaaaacactaaatcatttgttaccatataagcattatattttatgaaatatcaacgaatttgaagatttgaacaaacaagaaagacaataattaacctgagtgtgaagcaagcgcattcagagtagtggaccaactcgagcttttggaaaactttaatgtaaaccctattattgtgcctgttcctgtaatatgtacccttgagctaattacatgtcctgtcttcaccacaggaaaaataaatttactgagaaccttctttcagcagatcttcatggggcccttctaatagtggcagaacacaaagctgcttcatataaaagtgtaaacggaatcatgattcgagatactgcagagacgtttggaattatatccgaggacaaccgcttccgggtttatcaaaagctggttcagttttcgtacttcaagcagaccgctggaagttcacactgatcggcgacaagctctcgcccagggagaagttgaaggaggatcagcgtcaacaacgtgcgcaatcgctaatcagatagtttccaatgtgccagctgttctctcacaaaatttttgctccacggaatacttgcttttgtttaggtcctgccactgtagcatggtagttttagcgctctagaggcgttgacatttcttagcgacttactggcagctcgagttgtggaggggtgtgtgatcatgagccatgtactccggtgactgattattgattagtataggcgaagcaagtccatttacgtttgtttcatctagtcacacaaacctgtggcaaatatttattacgccttgtttctgtcgcc

SEQ ID NO: 59439 - DNA, 3274 bp, Zea Mays
ctcacacagttcgatccagcccaaccgaaccaaatctctagcagacgggaacctgggaacctgaaccctcaaaccccgccccttggcctcccatacctttcgcgccgaacacccgccgtcaccaaaactgacggctcctccccctctcccctctccccttttgtgattggactgaagtgggattcatatatcaggtgtttggattcttctctttcctctgctggtgaggacgtcggtttcttctttttgtgctgtttcccccctttatcttctcattcagcgatcttcaaattcaatatgttgtccgtcggattggcgctctagtctggtgggtttgctttcagatttgccgagtatcaatccgggtctccattcggtggtggctgaagcttgatttctccatgtcgctccgtgcagcttcatgaatccatgttctcaagtgtatttgatcatgattctataaacaaccatcttatattactaatctgtaggagtttttttacatgttggtggtccaagctgaaaaaaataatttaggacaaagctagattgtcttttacatttgtgattggaaggagtaggctttttcattatccagtggcagttatagacagttgttgcgctcgtgcagcttcaaatattttgggatgttgccatgttaaggtattagccttttgttgtttcagtatactagcttcctaaaggatcgatgtcggctatctccaatcagaagaaacgcaccttggaagcccttcagcaacagtatactgctgcaaaagctaagaaattgcaagatgaacaggttaagagtcagaagaagagcaattttaatacccctaagcctaaatttgatgcaccaaggggaagcaaaggtctagtaatcactcctcgacgaacatatgcccagccttctcctcataaagatgtagcattttctagttctaattgtcaacaaaagccttccacgtcctcaggatttggatggcacagaggttgttcacaatgttatatatgacataattcagaaaggtggagatgctgggaaaattacaaagggagccaaaaagttgaaactggaaaagggatccttttggatgagggaaatttggatccataccattaaaagatcaccactttggatccataccattactatctcacttacatgtgggtccacatgagtcaatgacatgtggggtccatggtatatatctaaagtttggatcttttaatggtatagatccaattgttcctttggataattatgttcaaaggggttctagattagtggatgaccaagcaagatctttgctaattcattcaaagtgataaaaaggcacatgtctctgaaacaacataagaaatgtggttcatttgatttagatggtacattccacaagtactacctctataagctaatgcatgagatgtggaaggactatatcaaagagcttatggatatgagcccatacgactccacagtatccttttgtctgttattttggacctcttatcttccttttttattttctacatatttttagcggaaataaatccatgtgttatactgaaactcaacaaaataaaagacagtctttgagtgttcttgttatgagcggcagatggctgcgagggttagaggacgatggctagggttagagggcgacagctatggttaggggcgctggggaggtcggccgcagggatttgcccacgaccggcaagagagaagggatttttcttctaatctcttgtttaccttcaattgatacaatcactcttcttatatagtgagggttacttgacccctaagcactagatctaatcttattccaaactaatctatctttatctaaacaaccttgaggggtgtgctacagtgcgccgttactgtagtgggccctcttgggccctgacagttctgctgcttttggtctcaaaattttgactcttgagtcagcggcggagtcgctgtccacccctctgggccgccggctgggctcattggcgaagttcaaaagaaatatttctttatatcaaacaaaaatactataatttgctagctaaattttttgcataatgtgggttgtccagacacctgaaagcttttggctacgctactgtctccacttgaacttttttgtcgtttaatacaaaggcaggagaagctacagatcattgcattaatgagaaagtattttagtggacaaccccacacaagcacaccacccaacatatattgaactgggttctattgagaatgctatagtgataggtggatagtataacgtgatggatttaaacccactatgtctaatgtagcaaatagttaaagggcacggatttccagactttatacaatacaataaaatgagctttcttgtataagctacgtcgagaccactcaaagactctagttttcttgaactgaaatttattgaccatatgaattatgaactaaactaaaaacactaaatcatttgttaccatataagcattatattttatgaaatatcaacgaatttgaagatttgaacaaacaagaaagacaataattaacctgagtgtgaagcaagcgcattcagagtagtggaccaactcgagcttttggaaaactttaatgtaaaccctattattgtgcctgttcctgtaatatgtacccttgagctaattacatgtcctgtcttcaccacaggaaaaataaatttactgagaaccttctttcagcagatcttcatggggcccttctaatagtggcagaacacaaagctgcttcatataaaagtgtaaacggaatcatgattcgagatactgcagagacgtttggaattatatccgaggacaaccgcttccgggtttatcaaaagctggttcagttttcgtacttcaagcagaccgctggaagttcacactgatcggcgacaagctctcgcccagggagaagttgaaggaggatcagcgtcaacaacgtgcgcaatcgctaatcagatagtttccaatgtgccagctgttctctcacaaaatttttgctccacggaatacttgcttttgtttaggtcctgccactgtagcatggtagttttagcgctctagaggcgttgacatttcttagcgacttactggcagctcgagttgtggaggggtgtgtgatcatgagccatgtactccggtgactgattattgattagtataggcgaagcaagtccatttacgtttgtttcatctagtcacacaaacctgtggcaaatatttattacgccttgtttctgtcgcc

SEQ ID NO: 59440 - DNA, 2006 bp, Zea Mays
cagttcgatccagcccaaccgaaccaaatctctagcagacgggaacctgggaacctgaaccctcaaaccccgccccttggcctcccatacctttcgcgccgaacacccgccgtcaccaaaactgacggctcctccccctctcccctctccccttttgtgattggactgaagtgggattcatatatcaggtgtttggattcttctctttcctctgctgatttgccgagtatcaatccgggtctccattcggtggtggctgaagcttgatttctccatgtcgctccgtgcagcttcatgaatccatgttctcaagtgtatttgatcatgattctataaacaaccatcttatattactaatctgtaggagtttttttacatgttggtggtccaagctgaaaaaaataatttaggacaaagctagattgtcttttacatttgtgattggaaggagtaggctttttcattatccagtggcagttatagacagttgttgcgctcgtgcagcttcaaatattttgggatgttgccatgttaaggtattagccttttgttgtttcagtatactagcttcctaaaggatcgatgtcggctatctccaatcagaagaaacgcaccttggaagcccttcagcaacagtatactgctgcaaaagctaagaaattgcaagatgaacaggttaagagtcagaagaagagcaattttaatacccctaagcctaaatttgatgcaccaaggggaagcaaaggtctagtaatcactcctcgacgaacatatgcccagccttctcctcataaagatgtagcattttctagttctaattgtcaacaaaagccttccacgtcctcaggtgaagaaatcaatcctgtgtatgctgaactttcttgtgcttttcatgacactttgtccaaaggatttggatggcacagaggttgttcacaatgttatatatgacataattcagaaaggtggagatgctgggaaaattacaaagggagccaaaaagttgaaactggaaaagggatccttttggatgagggaaatttggatccataccattaaaagatcaccactttggatccataccattactatctcacttacatgtgggtccacatgagtcaatgacatgtggggtccatggtatatatctaaagtttggatcttttaatggtatagatccaattgttcctttggataattatgttcaaaggggttctagattagtggatgaccaagcaagatctttgctaattcattcaaagtgataaaaaggcacatgtctctgaaacaacataagaaatgtggttcatttgatttagatggtacattccacaagtactacctctataagctaatgcatgagatgtggaaggactatatcaaagagcttatggatatgagcccatacgactccacagtatccttttgaaaaataaatttactgagaaccttctttcagcagatcttcatggggcccttctaatagtggcagaacacaaagctgcttcatataaaagtgtaaacggaatcatgattcgagatactgcagagacgtttggaattatatccgaggacaaccgcttccgggtttatcaaaagctggttcagttttcgtacttcaagcagaccgctggaagttcacactgatcggcgacaagctctcgcccagggagaagttgaaggaggatcagcgtcaacaacgtgcgcaatcgctaatcagatagtttccaatgtgccagctgttctctcacaaaatttttgctccacggaatacttgcttttgtttaggtcctgccactgtagcatggtagttttagcgctctagaggcgttgacatttcttagcgacttactggcagctcgagttgtggaggggtgtgtgatcatgagccatgtactccggtgactgattattgattagtataggcgaagcaagtccatttacgtttgtttcatctagtcacacaaacctgtggcaaatatttattacgccttgtttctgtcgcc

SEQ ID NO: 59441 - DNA, 1623 bp, Zea Mays
ggaacctgggaacctgaaccctcaaaccccgccccttggcctcccatacctttcgcgccgaacacccgccgtcaccaaaactgacggctcctccccctctcccctctccccttttgtgattggactgaagtgggattcatatatcaggtgtttggattcttctctttcctctgctgtatactagcttcctaaaggatcgatgtcggctatctccaatcagaagaaacgcaccttggaagcccttcagcaacagtatactgctgcaaaagctaagaaattgcaagatgaacaggttaagagtcagaagaagagcaattttaatacccctaagcctaaatttgatgcaccaaggggaagcaaaggtctagtaatcactcctcgacgaacatatgcccagccttctcctcataaagatgtagcattttctagttctaattgtcaacaaaagccttccacgtcctcaggtgaagaaatcaatcctgtgtatgctgaactttcttgtgcttttcatgacactttgtccaaaggatttggatggcacagaggttgttcacaatgttatatatgacataattcagaaaggtggagatgctgggaaaattacaaagggagccaaaaagttgaaactggaaaagggatccttttggatgagggaaatttggatccataccattaaaagatcaccactttggatccataccattactatctcacttacatgtgggtccacatgagtcaatgacatgtggggtccatggtatatatctaaagtttggatcttttaatggtatagatccaattgttcctttggataattatgttcaaaggggttctagattagtggatgaccaagcaagatctttgctaattcattcaaagtgataaaaaggcacatgtctctgaaacaacataagaaatgtggttcatttgatttagatggtacattccacaagtactacctctataagctaatgcatgagatgtggaaggactatatcaaagagcttatggatatgagcccatacgactccacagtatccttttgaaaaataaatttactgagaaccttctttcagcagatcttcatggggcccttctaatagtggcagaacacaaagctgcttcatataaaagtgtaaacggaatcatgattcgagatactgcagagacgtttggaattatatccgaggacaaccgcttccgggtttatcaaaagctggttcagttttcgtacttcaagcagaccgctggaagttcacactgatcggcgacaagctctcgcccagggagaagttgaaggaggatcagcgtcaacaacgtgcgcaatcgctaatcagatagtttccaatgtgccagctgttctctcacaaaatttttgctccacggaatacttgcttttgtttaggtcctgccactgtagcatggtagttttagcgctctagaggcgttgacatttcttagcgacttactggcagctcgagttgtggaggggtgtgtgatcatgagccatgtactccggtgactgattattgattagtataggcgaagcaagtccatttacgtttgtttcatctagtcacacaaacctgtggcaaatatttattacgccttgtttctgtcgcc

SEQ ID NO: 59442 - DNA, 3040 bp, Zea Mays
ctgggaacctgaaccctcaaaccccgccccttggcctcccatacctttcgcgccgaacacccgccgtcaccaaaactgacggctcctccccctctcccctctccccttttgtgattggactgaagtgggattcatatatcaggtgtttggattcttctctttcctctgctggtgaggacgtcggtttcttctttttgtgctgtttcccccctttatcttctcattcagcgatcttcaaattcaatatgttgtccgtcggattggcgctctagtctggtgggtttgctttcagatttgccgagtatcaatccgggtctccattcggtggtggctgaagcttgatttctccatgtcgctccgtgcagcttcatgaatccatgttctcaagttatactagcttcctaaaggatcgatgtcggctatctccaatcagaagaaacgcaccttggaagcccttcagcaacagtatactgctgcaaaagctaagaaattgcaagatgaacaggttaagagtcagaagaagagcaattttaatacccctaagcctaaatttgatgcaccaaggggaagcaaaggtctagtaatcactcctcgacgaacatatgcccagccttctcctcataaagatgtagcattttctagttctaattgtcaacaaaagccttccacgtcctcaggtgaagaaatcaatcctgtgtatgctgaactttcttgtgcttttcatgacactttgtccaaaggatttggatggcacagaggttgttcacaatgttatatatgacataattcagaaaggtggagatgctgggaaaattacaaagggagccaaaaagttgaaactggaaaagggatccttttggatgagggaaatttggatccataccattaaaagatcaccactttggatccataccattactatctcacttacatgtgggtccacatgagtcaatgacatgtggggtccatggtatatatctaaagtttggatcttttaatggtatagatccaattgttcctttggataattatgttcaaaggggttctagattagtggatgaccaagcaagatctttgctaattcattcaaagtgataaaaaggcacatgtctctgaaacaacataagaaatgtggttcatttgatttagatggtacattccacaagtactacctctataagctaatgcatgagatgtggaaggactatatcaaagagcttatggatatgagcccatacgactccacagtatccttttgtctgttattttggacctcttatcttccttttttattttctacatatttttagcggaaataaatccatgtgttatactgaaactcaacaaaataaaagacagtctttgagtgttcttgttatgagcggcagatggctgcgagggttagaggacgatggctagggttagagggcgacagctatggttaggggcgctggggaggtcggccgcagggatttgcccacgaccggcaagagagaagggatttttcttctaatctcttgtttaccttcaattgatacaatcactcttcttatatagtgagggttacttgacccctaagcactagatctaatcttattccaaactaatctatctttatctaaacaaccttgaggggtgtgctacagtgcgccgttactgtagtgggccctcttgggccctgacagttctgctgcttttggtctcaaaattttgactcttgagtcagcggcggagtcgctgtccacccctctgggccgccggctgggctcattggcgaagttcaaaagaaatatttctttatatcaaacaaaaatactataatttgctagctaaattttttgcataatgtgggttgtccagacacctgaaagcttttggctacgctactgtctccacttgaacttttttgtcgtttaatacaaaggcaggagaagctacagatcattgcattaatgagaaagtattttagtggacaaccccacacaagcacaccacccaacatatattgaactgggttctattgagaatgctatagtgataggtggatagtataacgtgatggatttaaacccactatgtctaatgtagcaaatagttaaagggcacggatttccagactttatacaatacaataaaatgagctttcttgtataagctacgtcgagaccactcaaagactctagttttcttgaactgaaatttattgaccatatgaattatgaactaaactaaaaacactaaatcatttgttaccatataagcattatattttatgaaatatcaacgaatttgaagatttgaacaaacaagaaagacaataattaacctgagtgtgaagcaagcgcattcagagtagtggaccaactcgagcttttggaaaactttaatgtaaaccctattattgtgcctgttcctgtaatatgtacccttgagctaattacatgtcctgtcttcaccacaggaaaaataaatttactgagaaccttctttcagcagatcttcatggggcccttctaatagtggcagaacacaaagctgcttcatataaaagtgtaaacggaatcatgattcgagatactgcagagacgtttggaattatatccgaggacaaccgcttccgggtttatcaaaagctggttcagttttcgtacttcaagcagaccgctggaagttcacactgatcggcgacaagctctcgcccagggagaagttgaaggaggatcagcgtcaacaacgtgcgcaatcgctaatcagatagtttccaatgtgccagctgttctctcacaaaatttttgctccacggaatacttgcttttgtttaggtcctgccactgtagcatggtagttttagcgctctagaggcgttgacatttcttagcgacttactggcagctcgagttgtggaggggtgtgtgatcatgagccatgtactccggtgactgattattgattagtataggcgaagcaagtccatttacgtttgtttcatctagtcacacaaacctgtggcaaatatttattacgccttgtttctgtcgcc

SEQ ID NO: 59443 - DNA, 1445 bp, Zea Mays
cctgaaccctcaaaccccgccccttggcctcccatacctttcgcgccgaacacccgccgtcaccaaaactgacggctcctccccctctcccctctccccttttgtgattggactgaagtgggattcatatatcagtatactagcttcctaaaggatcgatgtcggctatctccaatcagaagaaacgcaccttggaagcccttcagcaacagtatactgctgcaaaagctaagaaattgcaagatgaacaggttaagagtcagaagaagagcaattttaatacccctaagcctaaatttgatgcaccaaggggaagcaaaggtctagtaatcactcctcgacgaacatatgcccagccttctcctcataaagatgtagcattttctagttctaattgtcaacaaaagccttccacgtcctcagaaaggtggagatgctgggaaaattacaaagggagccaaaaagttgaaactggaaaagggatccttttggatgagggaaatttggatccataccattaaaagatcaccactttggatccataccattactatctcacttacatgtgggtccacatgagtcaatgacatgtggggtccatggtatatatctaaagtttggatcttttaatggtatagatccaattgttcctttggataattatgttcaaaggggttctagattagtggatgaccaagcaagatctttgctaattcattcaaagtgataaaaaggcacatgtctctgaaacaacataagaaatgtggttcatttgatttagatggtacattccacaagtactacctctataagctaatgcatgagatgtggaaggactatatcaaagagcttatggatatgagcccgaaaaataaatttactgagaaccttctttcagcagatcttcatggggcccttctaatagtggcagaacacaaagctgcttcatataaaagtgtaaacggaatcatgattcgagatactgcagagacgtttggaattatatccgaggacaaccgcttccgggtttatcaaaagctggttcagttttcgtacttcaagcagaccgctggaagttcacactgatcggcgacaagctctcgcccagggagaagttgaaggaggatcagcgtcaacaacgtgcgcaatcgctaatcagatagtttccaatgtgccagctgttctctcacaaaatttttgctccacggaatacttgcttttgtttaggtcctgccactgtagcatggtagttttagcgctctagaggcgttgacatttcttagcgacttactggcagctcgagttgtggaggggtgtgtgatcatgagccatgtactccggtgactgattattgattagtataggcgaagcaagtccatttacgtttgtttcatctagtcacacaaacctgtggcaaatatttattacgccttgtttctgtcgcc

SEQ ID NO: 59444 - DNA, 2787 bp, Zea Mays
gaaccctcaaaccccgccccttggcctcccatacctttcgcgccgaacacccgccgtcaccaaaactgacggctcctccccctctcccctctccccttttgtgattggactgaagtgggattcatatatcaggtgtttggattcttctctttcctctgctggtgaggacgtcggtttcttctttttgtgctgtttcccccctttatcttctcattcagcgatcttcaaattcaatatgttgtccgtcggattggcgctctagtctggtgggtttgctttcagatttgccgagtatcaatccgggtctccattcggtggtggctgaagcttgatttctccatgtcgctccgtgcagcttcatgaatccatgttctcaagtgtatttgatcatgattctataaacaaccatcttatattactaatctgtaggagtttttttacatgttggtggtccaagctgaaaaaaataatttaggacaaagctagattgtcttttacatttgtgattggaaggagtaggctttttcattatccagtggcagttatagacagttgttgcgctcgtgcagcttcaaatattttgggatgttgccatgttaaggtattagccttttgttgtttcagtatactagcttcctaaaggatcgatgtcggctatctccaatcagaagaaacgcaccttggaagcccttcagcaacagtatactgctgcaaaagctaagaaattgcaagatgaacaggttaagagtcagaagaagagcaattttaatacccctaagcctaaatttgatgcaccaaggggaagcaaaggtctagtaatcactcctcgacgaacatatgcccagccttctcctcataaagatgtagcattttctagttctaattgtcaacaaaagccttccacgtcctcaggtactacctctataagctaatgcatgagatgtggaaggactatatcaaagagcttatggatatgagcccatacgactccacagtatccttttgtctgttattttggacctcttatcttccttttttattttctacatatttttagcggaaataaatccatgtgttatactgaaactcaacaaaataaaagacagtctttgagtgttcttgttatgagcggcagatggctgcgagggttagaggacgatggctagggttagagggcgacagctatggttaggggcgctggggaggtcggccgcagggatttgcccacgaccggcaagagagaagggatttttcttctaatctcttgtttaccttcaattgatacaatcactcttcttatatagtgagggttacttgacccctaagcactagatctaatcttattccaaactaatctatctttatctaaacaaccttgaggggtgtgctacagtgcgccgttactgtagtgggccctcttgggccctgacagttctgctgcttttggtctcaaaattttgactcttgagtcagcggcggagtcgctgtccacccctctgggccgccggctgggctcattggcgaagttcaaaagaaatatttctttatatcaaacaaaaatactataatttgctagctaaattttttgcataatgtgggttgtccagacacctgaaagcttttggctacgctactgtctccacttgaacttttttgtcgtttaatacaaaggcaggagaagctacagatcattgcattaatgagaaagtattttagtggacaaccccacacaagcacaccacccaacatatattgaactgggttctattgagaatgctatagtgataggtggatagtataacgtgatggatttaaacccactatgtctaatgtagcaaatagttaaagggcacggatttccagactttatacaatacaataaaatgagctttcttgtataagctacgtcgagaccactcaaagactctagttttcttgaactgaaatttattgaccatatgaattatgaactaaactaaaaacactaaatcatttgttaccatataagcattatattttatgaaatatcaacgaatttgaagatttgaacaaacaagaaagacaataattaacctgagtgtgaagcaagcgcattcagagtagtggaccaactcgagcttttggaaaactttaatgtaaaccctattattgtgcctgttcctgtaatatgtacccttgagctaattacatgtcctgtcttcaccacaggaaaaataaatttactgagaaccttctttcagcagatcttcatggggcccttctaatagtggcagaacacaaagctgcttcatataaaagtgtaaacggaatcatgattcgagatactgcagagacgtttggaattatatccgaggacaaccgcttccgggtttatcaaaagctggttcagttttcgtacttcaagcagaccgctggaagttcacactgatcggcgacaagctctcgcccagggagaagttgaaggaggatcagcgtcaacaacgtgcgcaatcgctaatcagatagtttccaatgtgccagctgttctctcacaaaatttttgctccacggaatacttgcttttgtttaggtcctgccactgtagcatggtagttttagcgctctagaggcgttgacatttcttagcgacttactggcagctcgagttgtggaggggtgtgtgatcatgagccatgtactccggtgactgattattgattagtataggcgaagcaagtccatttacgtttgtttcatctagtcacacaaacctgtggcaaatatttattacgccttgtttctgtcgcc

SEQ ID NO: 59445 - DNA, 2642 bp, Zea Mays
ctcaaaccccgccccttggcctcccatacctttcgcgccgaacacccgccgtcaccaaaactgacggctcctccccctctcccctctccccttttgtgattggactgaagtgggattcatatatcaggtgtttggattcttctctttcctctgctgtatactagcttcctaaaggatcgatgtcggctatctccaatcagaagaaacgcaccttggaagcccttcagcaacagtatactgctgcaaaagctaagaaattgcaagatgaacaggttaagagtcagaagaagagcaattttaatacccctaagcctaaatttgatgcaccaaggggaagcaaaggtgaagaaatcaatcctgtgtatgctgaactttcttgtgcttttcatgacactttgtccaaaggatttggatggcacagaggttgttcacaatgttatatatgacataattcagaaaggtggagatgctgggaaaattacaaagggagccaaaaagttgaaactggaaaagggatccttttggatgagggaaatttggatccataccattaaaagatcaccactttggatccataccattactatctcacttacatgtgggtccacatgagtcaatgacatgtggggtccatggtatatatctaaagtttggatcttttaatggtatagatccaattgttcctttggataattatgttcaaaggggttctagattagtggatgaccaagcaagatctttgctaattcattcaaagtgataaaaaggcacatgtctctgaaacaacataagaaatgtggttcatttgatttagatggtacattccacaagtactacctctataagctaatgcatgagatgtggaaggactatatcaaagagcttatggatatgagcccatacgactccacagtatccttttgtctgttattttggacctcttatcttccttttttattttctacatatttttagcggaaataaatccatgtgttatactgaaactcaacaaaataaaagacagtctttgagtgttcttgttatgagcggcagatggctgcgagggttagaggacgatggctagggttagagggcgacagctatggttaggggcgctggggaggtcggccgcagggatttgcccacgaccggcaagagagaagggatttttcttctaatctcttgtttaccttcaattgatacaatcactcttcttatatagtgagggttacttgacccctaagcactagatctaatcttattccaaactaatctatctttatctaaacaaccttgaggggtgtgctacagtgcgccgttactgtagtgggccctcttgggccctgacagttctgctgcttttggtctcaaaattttgactcttgagtcagcggcggagtcgctgtccacccctctgggccgccggctgggctcattggcgaagttcaaaagaaatatttctttatatcaaacaaaaatactataatttgctagctaaattttttgcataatgtgggttgtccagacacctgaaagcttttggctacgctactgtctccacttgaacttttttgtcgtttaatacaaaggcaggagaagctacagatcattgcattaatgagaaagtattttagtggacaaccccacacaagcacaccacccaacatatattgaactgggttctattgagaatgctatagtgataggtggatagtataacgtgatggatttaaacccactatgtctaatgtagcaaatagttaaagggcacggatttccagactttatacaatacaataaaatgagctttcttgtataagctacgtcgagaccactcaaagactctagttttcttgaactgaaatttattgaccatatgaattatgaactaaactaaaaacactaaatcatttgttaccatataagcattatattttatgaaatatcaacgaatttgaagatttgaacaaacaagaaagacaataattaacctgagtgtgaagcaagcgcattcagagtagtggaccaactcgagcttttggaaaactttaatgtaaaccctattattgtgcctgttcctgtaatatgtacccttgagctaattacatgtcctgtcttcaccacaggaaaaataaatttactgagaaccttctttcagcagatcttcatggggcccttctaatagagacgtttggaattatatccgaggacaaccgcttccgggtttatcaaaagctggttcagttttcgtacttcaagcagaccgctggaagttcacactgatcggcgacaagctctcgcccagggagaagttgaaggaggatcagcgtcaacaacgtgcgcaatcgctaatcagatagtttccaatgtgccagctgttctctcacaaaatttttgctccacggaatacttgcttttgtttaggtcctgccactgtagcatggtagttttagcgctctagaggcgttgacatttcttagcgacttactggcagctcgagttgtggaggggtgtgtgatcatgagccatgtactccggtgactgattattgattagtataggcgaagcaagtccatttacgtttgtttcatctagtcacacaaacctgtggcaaatatttattacgccttgtttctgtcgcc

SEQ ID NO: 59446 - DNA, 2515 bp, Zea Mays
cccatacctttcgcgccgaacacccgccgtcaccaaaactgacggctcctccccctctcccctctccccttttgtgattggactgaagtgggattcatatatcaggtgtttggattcttctctttcctctgctggtgaggacgtcggtttcttctttttgtgctgtttcccccctttatcttctcattcagcgatcttcaaattcaatatgttgtccgtcggattggcgctctagtctggtgggtttgctttcagatttgccgagtatcaatccgggtctccattcggtggtggctgaagcttgatttctccatgtcgctccgtgcagcttcatgaatccatgttctcaagttatactagcttcctaaaggatcgatgtcggctatctccaatcagaagaaacgcaccttggaagcccttcagcaacagtatactgctgcaaaagctaagaaattgcaagatgaacaggttaagagtcagaagaagagcaattttaatacccctaagcctaaatttgatgcaccaaggggaagcaaaggtctagtaatcactcctcgacgaacatatgcccagccttctcctcataaagatgtagcattttctagttctaattgtcaacaaaagccttccacgtcctcaggtactacctctataagctaatgcatgagatgtggaaggactatatcaaagagcttatggatatgagcccatacgactccacagtatccttttgtctgttattttggacctcttatcttccttttttattttctacatatttttagcggaaataaatccatgtgttatactgaaactcaacaaaataaaagacagtctttgagtgttcttgttatgagcggcagatggctgcgagggttagaggacgatggctagggttagagggcgacagctatggttaggggcgctggggaggtcggccgcagggatttgcccacgaccggcaagagagaagggatttttcttctaatctcttgtttaccttcaattgatacaatcactcttcttatatagtgagggttacttgacccctaagcactagatctaatcttattccaaactaatctatctttatctaaacaaccttgaggggtgtgctacagtgcgccgttactgtagtgggccctcttgggccctgacagttctgctgcttttggtctcaaaattttgactcttgagtcagcggcggagtcgctgtccacccctctgggccgccggctgggctcattggcgaagttcaaaagaaatatttctttatatcaaacaaaaatactataatttgctagctaaattttttgcataatgtgggttgtccagacacctgaaagcttttggctacgctactgtctccacttgaacttttttgtcgtttaatacaaaggcaggagaagctacagatcattgcattaatgagaaagtattttagtggacaaccccacacaagcacaccacccaacatatattgaactgggttctattgagaatgctatagtgataggtggatagtataacgtgatggatttaaacccactatgtctaatgtagcaaatagttaaagggcacggatttccagactttatacaatacaataaaatgagctttcttgtataagctacgtcgagaccactcaaagactctagttttcttgaactgaaatttattgaccatatgaattatgaactaaactaaaaacactaaatcatttgttaccatataagcattatattttatgaaatatcaacgaatttgaagatttgaacaaacaagaaagacaataattaacctgagtgtgaagcaagcgcattcagagtagtggaccaactcgagcttttggaaaactttaatgtaaaccctattattgtgcctgttcctgtaatatgtacccttgagctaattacatgtcctgtcttcaccacaggaaaaataaatttactgagaaccttctttcagcagatcttcatggggcccttctaatagtggcagaacacaaagctgcttcatataaaagtgtaaacggaatcatgattcgagatactgcagagacgtttggaattatatccgaggacaaccgcttccgggtttatcaaaagctggttcagttttcgtacttcaagcagaccgctggaagttcacactgatcggcgacaagctctcgcccagggagaagttgaaggaggatcagcgtcaacaacgtgcgcaatcgctaatcagatagtttccaatgtgccagctgttctctcacaaaatttttgctccacggaatacttgcttttgtttaggtcctgccactgtagcatggtagttttagcgctctagaggcgttgacatttcttagcgacttactggcagctcgagttgtggaggggtgtgtgatcatgagccatgtactccggtgactgattattgattagtataggcgaagcaagtccatttacgtttgtttcatctagtcacacaaacctgtggcaaatatttattacgccttgtttctgtcgcc

SEQ ID NO: 59447 - DNA, 1958 bp, Zea Mays
cccatacctttcgcgccgaacacccgccgtcaccaaaactgacggctcctccccctctcccctctccccttttgtgattggactgaagtgggattcatatatcaggtgtttggattcttctctttcctctgctggtgaggacgtcggtttcttctttttgtgctgtttcccccctttatcttctcattcagcgatcttcaaattcaatatgttgtccgtcggattggcgctctagtctggtgggtttgctttcagatttgccgagtatcaatccgggtctccattcggtggtggctgaagcttgatttctccatgtcgctccgtgcagcttcatgaatccatgttctcaagtgtatttgatcatgattctataaacaaccatcttatattactaatctgtaggagtttttttacatgttggtggtccaagctgaaaaaaataatttaggacaaagctagattgtcttttacatttgtgattggaaggagtaggctttttcattatccagtggcagttatagacagttgttgcgctcgtgcagcttcaaatattttgggatgttgccatgttaaggtattagccttttgttgtttcagtatactagcttcctaaaggatcgatgtcggctatctccaatcagaagaaacgcaccttggaagcccttcagcaacagtatactgctgcaaaagctaagaaattgcaagatgaacaggttaagagtcagaagaagagcaattttaatacccctaagcctaaatttgatgcaccaaggggaagcaaaggtctagtaatcactcctcgacgaacatatgcccagccttctcctcataaagatgtagcattttctagttctaattgtcaacaaaagccttccacgtcctcaggatttggatggcacagaggttgttcacaatgttatatatgacataattcagaaaggtggagatgctgggaaaattacaaagggagccaaaaagttgaaactggaaaagggatccttttggatgagggaaatttggatccataccattaaaagatcaccactttggatccataccattactatctcacttacatgtgggtccacatgagtcaatgacatgtggggtccatggtatatatctaaagtttggatcttttaatggtatagatccaattgttcctttggataattatgttcaaaggggttctagattagtggatgaccaagcaagatctttgctaattcattcaaagtgataaaaaggcacatgtctctgaaacaacataagaaatgtggttcatttgatttagatggtacattccacaagtactacctctataagctaatgcatgagatgtggaaggactatatcaaagagcttatggatatgagcccgaaaaataaatttactgagaaccttctttcagcagatcttcatggggcccttctaatagtggcagaacacaaagctgcttcatataaaagtgtaaacggaatcatgattcgagatactgcagagacgtttggaattatatccgaggacaaccgcttccgggtttatcaaaagctggttcagttttcgtacttcaagcagaccgctggaagttcacactgatcggcgacaagctctcgcccagggagaagttgaaggaggatcagcgtcaacaacgtgcgcaatcgctaatcagatagtttccaatgtgccagctgttctctcacaaaatttttgctccacggaatacttgcttttgtttaggtcctgccactgtagcatggtagttttagcgctctagaggcgttgacatttcttagcgacttactggcagctcgagttgtggaggggtgtgtgatcatgagccatgtactccggtgactgattattgattagtataggcgaagcaagtccatttacgtttgtttcatctagtcacacaaacctgtggcaaatatttattacgccttgtttctgtcgcc

SEQ ID NO: 59448 - DNA, 3502 bp, Zea Mays
gtttcatctgcgcttcgccggcggcaaccgcgctggacgaggtagcgctgctatcaaagtatcaaacaccttgtgctgtcaacatttatgagtgcaaggcagtattgctaagagtatcttgccatggcatctcctgcttccgtcaccaacctcggaagcaatgggaggtctggcccgctcccggctgcagctgcaaggagggcgcagttggtcacaaggatcagattcacggggttcgatggcataaggcgatggcagtatgagcctgggaggctttgcaggtgtatggtcgtcactaatctgattgaggagaaggttgttcagttctcgtcaagagggagtgtcagtgtgaaagctgatgatgacaatgatctgcttctgaagccgccacagaagccagtccggtcaaatggacccccggagagcatgaaaacagcatcactgccggatcagaagccagcaggggcaactttagacgacagagagaaggtcagagagtcactggacgctgtattggagaaagcagagaagcttgaggcctccagctttggtaatgcagatggtggcaaccttggttcaaggcagagtaatgtttccatgagtaatggtccaggaccgacagcagtggaggaaggtggtaattcaaggaagacaaaaacactaaagagtgtatggcggaaggggaaccctgtgccaactgtacgtaaggtcattagagagcaaccaagaactgaaacaaggagtcagtctatacctgtggctaaaccttcagtgtcatctgcatctaagccttcccctctgctactatctaaaccttctgtagcacagcctcctcgtcggcctatcaagtctgatacatcaaatgagaaaaaaggacccatccttattgataaatttgcttccaagagggcagcagttgatccgattgtacctgaggaattgttagaccctctaaaaccagtacgaggcccaccagcaaaagtcagagttgatcgtcgtaaaaaaccagacacacaagctggttccagacgacgtatgtccaatgatgatggattagttgatgaggatactactgacgtgccaatttctggtgttccagtgcgcaagggtaggaggtggagcaaggcaaaacgccgcgctgcaaggctagaggctatgcaagctgaagagccagtcagagttgagatccttgaagttggtgaagaaggtatgctgattgaggacttggcatatgagttggcaattggtgaatcagaaattttacgattcttatcggtgagaggagttatgcttgacaatgttcagactctagataaagatttggttaagatggtttgcatggaatatgatgttgaagtactagaaagtggtcctgtgaaagtggaggaaatggctaagaagaaggagttccttgatgatgaagatttggataaattggaagtgaggcctcccattgtgactatcatgggccatgttgatcatgggaagacaactctgttggattatatacgcaagagcaagttggtggcatctgaagctggtggtataacacaagggattggagcatatcaggttcttttaccagtagatggaaaccatcaagcctgtgtttttctggatactccaggacatgaggcgtttggtgcaatgagagctcgaggagctagagtaaccgatatctgtattgttgttgttgctgcggatgatggtgttcggccacaaacaagtgaggcaattgcacatgcaagggcagcaggggtgccaattataatagcaataaacaagatagacaaggagggagctaatgcagaacgagttatgcaagaactttcccaaattgggataatgccagaaatgtggggtggtgataccccaatggtcgagataagtgctcttactggggataatgttgatgaacttctggaaactgtcatgcttgttgcagagttgcaagaattaaaggcaaatccacataggaatgcgaagggcactgttattgaagcatgccttgacaaggccaaagggcctcttgctaccttagttgttcagaatggaaccctaaacaaagctgatattattgtgtgtggtgaagcttatggaaagatccgtgcattgtatgatgactgtgggaagctcgttgacaaagcaggaccatccaatgcagtgcaggttattggcctcaataacgttccccttgccggtgatgaatttgaggttgttgacaaccttgatgttgcacgtgaaagggcgaatgggcgtgctgaagcactgcgcatagaaaggatatctgcaaaagctggggaaggaaaagtcacactctcagctattgcagcatcggtttcatctgcgaagcaagttggaattgatacacatgagctaaatgttatccttaaagttgattttcagggttcaatcgaggctattaggcaagccatccaaactcttccacaagaaaatgtctctctgagattcctccttcaaggtccaggagatgtgagtgttagtgatgttgatctggctgttgcttcggaaggaattatatttggctttaatgtcagagcaccaggatcagttaaaaactatgctaagaagaaaggtgttgaaattcggatgtacaaagtgatctatgatttgattgatgatttacggaaggccatggaaggtcttctcgaacccgctgaggaggaagtaccaattggttcggcaaaagttcgagctgtctttagtagtggcagtggaaaggtggccggatgcatgattacaacaggaaaagttgttcaagattgtaatgtgcgggttcttcgtaaagggaaagaagtatatgtgggttcgcttgattccttgagaagggtgaaagaaactgtgaaggaggttggtgctgggctagagtgtggtattggggtagatgacttcgatgaatgggaggaaggtgacatcatagaggcattcaataccgtgaataaggcaagaaccctcgaggaggcctctgctaccgtgactgccgcactcaaggatgcaggggtccagctgtagaattggcaacacgctgatactcttttttattaatggtatgaaatgttaatttatatatactttgaagctgaatggtgagctgaagctattgtgctgaagctgttgtgagctggaccggtggaccgtttccctgattccttcggtggtggctgaagctgaatggtgagctgctggagagtggagacgtggagtggtggccggtgggcgcctgggcggtggctgccggctggtgcagactgtgcacttgtgcagtgcagtggcgctaatatattgtgtgtggctgtggaagatgcatgtgtggatcggctgtctgtagtgagatggaagatactgtatatagcatatcaaaccatatattcatcgtatatacattaattattgatattgaattttgtcggtcaagcgtatgggccggccaagccaaactgtatttgccgaaagccgcttttgaatcgccgggagtggcaag

SEQ ID NO: 59449 - DNA, 3384 bp, Zea Mays
cacaatttgattttgtatttgattatcgaacagcaatgggaggtctggcccgctcccggctgcagctgcaaggagggcgcagttggtcacaaggatcagattcacggggttcgatggcataaggcgatggcagtatgagcctgggaggctttgcaggtgtatggtcgtcactaatctgattgaggagaaggttgttcagttctcgtcaagagggagtgtcagtgtgaaagctgatgatgacaatgatctgcttctgaagccgccacagaagccagtccggtcaaatggacccccggagagcatgaaaacagcatcactgccggatcagaagccagcaggggcaactttagacgacagagagaaggtcagagagtcactggacgctgtattggagaaagcagagaagcttgaggcctccagctttggtaatgcagatggtggcaaccttggttcaaggcagagtaatgtttccatgagtaatggtccaggaccgacagcagtggaggaaggtggtaattcaaggaagacaaaaacactaaagagtgtatggcggaaggggaaccctgtgccaactgtacgtaaggtcattagagagcaaccaagaactgaaacaaggagtcagtctatacctgtggctaaaccttcagtgtcatctgcatctaagccttcccctctgctactatctaaaccttctgtagcacagcctcctcgtcggcctatcaagtctgatacatcaaatgagaaaaaaggacccatccttattgataaatttgcttccaagagggcagcagttgatccgattgtacctgaggaattgttagaccctctaaaaccagtacgaggcccaccagcaaaagtcagagttgatcgtcgtaaaaaaccagacacacaagctggttccagacgacgtatgtccaatgatgatggattagttgatgaggatactactgacgtgccaatttctggtgttccagtgcgcaagggtaggaggtggagcaaggcaaaacgccgcgctgcaaggctagaggctatgcaagctgaagagccagtcagagttgagatccttgaagttggtgaagaaggtatgctgattgaggacttggcatatgagttggcaattggtgaatcagaaattttacgattcttatcggtgagaggagttatgcttgacaatgttcagactctagataaagatttggttaagatggtttgcatggaatatgatgttgaagtactagaaagtggtcctgtgaaagtggaggaaatggctaagaagaaggagttccttgatgatgaagatttggataaattggaagtgaggcctcccattgtgactatcatgggccatgttgatcatgggaagacaactctgttggattatatacgcaagagcaagttggtggcatctgaagctggtggtataacacaagggattggagcatatcaggttcttttaccagtagatggaaaccatcaagcctgtgtttttctggatactccaggacatgagatctcaggcgtttggtgcaatgagagctcgaggagctagagtaaccgatatctgtattgttgttgttgctgcggatgatggtgttcggccacaaacaagtgaggcaattgcacatgcaagggcagcaggggtgccaattataatagcaataaacaagatagacaaggagggagctaatgcagaacgagttatgcaagaactttcccaaattgggataatgccagaaatgtggggtggtgataccccaatggtcgagataagtgctcttactggggataatgttgatgaacttctggaaactgtcatgcttgttgcagagttgcaagaattaaaggcaaatccacataggaatgcgaagggcactgttattgaagcatgccttgacaaggccaaagggcctcttgctaccttagttgttcagaatggaaccctaaacaaagctgatattattgtgtgtggtgaagcttatggaaagatccgtgcattgtatgatgactgtgggaagctcgttgacaaagcaggaccatccaatgcagtgcaggttattggcctcaataacgttccccttgccggtgatgaatttgaggttgttgacaaccttgatgttgcacgtgaaagggcgaatgggcgtgctgaagcactgcgcatagaaaggatatctgcaaaagctggggaaggaaaagtcacactctcagctattgcagcatcggtttcatctgcgaagcaagttggaattgatacacatgagctaaatgttatccttaaagttgattttcagggttcaatcgaggctattaggcaagccatccaaactcttccacaagaaaatgtctctctgagattcctccttcaaggtccaggagatgtgagtgttagtgatgttgatctggctgttgcttcggaaggaattatatttggctttaatgtcagagcaccaggatcagttaaaaactatgctaagaagaaaggtgttgaaattcggatgtacaaagtgatctatgatttgattgatgatttacggaaggccatggaaggtcttctcgaacccgctgaggaggaagtaccaattggttcggcaaaagttcgagctgtctttagtagtggcagtggaaaggtggccggatgcatgattacaacaggaaaagttgttcaagattgtaatgtgcgggttcttcgtaaagggaaagaagtatatgtgggttcgcttgattccttgagaagggtgaaagaaactgtgaaggaggttggtgctgggctagagtgtggtattggggtagatgacttcgatgaatgggaggaaggtgacatcatagaggcattcaataccgtgaataaggcaagaaccctcgaggaggcctctgctaccgtgactgccgcactcaaggatgcaggggtccagctgtagaattggcaacacgctgatactcttttttattaatggtatgaaatgttaatttatatatactttgaagctgaatggtgagctgaagctattgtgctgaagctgttgtgagctggaccggtggaccgtttccctgattccttcggtggtggctgaagctgaatggtgagctgctggagagtggagacgtggagtggtggccggtgggcgcctgggcggtggctgccggctggtgcagactgtgcacttgtgcagtgcagtggcgctaatatattgtgtgtggctgtggaagatgcatgtgtggatcggctgtctgtagtgagatggaagatactgtatatagcatatcaaaccatatattcatcgtatatacattaattattgatattgaattttgtcggtcaagcgtatgggccggccaagccaaactgtatttgccgaaagccgcttttgaatcgccgggagtggcaag

SEQ ID NO: 59450 - DNA, 3442 bp, Zea Mays
atcaaacaccttgtgctgtcaacatttatgagtgcaaggcagtattgctaagagtatcttgccatggcatctcctgcttccgtcaccaacctcggaagcaatgggaggtctggcccgctcccggctgcagctgcaaggagggcgcagttggtcacaaggatcagattcacggggttcgatggcataaggcgatggcagtatgagcctgggaggctttgcaggtgtatggtcgtcactaatctgattgaggagaaggttgttcagttctcgtcaagagggagtgtcagtgtgaaagctgatgatgacaatgatctgcttctgaagccgccacagaagccagtccggtcaaatggacccccggagagcatgaaaacagcatcactgccggatcagaagccagcaggggcaactttagacgacagagagaaggtcagagagtcactggacgctgtattggagaaagcagagaagcttgaggcctccagctttggtaatgcagatggtggcaaccttggttcaaggcagagtaatgtttccatgagtaatggtccaggaccgacagcagtggaggaaggtggtaattcaaggaagacaaaaacactaaagagtgtatggcggaaggggaaccctgtgccaactgtacgtaaggtcattagagagcaaccaagaactgaaacaaggagtcagtctatacctgtggctaaaccttcagtgtcatctgcatctaagccttcccctctgctactatctaaaccttctgtagcacagcctcctcgtcggcctatcaagtctgatacatcaaatgagaaaaaaggacccatccttattgataaatttgcttccaagagggcagcagttgatccgattgtacctgaggaattgttagaccctctaaaaccagtacgaggcccaccagcaaaagtcagagttgatcgtcgtaaaaaaccagacacacaagctggttccagacgacgtatgtccaatgatgatggattagttgatgaggatactactgacgtgccaatttctggtgttccagtgcgcaagggtaggaggtggagcaaggcaaaacgccgcgctgcaaggctagaggctatgcaagctgaagagccagtcagagttgagatccttgaagttggtgaagaaggtatgctgattgaggacttggcatatgagttggcaattggtgaatcagaaattttacgattcttatcggtgagaggagttatgcttgacaatgttcagactctagataaagatttggttaagatggtttgcatggaatatgatgttgaagtactagaaagtggtcctgtgaaagtggaggaaatggctaagaagaaggagttccttgatgatgaagatttggataaattggaagtgaggcctcccattgtgactatcatgggccatgttgatcatgggaagacaactctgttggattatatacgcaagagcaagttggtggcatctgaagctggtggtataacacaagggattggagcatatcaggttcttttaccagtagatggaaaccatcaagcctgtgtttttctggatactccaggacatgaggcgtttggtgcaatgagagctcgaggagctagagtaaccgatatctgtattgttgttgttgctgcggatgatggtgttcggccacaaacaagtgaggcaattgcacatgcaagggcagcaggggtgccaattataatagcaataaacaagatagacaaggagggagctaatgcagaacgagttatgcaagaactttcccaaattgggataatgccagaaatgtggggtggtgataccccaatggtcgagataagtgctcttactggggataatgttgatgaacttctggaaactgtcatgcttgttgcagagttgcaagaattaaaggcaaatccacataggaatgcgaagggcactgttattgaagcatgccttgacaaggccaaagggcctcttgctaccttagttgttcagaatggaaccctaaacaaagctgatattattgtgtgtggtgaagcttatggaaagatccgtgcattgtatgatgactgtgggaagctcgttgacaaagcaggaccatccaatgcagtgcaggttattggcctcaataacgttccccttgccggtgatgaatttgaggttgttgacaaccttgatgttgcacgtgaaagggcgaatgggcgtgctgaagcactgcgcatagaaaggatatctgcaaaagctggggaaggaaaagtcacactctcagctattgcagcatcggtttcatctgcgaagcaagttggaattgatacacatgagctaaatgttatccttaaagttgattttcagggttcaatcgaggctattaggcaagccatccaaactcttccacaagaaaatgtctctctgagattcctccttcaaggtccaggagatgtgagtgttagtgatgttgatctggctgttgcttcggaaggaattatatttggctttaatgtcagagcaccaggatcagttaaaaactatgctaagaagaaaggtgttgaaattcggatgtacaaagtgatctatgatttgattgatgatttacggaaggccatggaaggtcttctcgaacccgctgaggaggaagtaccaattggttcggcaaaagttcgagctgtctttagtagtggcagtggaaaggtggccggatgcatgattacaacaggaaaagttgttcaagattgtaatgtgcgggttcttcgtaaagggaaagaagtatatgtgggttcgcttgattccttgagaagggtgaaagaaactgtgaaggaggttggtgctgggctagagtgtggtattggggtagatgacttcgatgaatgggaggaaggtgacatcatagaggcattcaataccgtgaataaggcaagaaccctcgaggaggcctctgctaccgtgactgccgcactcaaggatgcaggggtccagctgtagaattggcaacacgctgatactcttttttattaatggtatgaaatgttaatttatatatactttgaagctgaatggtgagctgaagctattgtgctgaagctgttgtgagctggaccggtggaccgtttccctgattccttcggtggtggctgaagctgaatggtgagctgctggagagtggagacgtggagtggtggccggtgggcgcctgggcggtggctgccggctggtgcagactgtgcacttgtgcagtgcagtggcgctaatatattgtgtgtggctgtggaagatgcatgtgtggatcggctgtctgtagtgagatggaagatactgtatatagcatatcaaaccatatattcatcgtatatacattaattattgatattgaattttgtcggtcaagcgtatgggccggccaagccaaactgtatttgccgaaagccgcttttgaatcgccgggagtggcaag

SEQ ID NO: 59451 - DNA, 3366 bp, Zea Mays
ctcccggctgcagctgcaaggagggcgcagtattgctaagagtatcttgccatggcatctcctgcttccgtcaccaacctcggaagcaatgggaggtctggcccgctcccggctgcagctgcaaggagggcgcagttggtcacaaggatcagattcacggggttcgatggcataaggcgatggcagtatgagcctgggaggctttgcaggtgtatggtcgtcactaatctgattgaggagaaggttgttcagttctcgtcaagagggagtgtcagtgtgaaagctgatgatgacaatgatctgcttctgaagccgccacagaagccagtccggtcaaatggacccccggagagcatgaaaacagcatcactgccggatcagaagccagcaggggcaactttagacgacagagagaaggtcagagagtcactggacgctgtattggagaaagcagagaagcttgaggcctccagctttggtaatgcagatggtggcaaccttggttcaaggcagagtaatgtttccatgagtaatggtccaggaccgacagcagtggaggaaggtggtaattcaaggaagacaaaaacactaaagagtgtatggcggaaggggaaccctgtgccaactgtacgtaaggtcattagagagcaaccaagaactgaaacaaggagtcagtctatacctgtggctaaaccttcagtgtcatctgcatctaagccttcccctctgctactatctaaaccttctgtagcacagcctcctcgtcggcctatcaagtctgatacatcaaatgagaaaaaaggacccatccttattgataaatttgcttccaagagggcagcagttgatccgattgtacctgaggaattgttagaccctctaaaaccagtacgaggcccaccagcaaaagtcagagttgatcgtcgtaaaaaaccagacacacaagctggttccagacgacgtatgtccaatgatgatggattagttgatgaggatactactgacgtgccaatttctggtgttccagtgcgcaagggtaggaggtggagcaaggcaaaacgccgcgctgcaaggctagaggctatgcaagctgaagagccagtcagagttgagatccttgaagttggtgaagaaggtatgctgattgaggacttggcatatgagttggcaattggtgaatcagaaattttacgattcttatcggtgagaggagttatgcttgacaatgttcagactctagataaagatttggttaagatggtttgcatggaatatgatgttgaagtactagaaagtggtcctgtgaaagtggaggaaatggctaagaagaaggagttccttgatgatgaagatttggataaattggaagtgaggcctcccattgtgactatcatgggccatgttgatcatgggaagacaactctgttggattatatacgcaagagcaagttggtggcatctgaagctggtggtataacacaagggattggagcatatcaggttcttttaccagtagatggaaaccatcaagcctgtgtttttctggatactccaggacatgaggcgtttggtgcaatgagagctcgaggagctagagtaaccgatatctgtattgttgttgttgctgcggatgatggtgttcggccacaaacaagtgaggcaattgcacatgcaagggcagcaggggtgccaattataatagcaataaacaagatagacaaggagggagctaatgcagaacgagttatgcaagaactttcccaaattgggataatgccagaaatgtggggtggtgataccccaatggtcgagataagtgctcttactggggataatgttgatgaacttctggaaactgtcatgcttgttgcagagttgcaagaattaaaggcaaatccacataggaatgcgaagggcactgttattgaagcatgccttgacaaggccaaagggcctcttgctaccttagttgttcagaatggaaccctaaacaaagctgatattattgtgtgtggtgaagcttatggaaagatccgtgcattgtatgatgactgtgggaagctcgttgacaaagcaggaccatccaatgcagtgcaggttattggcctcaataacgttccccttgccggtgatgaatttgaggttgttgacaaccttgatgttgcacgtgaaagggcgaatgggcgtgctgaagcactgcgcatagaaaggatatctgcaaaagctggggaaggaaaagtcacactctcagctattgcagcatcggtttcatctgcgaagcaagttggaattgatacacatgagctaaatgttatccttaaagttgattttcagggttcaatcgaggctattaggcaagccatccaaactcttccacaagaaaatgtctctctgagattcctccttcaaggtccaggagatgtgagtgttagtgatgttgatctggctgttgcttcggaaggaattatatttggctttaatgtcagagcaccaggatcagttaaaaactatgctaagaagaaaggtgttgaaattcggatgtacaaagtgatctatgatttgattgatgatttacggaaggccatggaaggtcttctcgaacccgctgaggaggaagtaccaattggttcggcaaaagttcgagctgtctttagtagtggcagtggaaaggtggccggatgcatgattacaacaggaaaagttgttcaagattgtaatgtgcgggttcttcgtaaagggaaagaagtatatgtgggttcgcttgattccttgagaagggtgaaagaaactgtgaaggaggttggtgctgggctagagtgtggtattggggtagatgacttcgatgaatgggaggaaggtgacatcatagaggcattcaataccgtgaataaggcaagaaccctcgaggaggcctctgctaccgtgactgccgcactcaaggatgcaggggtccagctgtagaattggcaacacgctgatactcttttttattaatgctgttgtgagctggaccggtggaccgtttccctgattccttcggtggtggctgaagctgaatggtgagctgctggagagtggagacgtggagtggtggccggtgggcgcctgggcggtggctgccggctggtgcagactgtgcacttgtgcagtgcagtggcgctaatatattgtgtgtggctgtggaagatgcatgtgtggatcggctgtctgtagtgagatggaagatactgtatatagcatatcaaaccatatattcatcgtatatacattaattattgatattgaattttgtcggtcaagcgtatgggccggccaagccaaactgtatttgccgaaagccgcttttgaatcgccgggagtggcaag

SEQ ID NO: 59452 - DNA, 3210 bp, Zea Mays
caactttagacgacagagagaaggttgttcagttctcgtcaagagggagtgtcagtgtgaaagctgatgatgacaatgatctgcttctgaagccgccacagaagccagtccggtcaaatggacccccggagagcatgaaaacagcatcactgccggatcagaagccagcaggggcaactttagacgacagagagaaggtcagagagtcactggacgctgtattggagaaagcagagaagcttgaggcctccagctttggtaatgcagatggtggcaaccttggttcaaggcagagtaatgtttccatgagtaatggtccaggaccgacagcagtggaggaaggtggtaattcaaggaagacaaaaacactaaagagtgtatggcggaaggggaaccctgtgccaactgtacgtaaggtcattagagagcaaccaagaactgaaacaaggagtcagtctatacctgtggctaaaccttcagtgtcatctgcatctaagccttcccctctgctactatctaaaccttctgtagcacagcctcctcgtcggcctatcaagtctgatacatcaaatgagaaaaaaggacccatccttattgataaatttgcttccaagagggcagcagttgatccgattgtacctgaggaattgttagaccctctaaaaccagtacgaggcccaccagcaaaagtcagagttgatcgtcgtaaaaaaccagacacacaagctggttccagacgacgtatgtccaatgatgatggattagttgatgaggatactactgacgtgccaatttctggtgttccagtgcgcaagggtaggaggtggagcaaggcaaaacgccgcgctgcaaggctagaggctatgcaagctgaagagccagtcagagttgagatccttgaagttggtgaagaaggtatgctgattgaggacttggcatatgagttggcaattggtgaatcagaaattttacgattcttatcggtgagaggagttatgcttgacaatgttcagactctagataaagatttggttaagatggtttgcatggaatatgatgttgaagtactagaaagtggtcctgtgaaagtggaggaaatggctaagaagaaggagttccttgatgatgaagatttggataaattggaagtgaggcctcccattgtgactatcatgggccatgttgatcatgggaagacaactctgttggattatatacgcaagagcaagttggtggcatctgaagctggtggtataacacaagggattggagcatatcaggttcttttaccagtagatggaaaccatcaagcctgtgtttttctggatactccaggacatgaggcgtttggtgcaatgagagctcgaggagctagagtaaccgatatctgtattgttgttgttgctgcggatgatggtgttcggccacaaacaagtgaggcaattgcacatgcaagggcagcaggggtgccaattataatagcaataaacaagatagacaaggagggagctaatgcagaacgagttatgcaagaactttcccaaattgggataatgccagaaatgtggggtggtgataccccaatggtcgagataagtgctcttactggggataatgttgatgaacttctggaaactgtcatgcttgttgcagagttgcaagaattaaaggcaaatccacataggaatgcgaagggcactgttattgaagcatgccttgacaaggccaaagggcctcttgctaccttagttgttcagaatggaaccctaaacaaagctgatattattgtgtgtggtgaagcttatggaaagatccgtgcattgtatgatgactgtgggaagctcgttgacaaagcaggaccatccaatgcagtgcaggttattggcctcaataacgttccccttgccggtgatgaatttgaggttgttgacaaccttgatgttgcacgtgaaagggcgaatgggcgtgctgaagcactgcgcatagaaaggatatctgcaaaagctggggaaggaaaagtcacactctcagctattgcagcatcggtttcatctgcgaagcaagttggaattgatacacatgagctaaatgttatccttaaagttgattttcagggttcaatcgaggctattaggcaagccatccaaactcttccacaagaaaatgtctctctgagattcctccttcaaggtccaggagatgtgagtgttagtgatgttgatctggctgttgcttcggaaggaattatatttggctttaatgtcagagcaccaggatcagttaaaaactatgctaagaagaaaggtgttgaaattcggatgtacaaagtgatctatgatttgattgatgatttacggaaggccatggaaggtcttctcgaacccgctgaggaggaagtaccaattggttcggcaaaagttcgagctgtctttagtagtggcagtggaaaggtggccggatgcatgattacaacaggaaaagttgttcaagattgtaatgtgcgggttcttcgtaaagggaaagaagtatatgtgggttcgcttgattccttgagaagggtgaaagaaactgtgaaggaggttggtgctgggctagagtgtggtattggggtagatgacttcgatgaatgggaggaaggtgacatcatagaggcattcaataccgtgaataaggcaagaaccctcgaggaggcctctgctaccgtgactgccgcactcaaggatgcaggggtccagctgtagaattggcaacacgctgatactcttttttattaatggtatgaaatgttaatttatatatactttgaagctgaatggtgagctgaagctattgtgctgaagctgttgtgagctggaccggtggaccgtttccctgattccttcggtggtggctgaagctgaatggtgagctgctggagagtggagacgtggagtggtggccggtgggcgcctgggcggtggctgccggctggtgcagactgtgcacttgtgcagtgcagtggcgctaatatattgtgtgtggctgtggaagatgcatgtgtggatcggctgtctgtagtgagatggaagatactgtatatagcatatcaaaccatatattcatcgtatatacattaattattgatattgaattttgtcggtcaagcgtatgggccggccaagccaaactgtatttgccgaaagccgcttttgaatcgccgggagtggcaag

SEQ ID NO: 59453 - DNA, 3507 bp, Zea Mays
gcagagtaatgtttccatgagtaatggtccaggaccgacagcagtggaggaaggtggtaattcaaggaagacaaaaacactaaagagtgtatggcggaaggggaaccctgtgccaactgtacgtaaggtcattagagagcaaccaagaactgaaacaaggagtcagtctatacctgtggctaaaccttcagtgtcatctgcatctaagcctttcccctctgctactatctaaaccttctgtagcacagcctcctcgtcggcctatcaagtctgatacatcaaatgagaaaaaaggacccatccttattgataaatttgcttccaagagggcagcagttgatccgattgtacctgaggaattgttagaccctctaaaaccagtacgaggcccaccagcaaaagtcagagttgatcgtcgtaaaaaaccagacacacaagctggttccagacgacgtatgtccaatgatgatggattagttgatgaggatactactgacgtgccaatttctggtgttccagtgcgcaagggtaggaggtggagcaaggcaaaacgccgcgctgcaaggctagaggctatgcaagctgaagagccagtcagagttgagatccttgaagttggtgaagaaggtatgctgattgaggacttggcatatgagttggcaattggtgaatcagaaattttacgattcttatcggtgagaggagttatgcttgacaatgttcagactctagataaagatttggttaagatggtttgcatggaatatgatgttgaagtactagaaagtggtcctgtgaaagtggaggaaatggctaagaagaaggagttccttgatgatgaagatttggataaattggaagtgaggcctcccattgtgactatcatgggccatgttgatcatgggaaggtactaagactgatgctaactcttggaactcacaacttttctaaagtattggttgtatgacactgctatttttgtttgcagacaactctgttggattatatacgcaagagcaagttggtggcatctgaagctggtggtataacacaagggattggagcatatcaggttcttttaccagtagatggaaaccatcaagcctgtgtttttctggatactccaggacatgaggcgtttggtgcaatgagagctcgaggagctagagtaaccgatatctgtattgttgttgttgctgcggatgatggtgttcggccacaaacaagtgaggcaattgcacatgcaagggcagcaggggtgccaattataatagcaataaacaagatagacaaggagggagctaatgcagaacgagttatgcaagaactttcccaaattgggataatgccagaaatgtggggtggtgataccccaatgatcgaggttgctgattgtgccaatttaaaacagtagctcaatagtatagcatcttattacctatttgaaccattttatttgatctctaccagataagtgctcttactggggataatgttgatgaacttctggaaactgtcatgcttgttgcagagttgcaagaattaaaggcaaatccacataggaatgcgaagggcactgttattgaagcatgccttgacaaggccaaagggcctcttgctaccttagttgttcagaatggaaccctaaacaaagctgatattattgtgtgtggtgaagcttatggaaagatccgtgcattgtatgatgactgtgggaagctcgttgacaaagcaggaccatccaatgcagtgcagggcgaatgggcgtgctgaagcactgcgcatagaaaggatatctgcaaaagctggggaaggaaaagtcacactctcagctattgcagcatcggtttcatctgcgaagcaagttggaattgatacacatgagctaaatgttatccttaaagttgattttcagggttcaatcgaggctattaggcaagccatccaaactcttccacaagaaaatgtctctctgagattcctccttcaaggtccaggagatgtgagtgttaatgatgttgatctggctgttgctttggaaggaattatatttggctttaatgtcagagcaccaggatcagttaaaaactatgctaagaagaaaggtgttgaaattcggatgtacaaagtgatatatgatttgattgatgatttacggaaggccatggaaggtcttctcgaacctgctgaggaggaagtaccaattggttcggcaaaagttcgagctgtctttagtagtggcagtggaaaggtggccggatgcatgattacaacaagaaaagttgttcaagattgtaatgtgcgggttcttcgtaaagggaaagaagtatatgtgtgttcgcttgattccttgagaagggtgaaagaaactgtgaaggaggttggtgctgggctagagtgtggtattggggtagatgacttcgatgaatgggaggaaggtgacatcatagaggcattcagtaccgtgaataagacaagaaccctcgaggaggcctctgttaccttgactgtcgcactcaaggatgcaggggtccagctgtagaattggcaacacgctggtaagaaatataagtggtttaacagttgcagcagcctgtggccaacaattttctggcaacgaatctggagggcgctggtcgaagttcctgaagaataacaagaatgttgttgtacaaactcgacatatgaagatcaattctacaccaccagtgtctgagctcgaccatctcacgcctgccagagctgcatctgctgctgaaagttgatggagtcttttgctattataatattcatttaaacaagcttctctcttctagtatctataaatttaacttctctaaaatggtacctataacttaatctcttctctaaaatagtattaagtatctttttactctcctttcttattttcccagaagtgaaatatcgaaatgttcctagagattttgtttatagatcataatgctcccacattgctatatgtgaccgaacatcccggtggttttattttacgttcggaaatatcgctgccaagatgctgagtataaactttattcttaagaagttcagattgcagtactgaagtaagttgaagcagctggttcatgcagaaagcaagtttagatcaataaaagatatcagtaagcatattggttcccgtccctttcagatttgaacagtgagctgtatggaacttcatatttgaacagtgagctgtatggttccaggttcatggttgtgcaaatttttattgcagcttgatggtgaacgtgaacagaaacgacatgtcagagttcggtcgtgcacaacgtttaggctcctacatggtgacaaaataaattgaagcatatcattcacggctggaaattaatatgaagaaaaatgaaaaatgagtaaaaaaggcacttaattctattttagagaagaggttaacttataagtactattttagagaagttaaatttgtagatactataagggttgatttggtgagaagtgatcacggg

SEQ ID NO: 59454 - DNA, 2962 bp, Zea Mays
gcagagtaatgtttccatgagtaatggtccaggaccgacagcagtggaggaaggtggtaattcaaggaagacaaaaacactaaagagtgtatggcggaaggggaaccctgtgccaactgtacgtaaggtcattagagagcaaccaagaactgaaacaaggagtcagtctatacctgtggctaaaccttcagtgtcatctgcatctaagcctttcccctctgctactatctaaaccttctgtagcacagcctcctcgtcggcctatcaagtctgatacatcaaatgagaaaaaaggacccatccttattgataaatttgcttccaagagggcagcagttgatccgattgtacctgaggaattgttagaccctctaaaaccagtacgaggcccaccagcaaaagtcagagttgatcgtcgtaaaaaaccagacacacaagctggttccagacgacgtatgtccaatgatgatggattagttgatgaggatactactgacgtgccaatttctggtgttccagtgcgcaagggtaggaggtggagcaaggcaaaacgccgcgctgcaaggctagaggctatgcaagctgaagagccagtcagagttgagatccttgaagttggtgaagaaggtatgctgattgaggacttggcatatgagttggcaattggtgaatcagaaattttacgattcttatcggtgagaggagttatgcttgacaatgttcagactctagataaagatttggttaagatggtttgcatggaatatgatgttgaagtactagaaagtggtcctgtgaaagtggaggaaatggctaagaagaaggagttccttgatgatgaagatttggataaattggaagtgaggcctcccattgtgactatcatgggccatgttgatcatgggaaggtactaagactgatgctaactcttggaactcacaacttttctaaagtattggttgtatgacactgctatttttgtttgcagacaactctgttggattatatacgcaagagcaagttggtggcatctgaagctggtggtataacacaagggattggagcatatcaggttcttttaccagtagatggaaaccatcaagcctgtgtttttctggatactccaggacatgaggcgtttggtgcaatgagagctcgaggagctagagtaaccgatatctgtattgttgttgttgctgcggatgatggtgttcggccacaaacaagtgaggcaattgcacatgcaagggcagcaggggtgccaattataatagcaataaacaagatagacaaggagggagctaatgcagaacgagttatgcaagaactttcccaaattgggataatgccagaaatgtggggtggtgataccccaatgatcgaggttgctgattgtgccaatttaaaacagtagctcaatagtatagcatcttattacctatttgaaccattttatttgatctctaccagataagtgctcttactggggataatgttgatgaacttctggaaactgtcatgcttgttgcagagaattaaaggcaaatccacataggaatgcgaagggcactgttattgaagcatgccttgacaaggccaaagggcctcttgctaccttagttgttcagaatggaaccctaaacaaagctgatattattgtgtgtggtgaagcttatggaaagatccgtgcattgtatgatgactgtgggaagctcgttgacaaagcaggaccatccaatgcagtgcaggttattggcctcaataacgttccccttgccggtgatgaatttgaggttgttgacaaccttgatgttgcacgtgaaagggcgaatgggcgtgctgaagcactgcgcatagaaaggatatctgcaaaagctggggaaggaaaagtcacactctcagctattgcagcatcggtttcatctgcgaagcaagttggaattgatacacatgagctaaatgttatccttaaagttgattttcagggttcaatcgaggctattaggcaagccatccaaactcttccacaagaaaatgtctctctgagattcctccttcaaggtccaggagatgtgagtgttagtgatgttgatctggctgttgcttcggaaggaattatatttggctttaatgtcagagcaccaggatcagttaaaaactatgctaagaagaaaggtgttgaaattcggatgtacaaagtgatctatgatttgattgatgatttacggaaggccatggaaggtcttctcgaacccgctgaggaggaagtaccaattggttcggcaaaagttcgagctgtctttagtagtggcagtggaaaggtggccggatgcatgattacaacaggaaaagttgttcaagattgtaatgtgcgggttcttcgtaaagggaaagaagtatatgtgggttcgcttgattccttgagaagggtgaaagaaactgtgaaggaggttggtgctgggctagagtgtggtattggggtagatgacttcgatgaatgggaggaaggtgacatcatagaggcattcaataccgtgaataaggcaagaaccctcgaggaggcctctgctaccgtgactgccgcactcaaggatgcaggggtccagctgtagaattggcaacacgctgatactcttttttattaatgctgaatggtgagctgctggagagtggagacgtggagtggtggccggtgggcgcctgggcggtggctgccggctggtgcagactgtgcacttgtgcagtgcagtggcgctaatatattgtgtgtggctgtggaagatgcatgtgtggatcggctgtctgtagtgagatggaagatactgtatatagcatatcaaaccatatattcatcgtatatacattaattattgatattgaattttgtcggtcaagcgtatgggccggccaagccaaactgtatttgccgaaagccgcttttgaatcgccgggagtggcaag

SEQ ID NO: 59455 - DNA, 684 bp, Zea Mays
cacaatgttatatatgacataattcagaaaggtggagatgctgagaaaattacaaagggagccaaaaggtacgacctctataagctaatgcatgagatgtggaaggactatatcaaagagcttatggatatgagcccgaaaaagaaatttactgagaaccttctttcagcagatcttcatggggcccttctaatagagtgtaaacggaatcatgattcgggatactgcagagacgtttggaattatatccgaggacaaccgcttccgggtttaccaaaagctggttcagttttcgtacttcaagcagaccgctggaagttcacactgatcggcgacaagctctcgcccagggagaagttgaaggaggatcagcgtcaacaacgtgcgcaatcgctaatcagatagtttccaatgtgccagctgttctctcacaaatcttttgctccacggaatacttgcttttgtttaggtcctgccactgtagcatggtagttttatcgctctagaggcgttgacatttcttagcgacttactggcagctcgagttgtggaggggtgtgtgatcatgagccatgtactccggtgactgattattgattagtataggcgtagcaaggccatttacgtttgtttcatctagtcacacaaacctgtggcaaatatttattacgcattgtttctgcc

SEQ ID NO: 59456 - DNA, 489 bp, Zea Mays
aagcaagatctttgctaattcattcaaagcgatcaaaaaggcacatgtctctgaaacaacataagaaatgtggttcatttgatttagatggtacattccacaagtaagttttgttctggtcagtgttcggctaggcgccgactaggcggcgattaggcgcgcctaggcgctagtcgataggctgccgcgtagcctagggtcctgtgcggcgtctaggcggccgcggtgactaggcggcgctcagccgcgcctaggcggcgagttggcggcgcgcaggcgagcgcgcggcaatttttagcgcgcgcgcgcgcgcgggagttttagcgcgggggagtattagcgcgcgctgtgcagccgctcggtctccctcccacacggtcacggaaattgctcccccgccgccgctcatcccctcctgctgctcccccgccggctgctctcctccctgctcccccgccgtgtacaagtgaaagaaatcaaagggattaa

SEQ ID NO: 59457 - DNA, 3424 bp, Zea Mays
aaagaatgggtagaaaatgcacgtctgcacatcgcaggctctagatgctaaagagagtgcaagaaagcaatagaggctgcaaaaaggaagagggaggagaagactgttcgtgagctagaacttagagaggaagtgaatgtatctagggttggagaggagtcagaagaagtcacttgtgttggaagctcacagcctcacaaattagggccaattgacaaatggacacgtgctattgatcctaccaaggctggttcattcaaacaacagcagctgaacaaggaactatggaaagaaagagagcatgaggtgcacaagtttattgcaagatgggcctataatcatggaatacctttcaatgcatgtgacaatgatgagttcaagcaaatgtgtgaagcaattggacaatttggaccaggacttacacctccaactcaagatgccttttgaggtagtttgctggaagaagattatgaaagaaccaagtgtttgctgcaggaacgtgaatccgagaagatgaaaaatgggtgctctattatgaccgatgcttggtcagataggaagaggagaagcataatgaatatatgcactaattgtgctgatggaacctccttcatcagctcaaaagagatgtcagatgtgtcacacacaagcgaagtcatttttgaattagtggacaaagcaattgaagacattggtgaagaaaatgtggtgcaagtagtcactgacaatgcctctaacaacatgggagcaaagaagctattgcttgagaagagaccacaaatattttggacctcttgtgtagctcacacaatcaacttgatgctccaaggaattggcaaattgcctcggttcaggaaagtgattgaccaagcaaagtcatttaccatatttgtgtatggccacacaagaacattggagtgcttgagatacttcacagaggggaaagagctagtgaggccaggagtgactaggtttgcttcatactttctcactttgaacagtatgcaagagaagaaggaccagttaaggaagatggtagttcatagcaggtgggactcattaaaggatgtggaatcaaagaaaggaaaagaggccacagctactatattgagtccagccttttggaaggatgtgaagctaatgttggctgtttttgagccattggtcaaagtcctccgtttggttgatggggatgtgaagccatccatgggtttcctttatggagagctactaaaggcaaaaagagagatcaaagaggcctttggcaatgttgagtctcgattcaaagatgttatggctgtaattgagaagaagatgaatggaagacttgattctccattgcatttgacagcttttttgctgaatccacactatagctatgctaacccatcaatatttgatgagcccaaaatgaatgaagccttcatatcttgtgtcgagcaattttattatcatgatgaggaccaacaagaacaggctgccaactttgaattgaaaaaatttcagaatagagaaggaccatttagcaagaagcttgcaagaacttttcaaaactatgattacaatccaggtagagcatcatggtggcggttatatggaactgaaacaccagctttacaaaagatggctacaaggatattatctttgacatcaagctcttctggttgtgaaagaaattggagtgggtttgaagggatacacactaagaagagaaataggctgactacaacccgcctcaacaagttggtctatattcagttcaataacaggctgatgaataacagagaaaagattaagtcaaagaaaatcactgatgttctcttgtctagtgatacaactgaagctcaaggttttctccaagagggtggagatgattgtgcacaagttgtctttagagatgaggaggaagatgagatggaaggtacagggataccttggtctattattggagaggcaattggagcagaagaacagcttgagcctcgtagaagtgcaagagtgagagagctctatgaaggagaagagtttgagtctgaagaagaagagtatgaagatgaagatttgtgctacagtgaagatgaaatatgatctggaccatctccatctagtagtgaagccttttgtgatgccctggtcttatgaactgcagctgtgtcactttgtgtctgtgtgtcttcttttgtgtgagacctgaactaagaactatgtgcttgtgttgtcctttatttataaattgtgttctgcacttgtattactgtcctatccacttgtgttgtaattaccagctgctgatatggtgtgcagtgtgctcaactgctcatgaatgggaggctgctgaaatcatccagataagtcacaatttagtgttttctattttttttatgaacagctagctgtctattgactaatttactaactactagctgtcaaaatgtgttgcagccttgcaggagctaggaacatgcaagagtaagctaagctaggaatcagatatgtctactggccttctttttatacttactgtgactcatatagtcatatatagtagttatatacgtatatatagttatatacataatatatataatttatggctatattgctaaaacgcctagaaaagcgcctagaaacgcctaagaccgagtactcccgactaggcgctaggcaatgggtcaccgcctagattccgcctagcgcctagctgaaccttggttctcgttgcccatagattgatacctcaccaccaaaaaacatgactttttttttgtttctgtctacacgaagctacagtttatgtccttgctcaaatttccacatagcacctgatgttcttgatcttgtaggtacgacctctataagctaatgcatgagatgtggaaggactatatcaaagagcttatggatatgagcccatcttcatggggcccttctaatagagtgtaaacggaatcatgattcgggatactgcagagacgtttggaattatatccgaggacaaccgcttccgggtttaccaaaagctggttcagttttcgtacttcaagcagaccgctggaagttcacactgatcggcgacaagctctcgcccagggagaagttgaaggaggatcagcgtcaacaacgtgcgcaatcgctaatcagatagtttccaatgtgccagctgttctctcacaaatcttttgctccacggaatacttgcttttgtttaggtcctgccactgtagcatggtagttttatcgctctagaggcgttgacatttcttagcgacttactggcagctcgagttgtggaggggtgtgtgatcatgagccatgtactccggtgactgattattgattagtataggcgtagcaaggccatttacgtttgtttcatctagtcacacaaacctgtggcaaatatttattacgcattgtttctgcc

SEQ ID NO: 59458 - DNA, 3425 bp, Zea Mays
aaagaatgggtagaaaatgcacgtctgcacatcgcaggctctagatgctaaagagagtgcaagaaagcaatagaggctgcaaaaaggaagagggaggagaagactgttcgtgagctagaacttagagaggaagtgaatgtatctagggttggagaggagtcagaagaagtcacttgtgttggaagctcacagcctcacaaattagggccaattgacaaatggacacgtgctattgatcctaccaaggctggttcattcaaacaacagcagctgaacaaggaactatggaaagaaagagagcatgaggtgcacaagtttattgcaagatgggcctataatcatggaatacctttcaatgcatgtgacaatgatgagttcaagcaaatgtgtgaagcaattggacaatttggaccaggacttacacctccaactcaagatgccttttgaggtagtttgctggaagaagattatgaaagaaccaagtgtttgctgcaggaacgtgaatccgagaagatgaaaaatgggtgctctattatgaccgatgcttggtcagataggaagaggagaagcataatgaatatatgcactaattgtgctgatggaacctccttcatcagctcaaaagagatgtcagatgtgtcacacacaagcgaagtcatttttgaattagtggacaaagcaattgaagacattggtgaagaaaatgtggtgcaagtagtcactgacaatgcctctaacaacatgggagcaaagaagctattgcttgagaagagaccacaaatattttggacctcttgtgtagctcacacaatcaacttgatgctccaaggaattggcaaattgcctcggttcaggaaagtgattgaccaagcaaagtcatttaccatatttgtgtatggccacacaagaacattggagtgcttgagatacttcacagaggggaaagagctagtgaggccaggagtgactaggtttgcttcatactttctcactttgaacagtatgcaagagaagaaggaccagttaaggaagatggtagttcatagcaggtgggactcattaaaggatgtggaatcaaagaaaggaaaagaggccacagctactatattgagtccagccttttggaaggatgtgaagctaatgttggctgtttttgagccattggtcaaagtcctccgtttggttgatggggatgtgaagccatccatgggtttcctttatggagagctactaaaggcaaaaagagagatcaaagaggcctttggcaatgttgagtctcgattcaaagatgttatggctgtaattgagaagaagatgaatggaagacttgattctccattgcatttgacagcttttttgctgaatccacactatagctatgctaacccatcaatatttgatgagcccaaaatgaatgaagccttcatatcttgtgtcgagcaattttattatcatgatgaggaccaacaagaacaggctgccaactttgaattgaaaaaatttcagaatagagaaggaccatttagcaagaagcttgcaagaacttttcaaaactatgattacaatccaggtagagcatcatggtggcggttatatggaactgaaacaccagctttacaaaagatggctacaaggatattatctttgacatcaagctcttctggttgtgaaagaaattggagtgggtttgaagggatacacactaagaagagaaataggctgactacaacccgcctcaacaagttggtctatattcagttcaataacaggctgatgaataacagagaaaagattaagtcaaagaaaatcactgatgttctcttgtctagtgatacaactgaagctcaaggttttctccaagagggtggagatgattgtgcacaagttgtctttagagatgaggaggaagatgagatggaaggtacagggataccttggtctattattggagaggcaattggagcagaagaacagcttgagcctcgtagaagtgcaagagtgagagagctctatgaaggagaagagtttgagtctgaagaagaagagtatgaagatgaagatttgtgctacagtgaagatgaaatatgatctggaccatctccatctagtagtgaagccttttgtgatgccctggtcttatgaactgcagctgtgtcactttgtgtctgtgtgtcttcttttgtgtgagacctgaactaagaactatgtgcttgtgttgtcctttatttataaattgtgttctgcacttgtattactgtcctatccacttgtgttgtaattaccagctgctgatatggtgtgcagtgtgctcaactgctcatgaatgggaggctgctgaaatcatccagataagtcacaatttagtgttttctattttttttatgaacagctagctgtctattgactaatttactaactactagctgtcaaaatgtgttgcagccttgcaggagctaggaacatgcaagagtaagctaagctaggaatcagatatgtctactggccttctttttatacttactgtgactcatatagtcatatatagtagttatatacgtatatatagttatatacataatatatataatttatggctatattgctaaaacgcctagaaaagcgcctagaaacgcctaagaccgagtactcccgactaggcgctaggcaatgggtcaccgcctagattccgcctagcgcctagctgaaccttggttctcgttgcccatagattgatacctcaccaccaaaaaacatgactttttttttgtttctgtctacacgaagctacagtttatgtccttgctcaaatttccacatagcacctgatgttcttgatcttgtaggtacgacctctataagctaatgcatgagatgtggaaggactatatcaaagagcttatggatatgagcccgaaaaagaaatttactgagaaccttctttcagcagatcttcatggggcccttctaatagagacgtttggaattatatccgaggacaaccgcttccgggtttaccaaaagctggttcagttttcgtacttcaagcagaccgctggaagttcacactgatcggcgacaagctctcgcccagggagaagttgaaggaggatcagcgtcaacaacgtgcgcaatcgctaatcagatagtttccaatgtgccagctgttctctcacaaatcttttgctccacggaatacttgcttttgtttaggtcctgccactgtagcatggtagttttatcgctctagaggcgttgacatttcttagcgacttactggcagctcgagttgtggaggggtgtgtgatcatgagccatgtactccggtgactgattattgattagtataggcgtagcaaggccatttacgtttgtttcatctagtcacacaaacctgtggcaaatatttattacgcattgtttctgcc

SEQ ID NO: 59459 - DNA, 3459 bp, Zea Mays
aaagaatgggtagaaaatgcacgtctgcacatcgcaggctctagatgctaaagagagtgcaagaaagcaatagaggctgcaaaaaggaagagggaggagaagactgttcgtgagctagaacttagagaggaagtgaatgtatctagggttggagaggagtcagaagaagtcacttgtgttggaagctcacagcctcacaaattagggccaattgacaaatggacacgtgctattgatcctaccaaggctggttcattcaaacaacagcagctgaacaaggaactatggaaagaaagagagcatgaggtgcacaagtttattgcaagatgggcctataatcatggaatacctttcaatgcatgtgacaatgatgagttcaagcaaatgtgtgaagcaattggacaatttggaccaggacttacacctccaactcaagatgccttttgaggtagtttgctggaagaagattatgaaagaaccaagtgtttgctgcaggaacgtgaatccgagaagatgaaaaatgggtgctctattatgaccgatgcttggtcagataggaagaggagaagcataatgaatatatgcactaattgtgctgatggaacctccttcatcagctcaaaagagatgtcagatgtgtcacacacaagcgaagtcatttttgaattagtggacaaagcaattgaagacattggtgaagaaaatgtggtgcaagtagtcactgacaatgcctctaacaacatgggagcaaagaagctattgcttgagaagagaccacaaatattttggacctcttgtgtagctcacacaatcaacttgatgctccaaggaattggcaaattgcctcggttcaggaaagtgattgaccaagcaaagtcatttaccatatttgtgtatggccacacaagaacattggagtgcttgagatacttcacagaggggaaagagctagtgaggccaggagtgactaggtttgcttcatactttctcactttgaacagtatgcaagagaagaaggaccagttaaggaagatggtagttcatagcaggtgggactcattaaaggatgtggaatcaaagaaaggaaaagaggccacagctactatattgagtccagccttttggaaggatgtgaagctaatgttggctgtttttgagccattggtcaaagtcctccgtttggttgatggggatgtgaagccatccatgggtttcctttatggagagctactaaaggcaaaaagagagatcaaagaggcctttggcaatgttgagtctcgattcaaagatgttatggctgtaattgagaagaagatgaatggaagacttgattctccattgcatttgacagcttttttgctgaatccacactatagctatgctaacccatcaatatttgatgagcccaaaatgaatgaagccttcatatcttgtgtcgagcaattttattatcatgatgaggaccaacaagaacaggctgccaactttgaattgaaaaaatttcagaatagagaaggaccatttagcaagaagcttgcaagaacttttcaaaactatgattacaatccaggtagagcatcatggtggcggttatatggaactgaaacaccagctttacaaaagatggctacaaggatattatctttgacatcaagctcttctggttgtgaaagaaattggagtgggtttgaagggatacacactaagaagagaaataggctgactacaacccgcctcaacaagttggtctatattcagttcaataacaggctgatgaataacagagaaaagattaagtcaaagaaaatcactgatgttctcttgtctagtgatacaactgaagctcaaggttttctccaagagggtggagatgattgtgcacaagttgtctttagagatgaggaggaagatgagatggaaggtacagggataccttggtctattattggagaggcaattggagcagaagaacagcttgagcctcgtagaagtgcaagagtgagagagctctatgaaggagaagagtttgagtctgaagaagaagagtatgaagatgaagatttgtgctacagtgaagatgaaatatgatctggaccatctccatctagtagtgaagccttttgtgatgccctggtcttatgaactgcagctgtgtcactttgtgtctgtgtgtcttcttttgtgtgagacctgaactaagaactatgtgcttgtgttgtcctttatttataaattgtgttctgcacttgtattactgtcctatccacttgtgttgtaattaccagctgctgatatggtgtgcagtgtgctcaactgctcatgaatgggaggctgctgaaatcatccagataagtcacaatttagtgttttctattttttttatgaacagctagctgtctattgactaatttactaactactagctgtcaaaatgtgttgcagccttgcaggagctaggaacatgcaagagtaagctaagctaggaatcagatatgtctactggccttctttttatacttactgtgactcatatagtcatatatagtagttatatacgtatatatagttatatacataatatatataatttatggctatattgctaaaacgcctagaaaagcgcctagaaacgcctaagaccgagtactcccgactaggcgctaggcaatgggtcaccgcctagattccgcctagcgcctagctgaaccttggttctcgttgcccatagattgatacctcaccaccaaaaaacatgactttttttttgtttctgtctacacgaagctacagtttatgtccttgctcaaatttccacatagcacctgatgttcttgatcttgtaggtacgacctctataagctaatgcatgagatgtggaaggactatatcaaagagcttatggatatgagcccgaaaaagaaatttactgagaaccttctttcagcagatcttcatggggcccttctaatagagtgtaaacggaatcatgattcgggatactgcagagacgtttggaattatatccgaggacaaccgcttccgggtttaccaaaagctggttcagttttcgtacttcaagcagaccgctggaagttcacactgatcggcgacaagctctcgcccagggagaagttgaaggaggatcagcgtcaacaacgtgcgcaatcgctaatcagatagtttccaatgtgccagctgttctctcacaaatcttttgctccacggaatacttgcttttgtttaggtcctgccactgtagcatggtagttttatcgctctagaggcgttgacatttcttagcgacttactggcagctcgagttgtggaggggtgtgtgatcatgagccatgtactccggtgactgattattgattagtataggcgtagcaaggccatttacgtttgtttcatctagtcacacaaacctgtggcaaatatttattacgcattgtttctgcc

SEQ ID NO: 59460 - DNA, 611 bp, Zea Mays
tcctgagtgtgaagcaagcgcattcagagtagtggaccaactcgagcttttggaaaactttaatgaaaaagaaatttactgagaaccttctttcagcagatcttcatggggcccttctaatagagtgtaaacggaatcatgattcgggatactgcagagacgtttggaattatatccgaggacaaccgcttccgggtttaccaaaagctggttcagttttcgtacttcaagcagaccgctggaagttcacactgatcggcgacaagctctcgcccagggagaagttgaaggaggatcagcgtcaacaacgtgcgcaatcgctaatcagatagtttccaatgtgccagctgttctctcacaaatcttttgctccacggaatacttgcttttgtttaggtcctgccactgtagcatggtagttttatcgctctagaggcgttgacatttcttagcgacttactggcagctcgagttgtggaggggtgtgtgatcatgagccatgtactccggtgactgattattgattagtataggcgtagcaaggccatttacgtttgtttcatctagtcacacaaacctgtggcaaatatttattacgcattgtttctgcc

SEQ ID NO: 59461 - DNA, 3828 bp, Zea Mays
atttgaagtcactcttctataccctacaaactaatcttctataccctacaaaatgatctttactacatttaggaacaagagttgtgagttgtgttgtgtcccatatagccaagcccttagccctcaaagagtactacgcgcacacaatctaatccaatattattatgaatttacttattctaaacaaagaaaaaaaaaatccaggccaaaaagcgaccacggcggatatgccgagtggctctctctctccggcgtgccaaccttatcaccacccattcgagcttgctgcggctgcccgctgcccccacgatcccgatagttttccgaaaaaagacacttccccaatccgtagtggttcacgtcctggttcctcgccggcggcaaccgcgctggacgaggtttcatctgcgcttcgccggcggcaaccgcgctggacgaggtagcgctgctatcaaacaccttgtgctgtcaacatttatgagtgcaaggcagtattgctaagagtatcttgccatggcatctcctgcttccgtcaccaacctcggaagcaatgggaggtctggcccgctcccggctgcagctgcaaggagggcgcagttggtcacaaggatcagattcacggggttcgatggcataaggcgatggcagtatgagcctgggaggctttgcaggtgtatggtcgtcactaatctgattgaggagaaggttgttcagttctcgtcaagagggagtgtcagtgtgaaagctgatgatgacaatgatctgcttctgaagccgccacagaagccagtccggtcaaatggacccccggagagcatgaaaacagcatcactgccggatcagaagccagcaggggcaactttagacgacagagagaaggtcagagagtcactggacgctgtattggagaaagcagagaagcttgaggcctccagctttggtaatgcagatggtggcaaccttggttcaaggcagagtaatgtttccatgagtaatggtccaggaccgacagcagtggaggaaggtggtaattcaaggaagacaaaaacactaaagagtgtatggcggaaggggaaccctgtgccaactgtacgtaaggtcattagagagcaaccaagaactgaaacaaggagtcagtctatacctgtggctaaaccttcagtgtcatctgcatctaagccttcccctctgctactatctaaaccttctgtagcacagcctcctcgtcggcctatcaagtctgatacatcaaatgagaaaaaaggacccatccttattgataaatttgcttccaagagggcagcagttgatccgattgtacctgaggaattgttagaccctctaaaaccagtacgaggcccaccagcaaaagtcagagttgatcgtcgtaaaaaaccagacacacaagctggttccagacgacgtatgtccaatgatgatggattagttgatgaggatactactgacgtgccaatttctggtgttccagtgcgcaagggtaggaggtggagcaaggcaaaacgccgcgctgcaaggctagaggctatgcaagctgaagagccagtcagagttgagatccttgaagttggtgaagaaggtatgctgattgaggacttggcatatgagttggcaattggtgaatcagaaattttacgattcttatcggtgagaggagttatgcttgacaatgttcagactctagataaagatttggttaagatggtttgcatggaatatgatgttgaagtactagaaagtggtcctgtgaaagtggaggaaatggctaagaagaaggagttccttgatgatgaagatttggataaattggaagtgaggcctcccattgtgactatcatgggccatgttgatcatgggaagacaactctgttggattatatacgcaagagcaagttggtggcatctgaagctggtggtataacacaagggattggagcatatcaggttcttttaccagtagatggaaaccatcaagcctgtgtttttctggatactccaggacatgaggcgtttggtgcaatgagagctcgaggagctagagtaaccgatatctgtattgttgttgttgctgcggatgatggtgttcggccacaaacaagtgaggcaattgcacatgcaagggcagcaggggtgccaattataatagcaataaacaagatagacaaggagggagctaatgcagaacgagttatgcaagaactttcccaaattgggataatgccagaaatgtggggtggtgataccccaatggtcgagataagtgctcttactggggataatgttgatgaacttctggaaactgtcatgcttgttgcagagttgcaagaattaaaggcaaatccacataggaatgcgaagggcactgttattgaagcatgccttgacaaggccaaagggcctcttgctaccttagttgttcagaatggaaccctaaacaaagctgatattattgtgtgtggtgaagcttatggaaagatccgtgcattgtatgatgactgtgggaagctcgttgacaaagcaggaccatccaatgcagtgcaggttattggcctcaataacgttccccttgccggtgatgaatttgaggttgttgacaaccttgatgttgcacgtgaaagggcgaatgggcgtgctgaagcactgcgcatagaaaggatatctgcaaaagctggggaaggaaaagtcacactctcagctattgcagcatcggtttcatctgcgaagcaagttggaattgatacacatgagctaaatgttatccttaaagttgattttcagggttcaatcgaggctattaggcaagccatccaaactcttccacaagaaaatgtctctctgagattcctccttcaaggtccaggagatgtgagtgttagtgatgttgatctggctgttgcttcggaaggaattatatttggctttaatgtcagagcaccaggatcagttaaaaactatgctaagaagaaaggtgttgaaattcggatgtacaaagtgatctatgatttgattgatgatttacggaaggccatggaaggtcttctcgaacccgctgaggaggaagtaccaattggttcggcaaaagttcgagctgtctttagtagtggcagtggaaaggtggccggatgcatgattacaacaggaaaagttgttcaagattgtaatgtgcgggttcttcgtaaagggaaagaagtatatgtgggttcgcttgattccttgagaagggtgaaagaaactgtgaaggaggttggtgctgggctagagtgtggtattggggtagatgacttcgatgaatgggaggaaggtgacatcatagaggcattcaataccgtgaataaggcaagaaccctcgaggaggcctctgctaccgtgactgccgcactcaaggatgcaggggtccagctgtagaattggcaacacgctgatactcttttttattaatgctgttgtgagctggaccggtggaccgtttccctgattccttcggtggtggctgaagctgaatggtgagctgctggagagtggagacgtggagtggtggccggtgggcgcctgggcggtggctgccggctggtgcagactgtgcacttgtgcagtgcagtggcgctaatatattgtgtgtggctgtggaagatgcatgtgtggatcggctgtctgtagtgagatggaagatactgtatatagcatatcaaaccatatattcatcgtatatacattaattattgatattgaattttgtcggtcaagcgtatgggccggccaagccaaactgtatttgccgaaagccgcttttgaatcgccgggagtggcaag

SEQ ID NO: 59462 - DNA, 3544 bp, Zea Mays
ccgccgctaatcccagcgtgttctccgtctccggctcgaactccgtcgcctcccgccggctcccgcctctcaacgccgccttctcttctccgtagcgctgctatcaaacaccttgtgctgtcaacatttatgagtgcaaggcagtattgctaagagtatcttgccatggcatctcctgcttccgtcaccaacctcggaagcaatgggaggtctggcccgctcccggctgcagctgcaaggagggcgcagttggtcacaaggatcagattcacggggttcgatggcataaggcgatggcagtatgagcctgggaggctttgcaggtgtatggtcgtcactaatctgattgaggagaaggttgttcagttctcgtcaagagggagtgtcagtgtgaaagctgatgatgacaatgatctgcttctgaagccgccacagaagccagtccggtcaaatggacccccggagagcatgaaaacagcatcactgccggatcagaagccagcaggggcaactttagacgacagagagaaggtcagagagtcactggacgctgtattggagaaagcagagaagcttgaggcctccagctttggtaatgcagatggtggcaaccttggttcaaggcagagtaatgtttccatgagtaatggtccaggaccgacagcagtggaggaaggtggtaattcaaggaagacaaaaacactaaagagtgtatggcggaaggggaaccctgtgccaactgtacgtaaggtcattagagagcaaccaagaactgaaacaaggagtcagtctatacctgtggctaaaccttcagtgtcatctgcatctaagccttcccctctgctactatctaaaccttctgtagcacagcctcctcgtcggcctatcaagtctgatacatcaaatgagaaaaaaggacccatccttattgataaatttgcttccaagagggcagcagttgatccgattgtacctgaggaattgttagaccctctaaaaccagtacgaggcccaccagcaaaagtcagagttgatcgtcgtaaaaaaccagacacacaagctggttccagacgacgtatgtccaatgatgatggattagttgatgaggatactactgacgtgccaatttctggtgttccagtgcgcaagggtaggaggtggagcaaggcaaaacgccgcgctgcaaggctagaggctatgcaagctgaagagccagtcagagttgagatccttgaagttggtgaagaaggtatgctgattgaggacttggcatatgagttggcaattggtgaatcagaaattttacgattcttatcggtgagaggagttatgcttgacaatgttcagactctagataaagatttggttaagatggtttgcatggaatatgatgttgaagtactagaaagtggtcctgtgaaagtggaggaaatggctaagaagaaggagttccttgatgatgaagatttggataaattggaagtgaggcctcccattgtgactatcatgggccatgttgatcatgggaagacaactctgttggattatatacgcaagagcaagttggtggcatctgaagctggtggtataacacaagggattggagcatatcaggttcttttaccagtagatggaaaccatcaagcctgtgtttttctggatactccaggacatgaggcgtttggtgcaatgagagctcgaggagctagagtaaccgatatctgtattgttgttgttgctgcggatgatggtgttcggccacaaacaagtgaggcaattgcacatgcaagggcagcaggggtgccaattataatagcaataaacaagatagacaaggagggagctaatgcagaacgagttatgcaagaactttcccaaattgggataatgccagaaatgtggggtggtgataccccaatggtcgagataagtgctcttactggggataatgttgatgaacttctggaaactgtcatgcttgttgcagagttgcaagaattaaaggcaaatccacataggaatgcgaagggcactgttattgaagcatgccttgacaaggccaaagggcctcttgctaccttagttgttcagaatggaaccctaaacaaagctgatattattgtgtgtggtgaagcttatggaaagatccgtgcattgtatgatgactgtgggaagctcgttgacaaagcaggaccatccaatgcagtgcaggttattggcctcaataacgttccccttgccggtgatgaatttgaggttgttgacaaccttgatgttgcacgtgaaagggcgaatgggcgtgctgaagcactgcgcatagaaaggatatctgcaaaagctggggaaggaaaagtcacactctcagctattgcagcatcggtttcatctgcgaagcaagttggaattgatacacatgagctaaatgttatccttaaagttgattttcagggttcaatcgaggctattaggcaagccatccaaactcttccacaagaaaatgtctctctgagattcctccttcaaggtccaggagatgtgagtgttagtgatgttgatctggctgttgcttcggaaggaattatatttggctttaatgtcagagcaccaggatcagttaaaaactatgctaagaagaaaggtgttgaaattcggatgtacaaagtgatctatgatttgattgatgatttacggaaggccatggaaggtcttctcgaacccgctgaggaggaagtaccaattggttcggcaaaagttcgagctgtctttagtagtggcagtggaaaggtggccggatgcatgattacaacaggaaaagttgttcaagattgtaatgtgcgggttcttcgtaaagggaaagaagtatatgtgggttcgcttgattccttgagaagggtgaaagaaactgtgaaggaggttggtgctgggctagagtgtggtattggggtagatgacttcgatgaatgggaggaaggtgacatcatagaggcattcaataccgtgaataaggcaagaaccctcgaggaggcctctgctaccgtgactgccgcactcaaggatgcaggggtccagctgtagaattggcaacacgctgatactcttttttattaatggtatgaaatgttaatttatatatactttgaagctgaatggtgagctgaagctattgtgctgaagctgttgtgagctggaccggtggaccgtttccctgattccttcggtggtggctgaagctgaatggtgagctgctggagagtggagacgtggagtggtggccggtgggcgcctgggcggtggctgccggctggtgcagactgtgcacttgtgcagtgcagtggcgctaatatattgtgtgtggctgtggaagatgcatgtgtggatcggctgtctgtagtgagatggaagatactgtatatagcatatcaaaccatatattcatcgtatatacattaattattgatattgaattttgtcggtcaagcgtatgggccggccaagccaaactgtatttgccgaaagccgcttttgaatcgccgggagtggcaag

SEQ ID NO: 59463 - DNA, 3467 bp, Zea Mays
cttctccgtagcgctgctatcaaacaccttgtgctgtcaacatttatgagtgcaaggcagtattgctaagagtatcttgccatggcatctcctgcttccgtcaccaacctcggaagcaatgggaggtctggcccgctcccggctgcagctgcaaggagggcgcagttggtcacaaggatcagattcacggggttcgatggcataaggcgatggcagtatgagcctgggaggctttgcaggtgtatggtcgtcactaatctgattgaggagaaggttgttcagttctcgtcaagagggagtgtcagtgtgaaagctgatgatgacaatgatctgcttctgaagccgccacagaagccagtccggtcaaatggacccccggagagcatgaaaacagcatcactgccggatcagaagccagcaggggcaactttagacgacagagagaaggtcagagagtcactggacgctgtattggagaaagcagagaagcttgaggcctccagctttggtaatgcagatggtggcaaccttggttcaaggcagagtaatgtttccatgagtaatggtccaggaccgacagcagtggaggaaggtggtaattcaaggaagacaaaaacactaaagagtgtatggcggaaggggaaccctgtgccaactgtacgtaaggtcattagagagcaaccaagaactgaaacaaggagtcagtctatacctgtggctaaaccttcagtgtcatctgcatctaagccttcccctctgctactatctaaaccttctgtagcacagcctcctcgtcggcctatcaagtctgatacatcaaatgagaaaaaaggacccatccttattgataaatttgcttccaagagggcagcagttgatccgattgtacctgaggaattgttagaccctctaaaaccagtacgaggcccaccagcaaaagtcagagttgatcgtcgtaaaaaaccagacacacaagctggttccagacgacgtatgtccaatgatgatggattagttgatgaggatactactgacgtgccaatttctggtgttccagtgcgcaagggtaggaggtggagcaaggcaaaacgccgcgctgcaaggctagaggctatgcaagctgaagagccagtcagagttgagatccttgaagttggtgaagaaggtatgctgattgaggacttggcatatgagttggcaattggtgaatcagaaattttacgattcttatcggtgagaggagttatgcttgacaatgttcagactctagataaagatttggttaagatggtttgcatggaatatgatgttgaagtactagaaagtggtcctgtgaaagtggaggaaatggctaagaagaaggagttccttgatgatgaagatttggataaattggaagtgaggcctcccattgtgactatcatgggccatgttgatcatgggaagacaactctgttggattatatacgcaagagcaagttggtggcatctgaagctggtggtataacacaagggattggagcatatcaggttcttttaccagtagatggaaaccatcaagcctgtgtttttctggatactccaggacatgagatctcaggcgtttggtgcaatgagagctcgaggagctagagtaaccgatatctgtattgttgttgttgctgcggatgatggtgttcggccacaaacaagtgaggcaattgcacatgcaagggcagcaggggtgccaattataatagcaataaacaagatagacaaggagggagctaatgcagaacgagttatgcaagaactttcccaaattgggataatgccagaaatgtggggtggtgataccccaatggtcgagataagtgctcttactggggataatgttgatgaacttctggaaactgtcatgcttgttgcagagttgcaagaattaaaggcaaatccacataggaatgcgaagggcactgttattgaagcatgccttgacaaggccaaagggcctcttgctaccttagttgttcagaatggaaccctaaacaaagctgatattattgtgtgtggtgaagcttatggaaagatccgtgcattgtatgatgactgtgggaagctcgttgacaaagcaggaccatccaatgcagtgcaggttattggcctcaataacgttccccttgccggtgatgaatttgaggttgttgacaaccttgatgttgcacgtgaaagggcgaatgggcgtgctgaagcactgcgcatagaaaggatatctgcaaaagctggggaaggaaaagtcacactctcagctattgcagcatcggtttcatctgcgaagcaagttggaattgatacacatgagctaaatgttatccttaaagttgattttcagggttcaatcgaggctattaggcaagccatccaaactcttccacaagaaaatgtctctctgagattcctccttcaaggtccaggagatgtgagtgttagtgatgttgatctggctgttgcttcggaaggaattatatttggctttaatgtcagagcaccaggatcagttaaaaactatgctaagaagaaaggtgttgaaattcggatgtacaaagtgatctatgatttgattgatgatttacggaaggccatggaaggtcttctcgaacccgctgaggaggaagtaccaattggttcggcaaaagttcgagctgtctttagtagtggcagtggaaaggtggccggatgcatgattacaacaggaaaagttgttcaagattgtaatgtgcgggttcttcgtaaagggaaagaagtatatgtgggttcgcttgattccttgagaagggtgaaagaaactgtgaaggaggttggtgctgggctagagtgtggtattggggtagatgacttcgatgaatgggaggaaggtgacatcatagaggcattcaataccgtgaataaggcaagaaccctcgaggaggcctctgctaccgtgactgccgcactcaaggatgcaggggtccagctgtagaattggcaacacgctgatactcttttttattaatggtatgaaatgttaatttatatatactttgaagctgaatggtgagctgaagctattgtgctgaagctgttgtgagctggaccggtggaccgtttccctgattccttcggtggtggctgaagctgaatggtgagctgctggagagtggagacgtggagtggtggccggtgggcgcctgggcggtggctgccggctggtgcagactgtgcacttgtgcagtgcagtggcgctaatatattgtgtgtggctgtggaagatgcatgtgtggatcggctgtctgtagtgagatggaagatactgtatatagcatatcaaaccatatattcatcgtatatacattaattattgatattgaattttgtcggtcaagcgtatgggccggccaagccaaactgtatttgccgaaagccgcttttgaatcgccgggagtggcaag

SEQ ID NO: 59464 - DNA, 2179 bp, Zea Mays
gtttttgttgtttacctcgcgccaccacccaagtgagtgacccatcccctccatcggactctccactcccaccgtctcacgaccacgaataccgccgcccccggccctttcctcgtctcctcctcctttcatcgccaccatcgccgtcggtgcgccttgcaggaggtgcgagaggtcggtcgaaaagcacagccatggcggcggtcaaggtggacaaggccaccaacgagctgctgctgggccccgactggaccctcaacatcgatatctgcgacgccgtcaactccgatcacgggcaaggaaaggaggtgattaaagctttgaaaaaacgtattcaacacaagaatgcaaatgttcagtttcttgctttgacgctattagagactctaataaagaactgtggggatcatgtacattatcaagttgtagagcgcaatatactggaggaaatgatgaagattgtgaagaaaaaggctgatatgcaagtgagggataagatcctgatgctcttagactcttggcaagatgcatttggagggcctggtggaaagcaccctcattattactgggcatatgctgaattgaagcgatctggtgttgaatttccaaagcggtcacctgatgctgcatcgatgtttatttctccggtcacacagccagaatctttgccaacatatcttcaagcagggtatggaatgccagttgattcttcctcaaggcttgatgaggcaatgtcatcaaatggagctcctctgagcatctcagacttggaacgaatgctgggggctgtggaactattaaatgagatgttgagagctgtcaatccaaatgaaaaagatgctgccaatgatgaaattattacagaacttgtgacccaatgccggtcataccagaaaaagatcatgagttcagtaagcttagtaagggacgaggacctcttgggccaagctcttgatttaaacgatagattacaaattctgcttgagaaacacgattcaatcgcatcgtgttctccttcatctgctgacgtgatagacgtggtgtgtgaagtgccatcgggaacagctccaaaccaaggaacaaatttccctccacaagctgcacttcgtacagccatagtaccgaccaatgttttggacgacgaagatgaggaaaacgaagacgacgagttctctatgctagctcgaagcccacaaacacccagagcacctcttcaccaaccgtccatgatgaaacagcaagctctacagcctctgttccctatacagcatcgccatcagttgcgaacaacgcattgcctccgcacgatcctccagccccgccagtgagggtctctccagaagagcaggtcatgagtgaccttctcgcactcaccgtgtcatcaaacccgtcaccatcctcctacaccccggtaacacctgaaccaggccgcctgaatcaaagcagcgcaccaacaggtgagcttccgcgggcttatcatggagaccaaggacacgtgtctgcaccttacgtcgctccgtgggctcagccgcagtcccagaccgcaggaagtcagcaaccgacacgcactcaggcacaggtatcttacagctcgtatgcttacccaccgccgccatgggcgtcacaggacagcaccgaatcgaacccttttgtagcggcagcatcgtcatctcagcaataccagtccacttcgagaacccctaccatgccaccgaacttgaggcctctactacagcagtcgcattcttttggagtaccacttccaaccgcgagtctggactcgccaataaatgggaacctgaagcaaccgctgtctgctggggctcgcaggccatcttatgtttcttccaacaagttcttcgacgacttgtttgagaggaactcggatggtagcctgaaagtaggcagcacaaggcacagtgatgtctatggaaaataaatgtcgttctcttgtcctgcctgcgtttgatgttatcagctgcctgcatattagaacgatttagttgatgcttctggcgaacttgcttgcctttccataaataattttgccaaaccaaactatgtggaagcttcagcctatgagctgtccactgtccagacattttgaatggcaaaaggcgattcttcctaaattgtgtaatgaaacgggtttgcttctaaatatagtgttctttagagc

SEQ ID NO: 59465 - DNA, 781 bp, Zea Mays
cgcgccaccacccaagtgagtgacccatcccctccatcggactctccactcccaccgtctcacgaccacgaataccgccgcccccggccctttcctcgtctcctcctcctttcatcgccaccatcgccgtcggtgcgccttgcaggaggtgcgagaggtcggtcgaaaagcacagccatggcggcggtcaaggtggacaaggccaccaacgagctgctgctgggccccgactggaccctcaacatcgatatctgcgacgccgtcaactccgatcacgggcaaggaaaggaggtgattaaagctttgaaaaaacgtattcaacacaagaatgcaaatgttcagtttcttgctttgacgctattagagactctaataaagaactgtggggatcatgtacattatcaagttgtagagcgcaatatactggaggaaatgatgaagattgtgaagaaaaaggctgatatgcaagtgagggataagatcctgatgctcttagactcttggcaagatgcatttggagggcctggtggaaagcaccctcattattactgggcatatgctgaattgaagccagaatctttgccaacatatcttcaagcagggtatggaatgccagttgattcttcctcaaggcttgatgaggcaatgtcatcaaatggagctcctctgagcatctcagacttggaacgaatgctgggggctgtggaactattaaatgagatgttgagagctgtcaatccaaatgaaaaagatgaggatgagctagctccgttgatctagg

SEQ ID NO: 59466 - DNA, 2170 bp, Zea Mays
cgcgccaccacccaagtgagtgacccatcccctccatcggactctccactcccaccgtctcacgaccacgaataccgccgcccccggccctttcctcgtctcctcctcctttcatcgccaccatcgccgtcggtgcgccttgcaggaggtgcgagaggtcggtcgaaaagcacagccatggcggcggtcaaggtggacaaggccaccaacgagctgctgctgggccccgactggaccctcaacatcgatatctgcgacgccgtcaactccgatcacgggcaaggaaaggaggtgattaaagctttgaaaaaacgtattcaacacaagaatgcaaatgttcagtttcttgctttgacgctattagagactctaataaagaactgtggggatcatgtacattatcaagttgtagagcgcaatatactggaggaaatgatgaagattgtgaagaaaaaggctgatatgcaagtgagggataagatcctgatgctcttagactcttggcaagatgcatttggagggcctggtggaaagcaccctcattattactgggcatatgctgaattgaagcgatctggtgttgaatttccaaagcggtcacctgatgctgcatcgatgtttatttctccggtcacacagccagaatctttgccaacatatcttcaagcagggtatggaatgccagttgattcttcctcaaggcttgatgaggcaatgtcatcaaatggagctcctctgagacttggaacgaatgctgggggctgtggaactattaaatgagatgttgagagctgtcaatccaaatgaaaaagatgctgccaatgatgaaattattacagaacttgtgacccaatgccggtcataccagaaaaagatcatgagttcagtaagcttagtaagggacgaggacctcttgggccaagctcttgatttaaacgatagattacaaattctgcttgagaaacacgattcaatcgcatcgtgttctccttcatctgctgacgtgatagacgtggtgtgtgaagtgccatcgggaacagctccaaaccaaggaacaaatttccctccacaagctgcacttcgtacagccatagtaccgaccaatgttttggacgacgaagatgaggaaaacgaagacgacgagttctctatgctagctcgaaggaactcaagattccagcccacaaacacccagagcacctcttcaccaaccgtccatgatgaaacagcaagctctacagcctctgttccctatacagcatcgccatcagttgcgaacaacgcattgcctccgcacgatcctccagccccgccagtgagggtctctccagaagagcaggtcatgagtgaccttctcgcactcaccgtgtcatcaaacccgtcaccatcctcctacaccccggtaacacctgaaccaggccgcctgaatcaaagcagcgcaccaacaggtgagcttccgcgggcttatcatggagaccaaggacacgtgtctgcaccttacgtcgctccgtgggctcagccgcagtcccagaccgcaggaagtcagcaaccgacacgcactcaggcacaggtatcttacagctcgtatgcttacccaccgccgccatgggcgtcacaggacagcaccgaatcgaacccttttgtagcggcagcatcgtcatctcagcaataccagtccacttcgagaacccctaccatgccaccgaacttgaggcctctactacagcagtcgcattcttttggagtaccacttccaaccgcgagtctggactcgccaataaatgggaacctgaagcaaccgctgtctgctggggctcgcaggccatcttatgtttcttccaacaagttcttcgacgacttgtttgagaggaactcggatggtagcctgaaagtaggcagcacaaggcacagtgatgtctatggaaaataaatgtcgttctcttgtcctgcctgcgtttgatgttatcagctgcctgcatattagaacgatttagttgatgcttctggcgaacttgcttgcctttccataaataattttgccaaaccaaactatgtggaagcttcagcctatgagctgtccactgtccagacattttgaatggcaaaaggcgattcttcctaaattgtgtaatgaaacgggtttgcttctaaatatagtgttctttagagc

SEQ ID NO: 59467 - DNA, 2055 bp, Zea Mays
cgcgccaccacccaagtgagtgacccatcccctccatcggactctccactcccaccgtctcacgaccacgaataccgccgcccccggccctttcctcgtctcctcctcctttcatcgccaccatcgccgtcggtgcgccttgcaggaggtgcgagaggtcggtcgaaaagcacagccatggcggcggtcaaggtggacaaggccaccaacgagctgctgctgggccccgactggaccctcaacatcgatatctgcgacgccgtcaactccgatcacgggcaaggaaaggaggtgattaaagctttgaaaaaacgtattcaacacaagaatgcaaatgttcagtttcttgctttgacgctattagagactctaataaagaactgtggggatcatgtacattatcaagttgtagagcgcaatatactggaggaaatgatgaagattgtgaagaaaaagcgatctggtgttgaatttccaaagcggtcacctgatgctgcatcgatgtttatttctccggtcacacagccagaatctttgccaacatatcttcaagcagggtatggaatgccagttgattcttcctcaaggcttgatgaggcaatgtcatcaaatggagctcctctgagcatctcagacttggaacgaatgctgggggctgtggaactattaaatgagatgttgagagctgtcaatccaaatgaaaaagatgctgccaatgatgaaattattacagaacttgtgacccaatgccggtcataccagaaaaagatcatgagttcagtaagcttagtaagggacgaggacctcttgggccaagctcttgatttaaacgatagattacaaattctgcttgagaaacacgattcaatcgcatcgtgttctccttcatctgctgacgtgatagacgtggtgtgtgaagtgccatcgggaacagctccaaaccaaggaacaaatttccctccacaagctgcacttcgtacagccatagtaccgaccaatgttttggacgacgaagatgaggaaaacgaagacgacgagttctctatgctagctcgaagattccagcccacaaacacccagagcacctcttcaccaaccgtccatgatgaaacagcaagctctacagcctctgttccctatacagcatcgccatcagttgcgaacaacgcattgcctccgcacgatcctccagccccgccagtgagggtctctccagaagagcaggtcatgagtgaccttctcgcactcaccgtgtcatcaaacccgtcaccatcctcctacaccccggtaacacctgaaccaggccgcctgaatcaaagcagcgcaccaacaggtgagcttccgcgggcttatcatggagaccaaggacacgtgtctgcaccttacgtcgctccgtgggctcagccgcagtcccagaccgcaggaagtcagcaaccgacacgcactcaggcacaggtatcttacagctcgtatgcttacccaccgccgccatgggcgtcacaggacagcaccgaatcgaacccttttgtagcggcagcatcgtcatctcagcaataccagtccacttcgagaacccctaccatgccaccgaacttgaggcctctactacagcagtcgcattcttttggagtaccacttccaaccgcgagtctggactcgccaataaatgggaacctgaagcaaccgctgtctgctggggctcgcaggccatcttatgtttcttccaacaagttcttcgacgacttgtttgagaggaactcggatggtagcctgaaagtaggcagcacaaggcacagtgatgtctatggaaaataaatgtcgttctcttgtcctgcctgcgtttgatgttatcagctgcctgcatattagaacgatttagttgatgcttctggcgaacttgcttgcctttccataaataattttgccaaaccaaactatgtggaagcttcagcctatgagctgtccactgtccagacattttgaatggcaaaaggcgattcttcctaaattgtgtaatgaaacgggtttgcttctaaatatagtgttctttagagc

SEQ ID NO: 59468 - DNA, 2069 bp, Zea Mays
cgcgccaccacccaagtgagtgacccatcccctccatcggactctccactcccaccgtctcacgaccacgaataccgccgcccccggccctttcctcgtctcctcctcctttcatcgccaccatcgccgtcggtgcgccttgcaggaggtgcgagaggtcggtcgaaaagcacagccatggcggcggtcaaggtggacaaggccaccaacgagctgctgctgggccccgactggaccctcaacatcgatatctgcgacgccgtcaactccgatcacgggcaaggaaaggaggtgattaaagctttgaaaaaacgtattcaacacaagaatgcaaatgttcagtttcttgctttgacgctattagagactctaataaagaactgtggggatcatgtacattatcaagttgtagagcgcaatatactggaggaaatgatgaagattgtgaagaaaaaggctgatatgcaagtgagggataagatcctgatgctcttagactcttggcaagatgcatttggagggcctggtggaaagcaccctcattattactgggcatatgctgaattgaagcgatctggtgttgaatttccaaagcggtcacctgatgctgcatcgatgtttatttctccggtcacacagccagaatctttgccaacatatcttcaagcagggtatggaatgccagttgattcttcctcaaggcttgatgaggcaatgtcatcaaatggagctcctctgagcatctcagacttggaacgaatgctgggggctgtggaactattaaatgagatgttgagagctgtcaatccaaatgaaaaagatgctgccaatgatgaaattattacagaacttgtgacccaatgccggtcataccagaaaaagatcatgagttcagtaagcttagtaagggacgaggacctcttgggccaagctcttgatttaaacgatagattacaaattctgcttgagaaacacgattcaatcgcatcgtgttctccttcatctgctgacgtgatagacgtggtgtgtgaagtgccatcgggaacagctccaaaccaaggaacaaatttccctccacaagctgcacttcgtacagccatagtaccgaccaatgttttggacgacgaagatgaggaaaacgaagacgacgagttctctatgctagctcgaaggaactcaagattccagcccacaaacacccagagcacctcttcaccaaccgtccatgatgaaacagcaagctctacagcctctgttccctatacagcatcgccatcagttgcgaacaacgcattgcctccgcacgatcctccagccccgccagtgagggtctctccagaagagcaggtgagcttccgcgggcttatcatggagaccaaggacacgtgtctgcaccttacgtcgctccgtgggctcagccgcagtcccagaccgcaggaagtcagcaaccgacacgcactcaggcacaggtatcttacagctcgtatgcttacccaccgccgccatgggcgtcacaggacagcaccgaatcgaacccttttgtagcggcagcatcgtcatctcagcaataccagtccacttcgagaacccctaccatgccaccgaacttgaggcctctactacagcagtcgcattcttttggagtaccacttccaaccgcgagtctggactcgccaataaatgggaacctgaagcaaccgctgtctgctggggctcgcaggccatcttatgtttcttccaacaagttcttcgacgacttgtttgagaggaactcggatggtagcctgaaagtaggcagcacaaggcacagtgatgtctatggaaaataaatgtcgttctcttgtcctgcctgcgtttgatgttatcagctgcctgcatattagaacgatttagttgatgcttctggcgaacttgcttgcctttccataaataattttgccaaaccaaactatgtggaagcttcagcctatgagctgtccactgtccagacattttgaatggcaaaaggcgattcttcctaaattgtgtaatgaaacgggtttgcttctaaatatagtgttctttagagc

SEQ ID NO: 59469 - DNA, 1826 bp, Zea Mays
cttgctttgacgagactctaataaagaactgtggggatcatgtacattatcaagttgtagagcgcaatatactggaggaaatgatgaagattgtgaagaaaaaggctgatatgcaagtgagggataagatcctgatgctcttagactcttggcaagatgcatttggagggcctggtggaaagcaccctcattattactgggcatatgctgaattgaagcgatctggtgttgaatttccaaagcggtcacctgatgctgcatcgatgtttatttctccggtcacacagccagaatctttgccaacatatcttcaagcagggtatggaatgccagttgattcttcctcaaggcttgatgaggcaatgtcatcaaatggagctcctctgagcatctcagacttggaacgaatgctgggggctgtggaactattaaatgagatgttgagagctgtcaatccaaatgaaaaagatgctgccaatgatgaaattattacagaacttgtgacccaatgccggtcataccagaaaaagatcatgagttcagtaagcttagtaagggacgaggacctcttgggccaagctcttgatttaaacgatagattacaaattctgcttgagaaacacgattcaatcgcatcgtgttctccttcatctgctgacgtgatagacgtggtgtgtgaagtgccatcgggaacagctccaaaccaaggaacaaatttccctccacaagctgcacttcgtacagccatagtaccgaccaatgttttggacgacgaagatgaggaaaacgaagacgacgagttctctatgctagctcgaaggaactcaagattccagcccacaaacacccagagcacctcttcaccaaccgtccatgatgaaacagcaagctctacagcctctgttccctatacagcatcgccatcagttgcgaacaacgcattgcctccgcacgatcctccagccccgccagtgagggtctctccagaagagcaggtcatgagtgaccttctcgcactcaccgtgtcatcaaacccgtcaccatcctcctacaccccggtaacacctgaaccaggccgcctgaatcaaagcagcgcaccaacaggtgagcttccgcgggcttatcatggagaccaaggacacgtgtctgcaccttacgtcgctccgtgggctcagccgcagtcccagaccgcaggaagtcagcaaccgacacgcactcaggcacaggtatcttacagctcgtatgcttacccaccgccgccatgggcgtcacaggacagcaccgaatcgaacccttttgtagcggcagcatcgtcatctcagcaataccagtccacttcgagaacccctaccatgccaccgaacttgaggcctctactacagcagtcgcattcttttggagtaccacttccaaccgcgagtctggactcgccaataaatgggaacctgaagcaaccgctgtctgctggggctcgcaggccatcttatgtttcttccaacaagttcttcgacgacttgtttgagaggaactcggatggtagcctgaaagtaggcagcacaaggcacagtgatgtctatggaaaataaatgtcgttctcttgtcctgcctgcgtttgatgttatcagctgcctgcatattagaacgatttagttgatgcttctggcgaacttgcttgcctttccataaataattttgccaaaccaaactatgtggaagcttcagcctatgagctgtccactgtccagacattttgaatggcaaaaggcgattcttcctaaattgtgtaatgaaacgggtttgcttctaaatatagtgttctttagagc

SEQ ID NO: 59470 - DNA, 681 bp, Zea Mays
gaacttcttaactgacatgatttcttggctatttttattttaataaggagttctcagactgttgtgttgcattcctatgcgaaggatatatatgagctctgaattagaaagagcttgaaacccacaattgtaggtaccacctagatcatgggtaacagcaagcaaaatgagttaacaaaggagacaactgtgcaagctactggagtagcctcgaacctggtggaagctatccagggagctgggttcaagctgcaaactctaagcttgagcttcgatgatttcgacgagccagcagcaggagcgggaggcactgtccaatccagcgagtgagctaatttgtggtgccgtgcgtggtgccaaatgcatataattcggtctcctgattttgtttaccctgctccttacctttgatttcccaagcacgatcttgttttttttttggcaaatggtcgagaaatcaatgaatatttttaaggaaaaacatttgttttttttggctgattcgtgaagttagtgatggcttaagtaaattcatttggcagcgcttccaatacttgggaattctgggccgaaactgcctaatatccctatccttgtaggctttggctcaacatgcaattgctttacgtttgtttttggaccttggcttggttcgggtaagctccttctatgttatatttg

SEQ ID NO: 59471 - DNA, 2267 bp, Zea Mays
aaatcccttaccccttctctctccaaaaccctccctcgctcttaatgcagtccggtgtataaaaccgcgcaacctcatctctaaaacccgctcttgtcttcagaagtttcagatcctcgcatcgtccgcaccttatcctctagactttacagtacctgctctcagctcctccctatctcaatggcatccgcgaatgccatctccaccgcctccctcctccggcccctctctcagggcagggcgacgaggtcacagcggttcgtggtgcgtgcgaacgccaaagacattgcctttgaccagaaatccagggcagcgctgcaggccggcgtcgagaagctcgcaaacgccgtcggtgtcaccctcgggccacgagggaggaatgtggtgctcgatgagtacggaaaccctaaagttgtgaatgatggagtcactattgcccgtgctattgagctgtatgatccaatggaaaatgctggtgcagcattgattcgtgaggttgctagcaagaccaatgattcagctggtgatgggactacaactgcgtccgtccttgctcgtgaaatcatcaagctaggccttctgagtgtaacatctggtgcaaatcctgtatcactaaagaaaggaatagacaaaactgtgcagggcctaattcaggagcttgagaataagtctagaccagtcaagggtggtggtgatatcaaagctgttgcatctatctctgctggcaatgatgaatttatcggatccatgattgctgaagcaattgacaaagtggggcctgatggtgttctatcaattgaatcctcctcatcttttgagaccactgttgaagttgaagaaggaatggagattgaccgaggttatatttccccacaatttgtgacaaacctcgagaaatcaattgtggagtttgagaatgctaaggttcttattactgatcagaagatcacaagcataaaggaaattcttccaattttggagaagaccacacagctgagagcccctctgttcattattgctgaggacattactggtgaagctttggcaactcttgttgttaacaagcttcgaggaattctcaatgttgcagcgattaaggctccaagttttggtgagcggcggaaggctgtacttcaggacattgccatcgtcacaggtgctgagttcctagcaaaagatcttggtttgttggttgaaaatgctacagaggaacaacttggcacagcaaggaaagtcacgatacatcagactacaacaaccctcatagcagatgcagccagtaaagatgagatccaggcgaggattgcacaactgaagaaggagcttgctgagactgattcagtttatgatactgagaaattggccgagagaattgctaagcttgccggtggtgttgctgttatcaaggttggagctgcaactgagactgagcttgaggaccggcagctaagaattgaggatgcaaaaaatgccacttttgcagctatagaggagggcattgttccaggaggtggtgcggcatatgtgcacctatctacggttgtccctaagatcaaagaagcaattgaggaccctgatgagcggcttgcgctgatattattcaaaattagatggtatgaactgtatttgccagaggcattggtagcacctgcttcattgattgcacacaatgctggagtagagggtgaagtggttgtcgagaagatcaaggagagcgattgggaggtgggctacaatgcaatgactgacaagtacgagaacctgatggaggctggtgtgatcgaccctgccaaggtgaccaggtgtgcgctccagaatgcggcctcagtagctggaatggtcctaaccacgcaggccattgttgttgagaagccaaagccgaagcctcaagtggcagagccaccggagggagcccttaccgtttaaaacttaacgttcttgaggctgctgtccagacggttcagatctgttgagagggtagaactttggtttgagaattttggttcagatccactgggagttgtagagtaggattgctattttgcagacgaagagtaattttactctggtctgaacttatccgaattgaagacatttgcatcaccattttttaaaaataagctcatggcgatgctggattgtacgagcaagtacagtatgtttttagcctctcaatttttgcgtctgtctcagcttggtttttagtgttgcgtaatctcctttgactgcgtataggatcgttttacgtaagattgtgttaattgaat

SEQ ID NO: 59472 - DNA, 2973 bp, Zea Mays
ataagaagatcccaaacattatataaataataatataaagttttttattcggaaatttctttgatattttcctctcacctgactgtactactacctcagcctttgactccccacgcccacggtgcacccacatcacctcgttaaaaagatcccaaacgcacgcgctccacgcacacacacaccctatacgcgccgtcatggccctctctatcatcccgagtacaagcagcggggagcacgctgcggcgtcagcatcggccacggccacgaccacgacgaagctgggtcagctgaacgcggcggtggagcggtcatgggtggggcgacggttccgcctcgcagcgcgcgggactacgttcaccacggagctgcgtgccggcacggccacgttcctcaccatggcttacatcctcgccgtcaacgcatccatcctctccgactccggcgccacgtgcacggtggacgactgcgacgtgccgtccccagggtgcaagttcccgcccgtggaccccgggtacgccgcttgcgtggcgcgcgtccgccgggacctgatcgtggccaccgcggcgtcgtccgtgatcgggtccttcatcatgggcgccttcgccaacctccccatcgcgctagcacccgggatgggcaccaacgcctacttcgcctacacggttgtcggcttccacggctccggcacgctcccctaccgcacggcgctcgcggcggtcttcctcgagggcctcatcttcctctttatctccatcgtgggcttgcggtccaagctcgcgcagttcatccccacacctgtgcggatctcggcgtccgcggggatcgggctattcctggcgttcatcgggctgcagagcaacgagggcgtggggctcgtggggttcagctcgtcgacgctggtcactctgggtgcgtgcccagcgtcgcagcgcgcgtctgtggcgccagtgctgacgttccccaacggcacggtggcgctgatgccgggtggcaccgtttccggcggcatactctgcctctcggggcgaatgacctccccgacgttctggctggccgtcgtggggttcctcatcatcgccttctgcctcatcaagcgcgttaagggcgctctgatctacggcatcctgttcgtgaccttcgtgtcctggccgcgccacaccgccgtcaccgcgttcccggacacgcccgccggcgacgacagcttccactacttcaagaaggtgttcgacgtgcaccggattcggtccacggccggcgcgctcgacttcagcgggcatcggccagggctacttctgggaggcgctcttcaccttcctctacgtcgacatcctcgacacaaccggcagcctatacaccatggcgcggttcgccggattcgtggacgatgcgacgggagagttcgagggccagtacttcgccttcatgtccgacgcgacggccattgtgtttggctcgctcctgggcacgtccccagttacggcgttcatcgagtcgtcgacggggatccgagagggcggccggacggggctgacggcgctcacggcggcgatctacttcgcggcggcgctgttcatcacgccggtgctcgcttcgatcccgtcttgggcggtcgggccgccgctggtgctggttggcgtgatgatgatgcgtgcggtggcggaggtggactgggacgacatgcggcaggccgtgccggcgttcctaacactagcgctcatgccgctcacctactccatcgcctacggactcatcggcggtatcgcctcctacatgctcctccactcgtgggactgggcgtgccaagcgaccaggaggctcggctgcctcaagaagggcggaggcggcgccgacagcactaatggcggcgtggcagagcagagcgtggaagagcagagaaaggatatggaatcggcataacatttctttcgcctttttgtcctctctgcctttcaaatttcttattttttagggaatttaggtacttcggtcaacctcaatggccattgtttcattttacagtttttaacagtgctacgtcaggtccataagatagtttttatgttgcggtttcatagcccatactgaacctttgacagggcgtaaattaatagaggaactagggtagatgattacatgacagtcaactgaactactacaagaagaaagtatatctcccagtttccttcttgtacaccaccttctccttgtacattaccttcaaaagttacacagaaatcagcttacgttcaggaatataagtttcaggatagagcctgtgcatctgattgccaaagaacccatgtaactggagtgaggttcatgttttttcacgcccttggtttattctttctttcacaggtacaaaaacaaaatgtatagcagagaatttggattcggaattgcaaggggggaaaagaaactacttggccaataagatgtagaggagagcagacgcaagatcaaaacatgaacaatcctcacttttttgctcacttgttgacctgcggattcacagaattacagaaactatagcagccaaattattgcggttctagagtggatcccgcagagctttcaaactgggcggtgccggtggcggctgccgcaggacaggagccgtgccgaggttgctcgccgccggatgtccttgtcgcgcttctgtcggatttggtatgtgacgggacgaaggggatccagccatccagggcacatgcagatgatgctggattcgggagattgagagaagatggcagcagagggaggcgctggtgtaaagccgcagcagatcggagaaagtgacgcagatgaaacgattaggctctcttggaacaacgttgggattggcctgaataggagctcggaatttcatgaacaaatggtcgtctattttattttaaaaatatatagtcatgtacatcctgagacataagtcaaccttttggcataaattgttcccgaggacaatcagag

SEQ ID NO: 59473 - DNA, 1683 bp, Zea Mays
ggcgcgtgtgagccacaccgcgccaggctgcccctccctccgccgcacaacctcaccgatcccactttaagccacaccatcgccccaccgtctcctctccggcgacctcgctggcagcgtgcgcacgagcgtctgcgtccggcctccacacgggccgcctcgccgtgcgcgccgccgccctcccggcagacggccgcagtgacggcgctgcctcctataaggaacttggtctgtactccttgaaaaagaggattgaagatgcagttgtgcgggttgaaacgaccgcttccgatgctctggagttggaggaagcacagagaattaagcaggaagaagtactgcagaaacgtaacttgtgggataatccagctaagtcacatgagactctgtctgctctggctgatgctatcagggtggtcgaccatcttaaagatcttcgcttcaaggctgaagaggcgaagttgattagtcaattatcagagatggatgccataaatggtgagctatttaagcaagcatacaaatcttcagtagacgctagtgagtatctagatcgctaccagatgtacaagcttcttaagggtccgtatgacaaggagggagcgtgcattattgttactgcagtatctaacggtgttacttctgagctgtgggcagagaaggtctttggcatgtatacaagttgggcacggaagcaaggttacaaggttggattgattgagaagatattttcaactagtggccatatccaatctgcaacaatggagattgaatcagagtacatgtttggcaccctttctggagaaaaaggaatgcatcaaatgatatactcctcccttgaaaattctgacattgatcaggcattatcagctagagtcgacataattcccctgttcttggatagaccagttgttcttcacttggatgacgatgatatagagacctctccctcaccttctgtacataagaagggagatagaagaaatggtgttgccgttagggttcaacacgtaccaagtggagtcactgctgaaagttcaggtgagagaagctactttgcgaacaagctaaaagccacaagtaggttgaaagcaaagctccttctaatagctagagaattgaaagtatcggatataaaaacaatcaacagacaagctgtagaggataaatgcaactgtggagcacgaagatacacatttggacgtcagaaattggtacatgatctcaatacaggcatccaattgtcagacttgaactcagtcttggaaggcgatatcgaaccattcatcagaggccgtattacatccagacaattgtgatgcacccagctctcacaaagtcattgatctgttcgctcgttatgattctgtacatttatttcttttcttttacagaacaaatcacatcataagataatatctgtaaatatatcacatttcaagtcaaaagggcatgccaaaaggtatacaaaacatcaatattaatgagcattgtcaagcttgaatctcttttattgtgtagagttagtggaacttgttggctatcaacaccgcatcctcaatagctagtccttcgccttacaccacctcattgtcatagaaaccagactacaaatctgaccttgaagagtcaattcatgcaaatacaccattggacaagatgtaacatttggtgttttttatg

SEQ ID NO: 59474 - DNA, 4379 bp, Zea Mays
agcttccagccttcaaaacaaaaggcagccatccccgagcggccgagccccacagcaggccagcacagaaacggtcccagaatggccgccacagaagatgcacgcccattgtcaaaatttctcagtggacctttctctccaagtctcaaagatgacggccgctttgagccgcccacccactgtcttcggctcccctctttctcttcccaaaccattgcctactcttcctcttcctcttcccaacccatcgccgtccccgtccggccgtccttcacaaaccatctttctcctctccatcaagtgaagtcctatccctccccttccctcttccttccttcccccgcctcccttcctcccccagttcacatcacctttgctttgctttgctttgccttgctttcgtgccgcccttcaacgcaagaagccaacaagcacaagcaagcctccagtatcagcaagacaagaacgtcgcgagagaaaccgttgatcccaacaagccaaggagaaatccggctgaggattaagctgcgagaagcgaagaaacacaggaactcgccgcccccgtcgctgaagaagaaagcagcagccaccagccatggtgcggagcaaggaggcgccgaaaaagaagcccaaggacccgctcctgacgcccccgtccaagcccaggggcggcttcctggacgagggctgcccgtggaaccgcggcggcgcggccatgtccccggcgccggcgtcggtgcccagctacatgcggggcaccagcagctctgacgccaaggccgagcgccgtgggcggcctgcggcgaccgtttcggcgtcggcgtcccccgcgaggtggaggcccgcggcgtcggtgtcagcgtccgcgtcgcccgcgccgcggcggaggcccgcggtgcgggtgctgaccaaggggaaggttttgttcgcggaggaggaaccttgctctggctccggcatgggccgcgccacgtgctcctcaaccatgaaggacaccaagttccccgaagcgctcgacctcgcaccgggctccaccgacgccgagggccccgcggcgctgcgggtgtgcccctacacctactgctccctcaacggtcacgtccatgcgccggcggtgccgctccggagcttcctcgcgtcgcgccgccggctcatcaagacgcagcagagcatgaagctcaagggcgtctcggccttccgcaagaaatccgaggagaggaccagcggcggaagtggcagtggtggaggtgcaaagatcgcgcctttgatcgacgaggaggcggtcggcgacttcttcgtcgaggtgtacggcggcccgagggtgagctcggacatgagctgcagcgacatgtctctcgacgagatggatgccacggtgcggaggatggagttcgtcgtgttcgatcggtgcggcgcggacgaggacggtgagaagggcaaggatcttgcggtttgcgatgatggtgaacctgagcctcgcccggtgttgcaacagaagcatggtgccttcggggacagcttgtcggagtgcagtggggtacacatcgacaacgatttcgtcgaggagttgccatggttgaagtaccatggatacgagtatgatgatagcttggacgatgagatcttggaagaacagagaattggggaacaggaggttgttggagcagagttttctgtggagcaagaagcagagcaaggaacgtccggtagatcctctgatgaatacaaagaggatgctgctgatgaggagaatacaacgaatttggtccgtgaccaggagatcctctcagatcaaggtgttgcttgcagagtggaggcatgcgaggagctgggtggaagagatgaagacaacatcctggaggcgtctgctggacaagggaaggcagaagagaagctctctgatgatatctacaaatctgagatacctgatcaagaaataacagcaaggacatgtgctactctggaaggtagcttcgaagaggatatttcatcggaccaagaggcaaatgatgatgatgaagatgagtgccatgtgaaatctgatggcgaatcagaggacactgaggagcaagatctggaggatcaacagagcatgccagatgatgtctctaaaatggagatttctgaggacactatctctggtgatggatgcaaagaggatttttctgaggaagtaacctcggcagctgtgttagcagatgatgtgtttgaacaatatgagaagactgtggatgatgtgcatgaacaagatagcagccctgctaaggctcaaatggaattgggtaatccaacaagcaaaaaggaagacacttctgaagaaactgctattttgcaacaaatcaatcaagacagcaatgtggatactcaaagggaattggagattagggcatccatattggaagaatctggtattgctcagcaaagcaaccttgatggtgataaaatggaaccagagattattgtgtgcaagctggaagatgtttctgaagaatctggtgcctgcactgaaagcaacctacatgataatacagagtatgttatagacgatgctgaaatgagacaagaaattactttatgcaagcgggaagatgcttctaaagaaactggaattgatcaagaaaccttagaagatgatagctcaacatgtggtattgttgatgacagaaacaatctggagatcaataactgcaaatcggaagatgtttccatagaatctgttggcactcaggaagctgatcataatgataactttgcaaatttcagtaatgatgttcaagggactgcagaagatcatgactcacatctcattgatgatgctcaaaatgatatccaaatccctggaggcaaatcagaagacacttgcaaagaatttgataccatgaaagaaactgatcagagtgatagctctgcaaatgtcagatatgatgctgaagaaactgtagaagatgatgattctgtgtgtgtcagtgatgatgctcaaaatgatctgaagaataccaagtgcaaattggaagatgcttccaaagaatcttctactgctcgcgaagctgagcggagtgatagttctgcaaatgtcattgctgattctcaaaatggatctgaacttaccacaaatgagttggcagtcattacgatcagtaacgacaaggaaaatgaatccatgcttttcacatgcaactcagaagatggtttcaaagaatctattattggtcaacaagctgaccatgatgatagctctgcatatatcagttatgatgatcaaaatgaatgtgaagttactgcatgtcattcagaaggtgctcaaggggaatcaaatgtagttcaagaagaatgtacggatgcaaaagaaccttctattgatgacatatgtggcgcgttcagcggaatgaacctcaagggtgatgtatattttgatcctgctgagtctgccacatgcccgaggaacaagttgatcatctccaggaggagaagaacacctgaagaggaggaatacttgcgaggtttcaatccacgggcaccgaattttcttcctctggaactggatccagacgcagagaaggttgacctcaagcatcaaatgatgggtgagcggaagaatgctgaagaatggatgattgattacgcgcttaggagggcggtgacaaacttagctcctgctcggaagaagaaagtggagctccttgtccaggccttcgagactgtcctaccacatgacgaagatgacaagaaaaatgtctcaccctcaaggcctgtccaagcctgcaactgataacattagagttagtggttacactgatgttgatgtcgacgcgcaagctactaactcggaggttgctgcaatattatcgcgagtgacctgctccaagtttgaatgagagagcgctacttactaatttgctagaggtaactagagaattagagatctctagctgagctgtgacagaggagctcactcctgctccacaaggaaggataactactcattagtcattactgatcaaggtatccctatccagttgctgagttgcaaagaggatgctcccggcttgagttatgtaatttaaaagtgtgtatacatgtctcgtgtgctaatgttgtctgatattgtgctggtggatctgtgaggattggaaaatgtcaatggtgatgaggtccatgctcctttggcaaagatcaataaaactcttcttgagtgctcaattgttgttactgaggttgaatctgcgtcacaatagcacccatgcacacatgtttatatttgtaaatcctgagagccatgtgcctttctaggtgcacacgctatgaggtttcgtgaacacagtccagtaccagttactgaatcgtctgaaaatcatcaggtcgatgtagccgaaggtgaa

SEQ ID NO: 59475 - DNA, 2216 bp, Zea Mays
gcgtgtgtagtgtgttctgctgcaaaccagcaatgcgacctctctctaatcttttgtgaaaaacgtaaggtttagatgctaatcagatgaacaagcaatgttcagttgtcagctgtttacatttcaatctgcattcaaattctcatcgtacaagatctgtcagactttgctggttccagcgatgatgggtcgatgtgttgtgtcatgtgtgcgtacaggtctatgttttttttgctgacgacgcggcatattccgcctccctccagcggagaactcctcaaaactgcacgcagaaaacagatcaattgtagtcactgcctattcttggccatacggctttccccacaccccaacacaaacaagagaaaaaaacaaaaactagacgaaagagggaagaaaccaagaaattggcgaatccctgacgctccccactttcaactcccatccgcttgccgttgccgcgtttgtttatcgagccaatttgatcagggcgccacaccgaaccctagttcttgatttaatcacgggttgtgtggtcatgccggccgggtcaccccgttcttcttctcttccacgagttcaggaggtagagtgagagagaacatggaacgacaggggatggagggcaacaatcttctgcattttcttgataccccgagcgcccattacagaaggacatgcgacggatttgaggcccaacacggcggcgatgaacactctgagacatcagatactgatccggcgaatgcaagggaaatgctggaatatttgttgaaccaaccagcaaacaaaatctgtgcagactgtggctctccagatccaaaatgggtatggtccccaagatttcgtctacaattaaactgcttttgcacgtgcagggccctgccttttggcacattcatctgcattaagtgctctggaactcatagaagtcttggtgtgcacatatcaaaggtgatttcagtgaatctggatgagtggacagatgatgaagtcaactgtttagctgaatcaggcggaaattctgttgtgaactcaagatatgaagcctttttacccgaaaacaaaaagctaaaacaagattgctcaacggaggagcgtaatgattttatcaggaaaaaataccagtttcaacagtttgtgtgtgatccacaattttcatgccctttaccacttaacagaaagcatgcaccaccagataaaaatcaccagcagcataatagcagcaagtatggttttggccatacttttaggaatagctggagaaaaaaggattcagatagcaaaagcctaaagaaaatgtcggatgtgggaatgatagaatttgttggattagtaaaggtcaatatcgtaaaaggcacagatttagctgttcgtgatgtgatgtcgagcgatccgtatgtcttgattcatctagggcaccagtccatgaaaacaaaggtgataaagaacacactgaatcctatctggaatgaaagactaatgctttcgatccctgacccaattccgcctcttaagctgcaagtatttgacaaggacacattcagctccgatgaccggatgggggaggccgaggtggacatccggccgctgattgcagcaacgaaggagcacgagaactcgaccatcaccgaatcgacagaactctacagatggtcagccagcgaagacagcaacggtgtgctcgccaaggacagcgtcatctctgttgcgagtggaaaggtcaagcaggagatcacactcaggctccagaatgtcgagcgcggtgaggtcgagatcgagatcgagtgtgtgccgctcagccagtagcagtcccatcgtgagcaggactggaagcagaaagagggaaggaatacatcatgctccattgttgtgacaaggacactgctttgcaatgcagaaagacctcagcttcacttgtttgattgctccatgcctgtaattcgcgtgcatgtgtgagatgtgtaatgtgttgtacggtagataggcaaagggaaattatctacttatattactttgatgataggcatacggttgaactgtttccagtagatttcctgacctcagttgctagctggtactaccaggatggtgaaaagatctgtatgcattttgcccatagacttggcttgctgcactggggaagacgacaatggtgaccgacaaaacagtcctacaacggttagagacaatttaaaaaatttaaaagaaagaaa

SEQ ID NO: 59476 - DNA, 1566 bp, Zea Mays
gtagcaattagcccaaaactggaccgaatcgtcagccgtgcgtgccagggaacactaacacgccatgaaaaaactggcagagctcatgctcatcctaggtggagctttgcgcgtgtgccatgtgttgctggtggtgctgccgccgctgcctggagtgcatccataacatcgtccctcccctcagccttcccttcctccgcttctccggcctagctctcccaggtggaggtggagcggcggcggcggcttctccacctgtagtctccatggcgtccatctcggtccccagccgggccccttctgcagccgaagacgccgagaacattaggaaagcagtgcaaggatggggcacggacgagaaggcgctgatcgagatactgggccaccggacggcggcgcagcgcgcagagatcgccgtggcctacgagggcctctacaacgaacccatcatcgacagactccactccgagctctccggcgacttccggagcgcgatgatgctgtggacggtggacccggcggcgcgtgacgccaagctcgcccacaaggccatgaagaagcagggcgagcggtacgtgtgggtgctgatcgaggtcgcctgcgcgtccgcgccggaccacctcgtcgccgtcaggaaggcctaccgcgaggcctactccgcctccctggaggaggacgtcgccgcgtgcccgctctacaaggacccgctcctcaagcagttcttggtgcggctcgtgagctcgtaccggtactccggcgagctcgtcgatgacgagctggcgagggcggaggccgcggagctgcacgacgcggtggtggcccggaagcagccgctgcacggcgacgtcgtgcgcgtcgtcagctcccggagcaaggcgcagctgaaggcgacgttcgagcggtacaggctggaccacggcaaggccgtcgacgaggtcctcgaggaacgccgcagcgaccagctcgcggcggtgctcaagacagcggtgtggtgcttgacgtccccggagaagcacttcgcggaggtcatccggagctccatcgtcgggcttggtacggacgaggagtccctgacgagggcgatcgtctcgcgcgccgagatcgacatgaagaaggtgaaggaggagtacagggccaggtaccgcacgacggtgaccagcgacgtcaacggagacacttccggatactacaatgtcatcttgctcactctggtcggccctgagtgaatgaccatggatggacgatggatcctcgtttttgtttgattgaacgaaacggcactagtgttgtttgttcacatatgtgtacagaactgctgagtgaaatggtgatatttgtggtgatccatttggtgaaaataaaacgccagatcgatgggaaaaccaattgtctgcctgagtacataggttagagaaattgtttgggactttagcttgcgtgaacaaaacgatactactggtgtcgtttgtagtttgctcgtttttgtttgttttggacaaaatgacactggtatcgtttgttcacacaatagtacagtgtgcgcgtcatgcgctcatgtgttgtatc

SEQ ID NO: 59477 - DNA, 1321 bp, Zea Mays
tttcaatctaagcccagcttcgagctctggcagtctggcacaccgcactctgccacaggtccacgcttccaccagcccactccccgtcgccgacctcacccccctcatggacggtggccgagccgcagccgtcggcggcgacccctctcccatcgctgctccttccaatcccccggcgctgagcagccggcccgtcgatgtctcctcgttcacccataccccgtgctactgcgaagaaaatgtttacatgttatgtaacgagcttattagaaccggagtggctgatcctgcgggcactgatctttatgttgttttcatatccaacgaggaaaaaaaggttcctctctggcatcagaaagcaggccattctgatgatggatttatttgctgggattatcacgtgatatgcatccagtgtttcatggtacttcttgatgtgcatatggaagtctaggcgaagcaaagaagttcttgattttgtttgggatctggactccgatcttcctttcccttccccattgatccaatatgtttctgaggcgattcaaccactatcattcggcaattccagatatgcaagactcttccgtgtggttcatgctcctgtgtttcttcaatcgtttgcctcagacagaagccatatgaaggatcctgaggggaactggattcagttacccccaaaatatgaaccgatcgtggctgaagatggaaccaccaataacctcaatgagtacatcatgatgtctgtgggggacgtggcagacagagaaaggatggctaatgatgtttactgcaacaagcatggtgtggtgctaaatgaaacgatcttccctgaattcttcgcccagctgcctgctccacatacttagcaagcgatctttctgttgtgatgggttactctgtacacttcaatagtgcactcacaagattatgaattaaaatatatgggcactattggacacatggtgcctctaagtagcgtttcagatagatcctggcctgttttggaaagcaaaatgtggggatctcatagttctgttagcctagacatctgaaagcttcatcttgtcccaaataatgatgactaggtcatgtttaacggctttagctttctttggtcattgttcgtcgaaacttatatgaacataacacttctatgtgctcgttgttaccttacaagtaaatatgcaacccataaactttaaacttgcaggctgtcgcacctttttgctcttgctcttacgctcattctggatccttagaattaaaaactattctaataatcataatttagatgtaaatcaattgttgtattgagaat

SEQ ID NO: 59478 - DNA, 1280 bp, Zea Mays
ctaagcccagcttcgagctctggcagtctggcacaccgcactctgccacaggtccacgcttccaccagcccactccccgtcgccgacctcacccccctcatggacggtggccgagccgcagccgtcggcggcgacccctctcccatcgctgctccttccaatcccccggcgctgagcagccggcccgtcgatgtctcctcgttcacccataccccgtgctactgcgaagaaaatgtttacatgttatgtaacgagcttattagaaccggagtggctgatcctgcgggcactgatctttatgttgttttcatatccaacgaggaaaaaaaggttcctctctggcatcagaaagcaggccattctgatgatggatttatttgctgggattatcacgtgatatgcatccagtctaggcgaagcaaagaagttcttgattttgtttgggatctggactccgatcttcctttcccttccccattgatccaatatgtttctgaggcgattcaaccactatcattcggcaattccagatatgcaagactcttccgtgtggttcatgctcctgtgtttcttcaatcgtttgcctcagacagaagccatatgaaggatcctgaggggaactggattcagttacccccaaaatatgaaccgatcgtggctgaagatggaaccaccaataacctcaatgagtacatcatgatgtctgtgggggacgtggcagacagagaaaggatggctaatgatgtttactgcaacaagcatggtgtggtgctaaatgaaacgatcttccctgaattcttcgcccagctgcctgctccacatacttagcaagcgatctttctgttgtgatgggttactctgtacacttcaatagtgcactcacaagattatgaattaaaatatatgggcactattggacacatggtgcctctaagtagcgtttcagatagatcctggcctgttttggaaagcaaaatgtggggatctcatagttctgttagcctagacatctgaaagcttcatcttgtcccaaataatgatgactaggtcatgtttaacggctttagctttctttggtcattgttcgtcgaaacttatatgaacataacacttctatgtgctcgttgttaccttacaagtaaatatgcaacccataaactttaaacttgcaggctgtcgcacctttttgctcttgctcttacgctcattctggatccttagaattaaaaactattctaataatcataatttagatgtaaatcaattgttgtattgagaat

SEQ ID NO: 59479 - DNA, 1263 bp, Zea Mays
tcgagctctggcagtctggcacaccgcactctgccacaggtccacgcttccaccagcccactccccgtcgccgacctcacccccctcatggacggtggccgagccgcagccgtcggcggcgacccctctcccatcgctgctccttccaatcccccggcgctgagcagccggcccgtcgatgtctcctcgttcacccataccccgtgctactgcgaagaaaatgtttacatgttatgtaacgagcttattagaaccggagtggctgatcctgcgggcactgatctttatgttgttttcatatccaacgaggaaaaaaaggttcctctctggcatcagaaagcaggccattctgatgatggatttatttgctgggattatcacgtgatatgcatccaggcgaagcaaagaagttcttgattttgtttgggatctggactccgatcttcctttcccttccccattgatccaatatgtttctgaggcgattcaaccactatcattcggcaattccagatatgcaagactcttccgtgtggttcatgctcctgtgtttcttcaatcgtttgcctcagacagaagccatatgaaggatcctgaggggaactggattcagttacccccaaaatatgaaccgatcgtggctgaagatggaaccaccaataacctcaatgagtacatcatgatgtctgtgggggacgtggcagacagagaaaggatggctaatgatgtttactgcaacaagcatggtgtggtgctaaatgaaacgatcttccctgaattcttcgcccagctgcctgctccacatacttagcaagcgatctttctgttgtgatgggttactctgtacacttcaatagtgcactcacaagattatgaattaaaatatatgggcactattggacacatggtgcctctaagtagcgtttcagatagatcctggcctgttttggaaagcaaaatgtggggatctcatagttctgttagcctagacatctgaaagcttcatcttgtcccaaataatgatgactaggtcatgtttaacggctttagctttctttggtcattgttcgtcgaaacttatatgaacataacacttctatgtgctcgttgttaccttacaagtaaatatgcaacccataaactttaaacttgcaggctgtcgcacctttttgctcttgctcttacgctcattctggatccttagaattaaaaactattctaataatcataatttagatgtaaatcaattgttgtattgagaat

SEQ ID NO: 59480 - DNA, 1225 bp, Zea Mays
gtctggcacaccgcactctgccacaggtccacgcttccaccagcccactccccgtcgccgacctcacccccctcatggacggtggccgagccgcagccgtcggcggcgacccctctcccatcgctgctccttccaatcccccggcgctgagcagccggcccgtcgatgtctcctcgttcacccataccccgtgctactgcgaagaaaatgtttacatgttatgtaacgagcttattagaaccggagtggctgatcctgcgggcactgatctttatgttcctctctggcatcagaaagcaggccattctgatgatggatttatttgctgggattatcacgtgatatgcatccagtctaggcgaagcaaagaagttcttgattttgtttgggatctggactccgatcttcctttcccttccccattgatccaatatgtttctgaggcgattcaaccactatcattcggcaattccagatatgcaagactcttccgtgtggttcatgctcctgtgtttcttcaatcgtttgcctcagacagaagccatatgaaggatcctgaggggaactggattcagttacccccaaaatatgaaccgatcgtggctgaagatggaaccaccaataacctcaatgagtacatcatgatgtctgtgggggacgtggcagacagagaaaggatggctaatgatgtttactgcaacaagcatggtgtggtgctaaatgaaacgatcttccctgaattcttcgcccagctgcctgctccacatacttagcaagcgatctttctgttgtgatgggttactctgtacacttcaatagtgcactcacaagattatgaattaaaatatatgggcactattggacacatggtgcctctaagtagcgtttcagatagatcctggcctgttttggaaagcaaaatgtggggatctcatagttctgttagcctagacatctgaaagcttcatcttgtcccaaataatgatgactaggtcatgtttaacggctttagctttctttggtcattgttcgtcgaaacttatatgaacataacacttctatgtgctcgttgttaccttacaagtaaatatgcaacccataaactttaaacttgcaggctgtcgcacctttttgctcttgctcttacgctcattctggatccttagaattaaaaactattctaataatcataatttagatgtaaatcaattgttgtattgagaat

SEQ ID NO: 59481 - DNA, 1181 bp, Zea Mays
acgcttccaccagcccactccccgtcgccgacctcacccccctcatggacggtggccgagccgcagccgtcggcggcgacccctctcccatcgctgctccttccaatcccccggcgctgagcagccggcccgtcgatgtctcctcgttcacccataccccgtgctactgcgaagaaaatgtttacatgttatgtaacgagcttattagaaccggagtggctgatcctgcgggcactgatctttatgttgttttcatatccaacgaggaaaaaaagtgtttcatggtacttcttgatgtgcatatggaagtctaggcgaagcaaagaagttcttgattttgtttgggatctggactccgatcttcctttcccttccccattgatccaatatgtttctgaggcgattcaaccactatcattcggcaattccagatatgcaagactcttccgtgtggttcatgctcctgtgtttcttcaatcgtttgcctcagacagaagccatatgaaggatcctgaggggaactggattcagttacccccaaaatatgaaccgatcgtggctgaagatggaaccaccaataacctcaatgagtacatcatgatgtctgtgggggacgtggcagacagagaaaggatggctaatgatgtttactgcaacaagcatggtgtggtgctaaatgaaacgatcttccctgaattcttcgcccagctgcctgctccacatacttagcaagcgatctttctgttgtgatgggttactctgtacacttcaatagtgcactcacaagattatgaattaaaatatatgggcactattggacacatggtgcctctaagtagcgtttcagatagatcctggcctgttttggaaagcaaaatgtggggatctcatagttctgttagcctagacatctgaaagcttcatcttgtcccaaataatgatgactaggtcatgtttaacggctttagctttctttggtcattgttcgtcgaaacttatatgaacataacacttctatgtgctcgttgttaccttacaagtaaatatgcaacccataaactttaaacttgcaggctgtcgcacctttttgctcttgctcttacgctcattctggatccttagaattaaaaactattctaataatcataatttagatgtaaatcaattgttgtattgagaat

SEQ ID NO: 59482 - DNA, 1192 bp, Zea Mays
cacccccctcatggacggtggccgagccgcagccgtcggcggcgacccctctcccatcgctgctccttccaatcccccggcgctgagcagccggcccgtcgatgtctcctcgttcacccataccccgtgctactgcgaagaaaatgtttacatgttatgtaacgagcttattagaaccggagtggctgatcctgcgggcactgatctttatgttgttttcatatccaacgaggaaaaaaaggttcctctctggcatcagaaagcaggccattctgatgatggatttatttgctgggattatcacgtgatatgcatccaggtctaggcgaagcaaagaagttcttgattttgtttgggatctggactccgatcttcctttcccttccccattgatccaatatgtttctgaggcgattcaaccactatcattcggcaattccagatatgcaagactcttccgtgtggttcatgctcctgtgtttcttcaatcgtttgcctcagacagaagccatatgaaggatcctgaggggaactggattcagttacccccaaaatatgaaccgatcgtggctgaagatggaaccaccaataacctcaatgagtacatcatgatgtctgtgggggacgtggcagacagagaaaggatggctaatgatgtttactgcaacaagcatggtgtggtgctaaatgaaacgatcttccctgaattcttcgcccagctgcctgctccacatacttagcaagcgatctttctgttgtgatgggttactctgtacacttcaatagtgcactcacaagattatgaattaaaatatatgggcactattggacacatggtgcctctaagtagcgtttcagatagatcctggcctgttttggaaagcaaaatgtggggatctcatagttctgttagcctagacatctgaaagcttcatcttgtcccaaataatgatgactaggtcatgtttaacggctttagctttctttggtcattgttcgtcgaaacttatatgaacataacacttctatgtgctcgttgttaccttacaagtaaatatgcaacccataaactttaaacttgcaggctgtcgcacctttttgctcttgctcttacgctcattctggatccttagaattaaaaactattctaataatcataatttagatgtaaatcaattgttgtattgagaat

SEQ ID NO: 59483 - DNA, 1149 bp, Zea Mays
cggccagccgcgtgcccagcgagcagcagccgcgtgcagggaggaggagccacgtgcagggcgcgcgcagggaggaagagccgcgcgcgcaagcgaagaaaatgtttacatgttatgtaacgagcttattagaaccggagtggctgatcctgcgggcactgatctttatgttgttttcatatccaacgaggaaaaaaaggttcctctctggcatcagaaagcaggccattctgatgatggatttatttgctgggattatcacgtgatatgcatccagtctaggcgaagcaaagaagttcttgattttgtttgggatctggactccgatcttcctttcccttccccattgatccaatatgtttctgaggcgattcaaccactatcattcggcaattccagatatgcaagactcttccgtgtggttcatgctcctgtgtttcttcaatcgtttgcctcagacagaagccatatgaaggatcctgaggggaactggattcagttacccccaaaatatgaaccgatcgtggctgaagatggaaccaccaataacctcaatgagtacatcatgatgtctgtgggggacgtggcagacagagaaaggatggctaatgatgtttactgcaacaagcatggtgtggtgctaaatgaaacgatcttccctgaattcttcgcccagctgcctgctccacatacttagcaagcgatctttctgttgtgatgggttactctgtacacttcaatagtgcactcacaagattatgaattaaaatatatgggcactattggacacatggtgcctctaagtagcgtttcagatagatcctggcctgttttggaaagcaaaatgtggggatctcatagttctgttagcctagacatctgaaagcttcatcttgtcccaaataatgatgactaggtcatgtttaacggctttagctttctttggtcattgttcgtcgaaacttatatgaacataacacttctatgtgctcgttgttaccttacaagtaaatatgcaacccataaactttaaacttgcaggctgtcgcacctttttgctcttgctcttacgctcattctggatccttagaattaaaaactattctaataatcataatttagatgtaaatcaattgttgtattgagaat

SEQ ID NO: 59484 - DNA, 1109 bp, Zea Mays
gcaaaaaatgtcgcctggacgcctaggcgacaccttttaaacaatgatagtagcgaagaaaatgtttacatgttatgtaacgagcttattagaaccggagtggctgatcctgcgggcactgatctttatgttgttttcatatccaacgaggaaaaaaaggttcctctctggcatcagaaagcaggccattctgatgatggatttatttgctgggattatcacgtgatatgcatccagtctaggcgaagcaaagaagttcttgattttgtttgggatctggactccgatcttcctttcccttccccattgatccaatatgtttctgaggcgattcaaccactatcattcggcaattccagatatgcaagactcttccgtgtggttcatgctcctgtgtttcttcaatcgtttgcctcagacagaagccatatgaaggatcctgaggggaactggattcagttacccccaaaatatgaaccgatcgtggctgaagatggaaccaccaataacctcaatgagtacatcatgatgtctgtgggggacgtggcagacagagaaaggatggctaatgatgtttactgcaacaagcatggtgtggtgctaaatgaaacgatcttccctgaattcttcgcccagctgcctgctccacatacttagcaagcgatctttctgttgtgatgggttactctgtacacttcaatagtgcactcacaagattatgaattaaaatatatgggcactattggacacatggtgcctctaagtagcgtttcagatagatcctggcctgttttggaaagcaaaatgtggggatctcatagttctgttagcctagacatctgaaagcttcatcttgtcccaaataatgatgactaggtcatgtttaacggctttagctttctttggtcattgttcgtcgaaacttatatgaacataacacttctatgtgctcgttgttaccttacaagtaaatatgcaacccataaactttaaacttgcaggctgtcgcacctttttgctcttgctcttacgctcattctggatccttagaattaaaaactattctaataatcataatttagatgtaaatcaattgttgtattgagaat

SEQ ID NO: 59485 - DNA, 1187 bp, Zea Mays
gacaccttttaaacaatgatagtagcgaagaaaatgtttacatgttatgtaacgagcttattagaaccggagtggctgatcctgcgggcactgatctttatgttgttttcatatccaacgaggaaaaaaaggtgatttattgcttatttttctattgttggagatcttattttccttcagttggaaatttcccttccattcaggttcctctctggcatcagaaagcaggccattctgatgatggatttatttgctgggattatcacgtgatatgcatccagtgtttcatggtacttcttgatgtgcatatggaagtctaggcgaagcaaagaagttcttgattttgtttgggatctggactccgatcttcctttcccttccccattgatccaatatgtttctgaggcgattcaaccactatcattcggcaattccagatatgcaagactcttccgtgtggttcatgctcctgtgtttcttcaatcgtttgcctcagacagaagccatatgaaggatcctgaggggaactggattcagttacccccaaaatatgaaccgatcgtggctgaagatggaaccaccaataacctcaatgagtacatcatgatgtctgtgggggacgtggcagacagagaaaggatggctaatgatgtttactgcaacaagcatggtgtggtgctaaatgaaacgatcttccctgaattcttcgcccagctgcctgctccacatacttagcaagcgatctttctgttgtgatgggttactctgtacacttcaatagtgcactcacaagattatgaattaaaatatatgggcactattggacacatggtgcctctaagtagcgtttcagatagatcctggcctgttttggaaagcaaaatgtggggatctcatagttctgttagcctagacatctgaaagcttcatcttgtcccaaataatgatgactaggtcatgtttaacggctttagctttctttggtcattgttcgtcgaaacttatatgaacataacacttctatgtgctcgttgttaccttacaagtaaatatgcaacccataaactttaaacttgcaggctgtcgcacctttttgctcttgctcttacgctcattctggatccttagaattaaaaactattctaataatcataatttagatgtaaatcaattgttgtattgagaat

SEQ ID NO: 59486 - DNA, 1167 bp, Zea Mays
ttcccaagaccccactcatgtgggctccaccagcactgccgaagaaaatgtttacatgttatgtaacgagcttattagaaccggagtggctgatcctgcgggcactgatctttatgttgttttcatatccaacgaggaaaaaaaggtgatttattgcttatttttctattgttggagatcttattttccttcagttggaaatttcccttccattcaggttcctctctggcatcagaaagcaggccattctgatgatggatttatttgctgggattatcacgtgatatgcatccagtctaggcgaagcaaagaagttcttgattttgtttgggatctggactccgatcttcctttcccttccccattgatccaatatgtttctgaggcgattcaaccactatcattcggcaattccagatatgcaagactcttccgtgtggttcatgctcctgtgtttcttcaatcgtttgcctcagacagaagccatatgaaggatcctgaggggaactggattcagttacccccaaaatatgaaccgatcgtggctgaagatggaaccaccaataacctcaatgagtacatcatgatgtctgtgggggacgtggcagacagagaaaggatggctaatgatgtttactgcaacaagcatggtgtggtgctaaatgaaacgatcttccctgaattcttcgcccagctgcctgctccacatacttagcaagcgatctttctgttgtgatgggttactctgtacacttcaatagtgcactcacaagattatgaattaaaatatatgggcactattggacacatggtgcctctaagtagcgtttcagatagatcctggcctgttttggaaagcaaaatgtggggatctcatagttctgttagcctagacatctgaaagcttcatcttgtcccaaataatgatgactaggtcatgtttaacggctttagctttctttggtcattgttcgtcgaaacttatatgaacataacacttctatgtgctcgttgttaccttacaagtaaatatgcaacccataaactttaaacttgcaggctgtcgcacctttttgctcttgctcttacgctcattctggatccttagaattaaaaactattctaataatcataatttagatgtaaatcaattgttgtattgagaat

SEQ ID NO: 59487 - DNA, 1105 bp, Zea Mays
ctccaccagcactgccgaagaaaatgtttacatgttatgtaacgagcttattagaaccggagtggctgatcctgcgggcactgatctttatgttgttttcatatccaacgaggaaaaaaaggttcctctctggcatcagaaagcaggccattctgatgatggatttatttgctgggattatcacgtgatatgcatccagtgtttcatggtacttcttgatgtgcatatggaagtctaggcgaagcaaagaagttcttgattttgtttgggatctggactccgatcttcctttcccttccccattgatccaatatgtttctgaggcgattcaaccactatcattcggcaattccagatatgcaagactcttccgtgtggttcatgctcctgtgtttcttcaatcgtttgcctcagacagaagccatatgaaggatcctgaggggaactggattcagttacccccaaaatatgaaccgatcgtggctgaagatggaaccaccaataacctcaatgagtacatcatgatgtctgtgggggacgtggcagacagagaaaggatggctaatgatgtttactgcaacaagcatggtgtggtgctaaatgaaacgatcttccctgaattcttcgcccagctgcctgctccacatacttagcaagcgatctttctgttgtgatgggttactctgtacacttcaatagtgcactcacaagattatgaattaaaatatatgggcactattggacacatggtgcctctaagtagcgtttcagatagatcctggcctgttttggaaagcaaaatgtggggatctcatagttctgttagcctagacatctgaaagcttcatcttgtcccaaataatgatgactaggtcatgtttaacggctttagctttctttggtcattgttcgtcgaaacttatatgaacataacacttctatgtgctcgttgttaccttacaagtaaatatgcaacccataaactttaaacttgcaggctgtcgcacctttttgctcttgctcttacgctcattctggatccttagaattaaaaactattctaataatcataatttagatgtaaatcaattgttgtattgagaat

SEQ ID NO: 59488 - DNA, 1347 bp, Zea Mays
gctggcattcgaaatagcagatcacatcgcttgggttttaattcaaggatgtatcagccaatcatcaagaccagggaacatttctggtacaatcccagttaccatgatgatacatggggaatgagatttgtatctcgtgggctccaggtaagctgccaggtgatagttggttaagccaacctcaaaaacattgtatggatttaaaactcccctcactcttcaaatggacttttctactttgtctcagaatcctcgactttcctggattttctctgccgggggcattggacttctccaccttcctggattttctctgccgggcattggactttgccttcattctcttgaacattatccacttcatcgaggtgttgctcttccttttcttgaaccttctcttctttgtcaaggtttggctccagtgcatccaacaatttatctgtcttgcctaatatttccttggaactttcttgaatcccgcttgcattaacttggattttctctactttgtcttgggctttccctgtctcctcttgctcttcccctgctttgtgtttgatcttcacatcatagcgagaaatccttccagacttcggcagtgcctctgatccaacaactcttaccgtctggttcctccttaggagcaacactgcatccttttcgatgagctcaccattagcacgcactgttcttgctctggtaatgccgaatctttggccggcaacaccatcgatccgagccatcaggtccaagagatttctcctctcccgagcccctgcctcggaaaacactatcccgttcttcagtggtcggggtggtgacttgttggatggcacctgatcttcctccaaggcctctgcatctacatcctccttttcatcgtcgtcaaacaccaatgctgaagtcgactccctctctgattcagccctgcggctggcagcacctcgcttggagatggtcttctgaacatcaacaaccgcacaagggttccctaccacggcaagcccgtcggcgagcccgttccacaccttggccgacacggctttgctgagaagcacgagacgctggacgatgtcggccatggacgggcgccgctccctgcaggagcgcacacagctggcggccagcgcggcaaggtccttgcgggtgaccgggtctcgtggcggcgccacacgcgggtcgaacagcgaggcgaccttgcctttccgtaagagcgggacggcccactcgacgacggacggcggcgagtgctggacgtcgatggccttgcggccgctcatgatctcgagcagcaggatcccgaagctgaagacgtctgtcttggtgctgaggctctcgggcgtgacg

SEQ ID NO: 59489 - DNA, 2860 bp, Zea Mays
atcgaatttaggggacgttgctggagacacagaagatatagaggacagaatcttttagagtgtcatgtaaagtacagggaatattcctttagggaacgaaatttaggggccgctgctggagacagcctaataacccaaccaaaataggtagacaaggacaagataaacaaaagctagtcaatcctaaggtataaagtgtgtaaatgcggggagtgagttataacaatgagtaggacatagatgggtcaagggacacttgcctccaccaaccagctgctgctcagggcttctcctgtgagttcctcgggctcttcaaccagatcgttctctatacgagcgcaaacatacatacatccacatatttaatacaaaagaacagtacaccatacaatagaatgcaataaataaacagacgttccacgcggggctcgcaattatggttaagagataaagaggagaagacagtcgcgtctacggtcgagaagcgatcacgttacataattataaattaaaccactcgtttatcagaagggcattaatttggacactgtgttaaacataaagtaaagtcatgttccacatttaattattataaatagataaagatgaatgaaagggagtggtcgcacggcaagacgtatgacacaacatttagattgaattaagaaataaacgactcgccgcgcgacagagcgcgcaacgaggttcttgcattaattaaagacaaacgttaagtgttgcgcgacgaaacgcacgacagcttacgtcaactgaactgcatttaaacgaatcgtcgcgcgacgaagctgtcacacccggttttggaaggcaaacctgtggcagaacctcccaagttattgggcccacatgcacctgtccttgtctcaaagacctcagacggctatgcatgtgcaccaaataacttaacaggatctgtccgagtgtcccaaggacctcagataaaccacttacaaccagaaccgcgagattaagtaacacaaatcacacacaccaatatttttgcagcagaaatcttattaccaaattttacaagttacaaaaattttacattattttatcggagtgattgcaaaagtataagtttgaaatatatgctagctcaagggaccatcctcattaagaagtttagaagggttacttagacttataagaaggccgagcccaccggcacttaacaccatcatcaacagcacaaaactatgacctgaaaaacaacagggaataaaaccctgagtatggaattactcagcaagacttacccgactaaagaaaagactctcaaggatatgctggatttgggaatcaaggagaggcttttagcaagaatcaacttagatacttttgcagaaaaagcttactaaagtgagtccttactttcaatattttaatgccagattaaatattaatagactctatttgcacctagtctaatttcaccatttcatcaatacaacatcatttttactcataatgtttacatcctgacttaggttgcaggtcagtgatcaagtctccactctctggggatataacggcgatccgaatcgatttactcagctgaggatctctaaccacacgacatatgtagcacttaacccttgcatatgtcaaccgttcccacagatcctccacaacgtgaaccggtccgcgctacccgggagcacagtactcctccatccagcctctagccaggagggcacacgctactcccaccaactcccacgcccagtgcacggttgtcttttcacgtatggaatagccgggttcaagcttaccctgtcccatttccagggcatgtggccagttaagatagtccttgatctatcaggcctacatacgcattcaatccttaattgacccgggcgaagcatcacctgttcctagcccaagtcccgatttaagtacttccacccttaggattgtttgtattccttaggatgaaaagagcattatagggaactttatagtaagatcccaccatgctcccaatgaaaatattcgtgcaggtagaggtcatccttcctcaggatcaacctgagctaggcataagtgcaaaggacaaactctatctgcctataagcagggctaagcatttttttgtaaatcatattttgatacttcaccagaagtatctataaaagggatggatttcaaggtaggcaatgcatcgaagggtttccaagcaacttctataaacctaatgcacatttcactagacttaaagtgtgcaaaaataatttaaaaacacaaggaaggggttgcatgcaccggggcttgcctgagtaacactaggttagtgttgttagacgacgtccacttagcgatcatccttgtcctatcacttgatcaggcaggttcgttcatcagcatctccatgtggagtagcccgcgcttggggtcgacttgggtcatcttccgcatcacgtgattaattatcgtacctgaatggaatgcattatgcacatgaatgcatatcgatggaaatattacaaacctaaatagtgctacgcgatagcgaatttaaacacctagcggcgagacattgtacaagtttatacgataatactggttatcgacgtatgactaagcgcaataattacgcttctctagcctattcaaaggtatttcatatatcgtcaaacaatagtatatatatactcacgctctacttgccttagttaaatttcaacaccaaaaacttaataattctaaattcattagtctaagacatttaagtcttaaaacatgaacagaagcacgtcaacctcctaaactaccagaccggacgacttcgcatcacccgcccactaattaaaatgtctaatagcaaagcattaat

SEQ ID NO: 59490 - DNA, 459 bp, Zea Mays
atggcgagcaaccaaggagttggacgccgagtggacagggaactccggtcgggcgcgcacatcaggaagctcgacggcggcgcgagcaggaaacgtgaggagggaactgcagggagatgggcgcgccatggctggaatcaggggtgtggtgagcttgcaggggagggcgcggctggaggagaaagctgggcacgagctgaactgttggcaggcgacccggagtgcggcgagcagggagcacggagccggcgagccagcaggggaaaacgccatgggggcgagctcgaggcatggagatccggcgagctgaagccgcgcgcaggagcacgagaccacgcggcaagcacaaacgagcagcaggggcgcgggagcaagagtcgctcgacagggaggaagaagctacgccggcaaagggaggagaagacaggtccacggcggcttgattttcatggaagctga

SEQ ID NO: 59491 - DNA, 1388 bp, Zea Mays
ccaacccgcgctgccacttcggcttctctttctatccctccactccctcttatctgctgcgccatcctccccggcctccaccatggccacagccgccgcggccaccgcctcctcctccctcctcgcgccggcggccagcagcacggcgccggcctcgtcaaacgcgctgctgttcccctcctccgtgccgtcgctgcgtgcgtacccgcggctcctcctcgcgttccgccgccccgccgcggccgccatcgccgacccgcagggggccgtgctcgaagaggaggcggaggtcgaccagcagggccagtacgacgacgacgacggacgaggtcgaagaggttcctcgagatacagaagctgagggagagcaagaaggactacgacgtgcccaccgccatctcgttgatgaagcagatgtccagtgccaagtttgttgagtcagcggaggcgcacttccgcatgaatctcgaccccaagtacaatgaccagcagctccgggccacggtgaatttgcccaagggaacaggccagtcggtgaagattgcggttctcacacaaggtgagaagatagatgaagctagagctgccggagctgatatcgtaggtggagaagatttgattgaacaaataaaaggaggatttatggagtttgacaaattgattgcatcacctgatatgatgcctaaggttgcgggcttaggtaagattctaggaccaagaggactgatgcctaaccccaaagctggcactgtttcttcaaatattactcaggctatagaagagttcaagaaagggaaggttgaatacagggttgataaatcaggaattgttcatattccatttggcaaggttgactttccagaggaagatctcattgcaaacttcatgtctgttgttcgctctgttgagaggaacaagccatctggtgctaaggggatatactggaaaacggcgtacttgtgctcatccatgggaccttctatcaagctaaacataaaagaaatgcttgactatggtttggaatcatctgactagatgtgaccacaggcaccagttaagtcagctggcatcgttatcaccttcacagattaactatctgccccttgcgacaaatgagcagaaacatggttggtgtatggcaagcaggtgcttaggtacagttttctcagttttacgggcacatcatcagagcagctaaagtcacccagattgacaaagagatggtttgttggtcatgtatttatgagaaaattatgcacggtttcatagatgtctgtctcagacgtttgttgtaatgtttcatattttgtcaatagtcatccttgagcttaagccaacaatttgttttcacctgtcattaatttaattacctttcatatttacaaggg

SEQ ID NO: 59492 - DNA, 2009 bp, Zea Mays
gtcgttggctggctcgcccctgcagtactcctgctccagggcaccggaccgtgctattcctcttctccctcggtcccttctcaccgggggcatcacacaacacctccggacctcccctcccggtcgacgcctcgacggtccgctccctcccaaaaacccacagcccgctccgacgctccctcccaaaacccacagcccgctccggcgctccctcacaaaaacctaccacctgccactttcactccaccacacacccacacccccgcgccatggcctctcctcccccgacctccctctcctccccccacctcatccatctccgcctccaacccctacccagcgtcccgccgctccacctcactaccctccccttcctgcgctccctcccgctccacctccactcgctccgcctcaaccgaccccacctccctcccctaccgctcgcctcttccggcagcggaagcgacatcaccggaagcggcggcgaggacgaccttcctccctcgggcgggggcggcggagggggaggaggcgagggcgatggtgagggcgagggcgacggcagcgagggcgactcggtcaacaggagggaggccctgtttgttctggcgcaactcggacggaagctcgagagcctgccggccgacctcgccgcggccgtggagggcggccgcatcccgggcgagatcgtgcggcggttcgtggacctcgaggcctcgccggtgttcaggtggcttctgcagttcggtggcttcaaggagcgcctcctcgccgacgacctcttcctcaccaaggtcgccatagagtgcggcgttggcatcttcactaagactgctgcagagtatgagaaaaggagggagaactttgtcaaagagcttgactttgtgattgcagatgtgttgcagattttatgcttgtatggcttcctgctccaaccgtgtctttacagccaccactagcgatgaattctggagccattgctaagttcttctacaactgcccagataatgccttccaggttgctttgtctgggacgtcatactcacttttgcagagagtaggagcaattttgaggaatggtgcaaagctttttgctgtcggaactagtgcctctctgattggcactggtgtgaccaatgcactgataaaagcaaggcaggctgccagcaaggattttgccggtgaagttgagaatattccaattttatcaactagcgttgcatatggtgtgtacatggcagtttccagtaacctcaggtaccaggttttagctggagtgattgaacagcggatgctcgagccactactgcaccagcacaaactagtattgagtgcagcatgttttgcagttcggacagggaatacgtttttgggttccctactgtggatcgactatgccaggtggataggcgtacagtaggctcaagcatgggtacacaaatgcagttgctcggagttccagcaatatgggttcttcgtgattttatattaccacgcttcctccaactggcaagtactcgtttgcttcatgggagactcttaggacagattttgatatcattctttaaacaatgccttgaggaaagcgtgatttatcgaaattgttcccgcaagcaagagagtgaatttgttttgagggcttaaggttgtgttgtgcgtgttggattggattgattaaaattcgtagtttcgtacagttttgtcattgtttgtgcaagttcctgtgatttggttatcgtggtcgagcaccatttttgctggccatgcctacaccaaagtttggcattactggcaaacatatccgggtgttgtcacgagaagaaaaccattctaacaagtgggcttaaaagtgaaagtgagcccaaatacaaacaaaaccaacgaaaggagttggtagaccgagtgcaaacagcaaaaaatagtaaaagtagatcacagcacgtcaaaaaaaacagagggccggcaatgccttacgagctgtaaatattcgcaacgagaaattcatgcga

SEQ ID NO: 59493 - DNA, 2009 bp, Zea Mays
gttggctggctcgcccctgcagtactcctgctccagggcaccggaccgtgctattcctcttctccctcggtcccttctcaccgggggcatcacacaacacctccggacctcccctcccggtcgacgcctcgacggtccgctccctcccaaaaacccacagcccgctccgacgctccctcccaaaacccacagcccgctccggcgctccctcacaaaaacctaccacctgccactttcactccaccacacacccacacccccgcgccatggcctctcctcccccgacctccctctcctccccccacctcatccatctccgcctccaacccctacccagcgtcccgccgctccacctcactaccctccccttcctgcgctccctcccgctccacctccactcgctccgcctcaaccgaccccacctccctcccctaccgctcgcctcttccggcagcggaagcgacatcaccggaagcggcggcgaggacgaccttcctccctcgggcgggggcggcggagggggaggaggcgagggcgatggtgagggcgagggcgacggcagcgagggcgactcggtcaacaggagggaggccctgtttgttctggcgcaactcggacggaagctcgagagcctgccggccgacctcgccgcggccgtggagggcggccgcatcccgggcgagatcgtgcggcggttcgtggacctcgaggcctcgccggtgttcaggtggcttctgcagttcggtggcttcaaggagcgcctcctcgccgacgacctcttcctcaccaaggtcgccatagagtgcggcgttggcatcttcactaagagtatgagaaaaggagggagaactttgtcaaagagcttgactttgtgattgcagatgtggtcatggcaatagttgcagattttatgcttgtatggcttcctgctccaaccgtgtctttacagccaccactagcgatgaattctggagccattgctaagttcttctacaactgcccagataatgccttccaggttgctttgtctgggacgtcatactcacttttgcagagagtaggagcaattttgaggaatggtgcaaagctttttgctgtcggaactagtgcctctctgattggcactggtgtgaccaatgcactgataaaagcaaggcaggctgccagcaaggattttgccggtgaagttgagaatattccaattttatcaactagcgttgcatatggtgtgtacatggcagtttccagtaacctcaggtaccaggttttagctggagtgattgaacagcggatgctcgagccactactgcaccagcacaaactagtattgagtgcagcatgttttgcagttcggacagggaatacgtttttgggttccctactgtggatcgactatgccaggtggataggcgtacagtaggctcaagcatgggtacacaaatgcagttgctcggagttccagcaatatgggttcttcgtgattttatattaccacgcttcctccaactggcaagtactcgtttgcttcatgggagactcttaggacagattttgatatcattctttaaacaatgccttgaggaaagcgtgatttatcgaaattgttcccgcaagcaagagagtgaatttgttttgagggcttaaggttgtgttgtgcgtgttggattggattgattaaaattcgtagtttcgtacagttttgtcattgtttgtgcaagttcctgtgatttggttatcgtggtcgagcaccatttttgctggccatgcctacaccaaagtttggcattactggcaaacatatccgggtgttgtcacgagaagaaaaccattctaacaagtgggcttaaaagtgaaagtgagcccaaatacaaacaaaaccaacgaaaggagttggtagaccgagtgcaaacagcaaaaaatagtaaaagtagatcacagcacgtcaaaaaaaacagagggccggcaatgccttacgagctgtaaatattcgcaacgagaaattcatgcga

SEQ ID NO: 59494 - DNA, 946 bp, Zea Mays
ctcgcccctgcagtactcctgctccagggcaccggaccgtgctattcctcttctccctcggtcccttctcaccgggggcatcacacaacacctccggacctcccctcccggtcgacgcctcgacggtccgctccctcccaaaaacccacagcccgctccgacgctccctcccaaaacccacagcccgctccggcgctccctcacaaaaacctaccacctgccactttcactccaccacacacccacacccccgcgccatggcctctcctcccccgacctccctctcctccccccacctcatccatctccgcctccaacccctacccagcgtcccgccgctccacctcactaccctccccttcctgcgctccctcccgctccacctccactcgctccgcctcaaccgaccccacctccctcccctaccgctcgcctcttccggcagcggaagcgacatcaccggaagcggcggcgaggacgaccttcctccctcgggcgggggcggcggagggggaggaggcgagggcgatggtgagggcgagggcgacggcagcgagggcgactcggtcaacaggagggaggccctgtttgttctggcgcaactcggacggaagctcgagagcctgccggccgacctcgccgcggccgtggagggcggccgcatcccgggcgagatcgtgcggcggttcgtggacctcgaggcctcgccggtgttcaggtggcttctgcagttcggtggcttcaaggagcgcctcctcgccgacgacctcttcctcaccaaggtcgccatagagtgcggcgttggcatcttcactaagactgctgcagagtatgagaaaaggagggagaactttgtcaaagagcttgactttgtgattgcagatgtgggtggcggaggacacacctgtgcacaacagggagaagcaatggcaaaatgaggtagtca

SEQ ID NO: 59495 - DNA, 1310 bp, Zea Mays
atgggtttgaccgattgtggtgtctagcatgttgtagtccgggctcagatgccaggccgatttcatggctcagatttatttttggagtcggggctgggatgtgattgtagatcagtagactgctgcagagtatgagaaaaggagggagaactttgtcaaagagcttgactttgtgattgcagatgtggtcatggcaatagttgcagattttatgcttgtatggcttcctgctccaaccgtgtctttacagccaccactagcgatgaattctggagccattgctaagttcttctacaactgcccagataatgccttccaggttgctttgtctgggacgtcatactcacttttgcagagagtaggagcaattttgaggaatggtgcaaagctttttgctgtcggaactagtgcctctctgattggcactggtgtgaccaatgcactgataaaagcaaggcaggctgccagcaaggattttgccggtgaagttgagaatattccaattttatcaactagcgttgcatatggtgtgtacatggcagtttccagtaacctcaggtaccaggttttagctggagtgattgaacagcggatgctcgagccactactgcaccagcacaaactagtattgagtgcagcatgttttgcagttcggacagggaatacgtttttgggttccctactgtggatcgactatgccaggtggataggcgtacagtaggctcaagcatgggtacacaaatgcagttgctcggagttccagcaatatgggttcttcgtgattttatattaccacgcttcctccaactggcaagtactcgtttgcttcatgggagactcttaggacagattttgatatcattctttaaacaatgccttgaggaaagcgtgatttatcgaaattgttcccgcaagcaagagagtgaatttgttttgagggcttaaggttgtgttgtgcgtgttggattggattgattaaaattcgtagtttcgtacagttttgtcattgtttgtgcaagttcctgtgatttggttatcgtggtcgagcaccatttttgctggccatgcctacaccaaagtttggcattactggcaaacatatccgggtgttgtcacgagaagaaaaccattctaacaagtgggcttaaaagtgaaagtgagcccaaatacaaacaaaaccaacgaaaggagttggtagaccgagtgcaaacagcaaaaaatagtaaaagtagatcacagcacgtcaaaaaaaacagagggccggcaatgccttacgagctgtaaatattcgcaacgagaaattcatgcga

SEQ ID NO: 59496 - DNA, 1257 bp, Zea Mays
ctcagatgccaggccgatttcatggctcagatttatttttggagtcggggctgggatgtgattgtagatcagtagagtatgagaaaaggagggagaactttgtcaaagagcttgactttgtgattgcagatgtggtcatggcaatagttgcagattttatgcttgtatggcttcctgctccaaccgtgtctttacagccaccactagcgatgaattctggagccattgctaagttcttctacaactgcccagataatgccttccaggttgctttgtctgggacgtcatactcacttttgcagagagtaggagcaattttgaggaatggtgcaaagctttttgctgtcggaactagtgcctctctgattggcactggtgtgaccaatgcactgataaaagcaaggcaggctgccagcaaggattttgccggtgaagttgagaatattccaattttatcaactagcgttgcatatggtgtgtacatggcagtttccagtaacctcaggtaccaggttttagctggagtgattgaacagcggatgctcgagccactactgcaccagcacaaactagtattgagtgcagcatgttttgcagttcggacagggaatacgtttttgggttccctactgtggatcgactatgccaggtggataggcgtacagtaggctcaagcatgggtacacaaatgcagttgctcggagttccagcaatatgggttcttcgtgattttatattaccacgcttcctccaactggcaagtactcgtttgcttcatgggagactcttaggacagattttgatatcattctttaaacaatgccttgaggaaagcgtgatttatcgaaattgttcccgcaagcaagagagtgaatttgttttgagggcttaaggttgtgttgtgcgtgttggattggattgattaaaattcgtagtttcgtacagttttgtcattgtttgtgcaagttcctgtgatttggttatcgtggtcgagcaccatttttgctggccatgcctacaccaaagtttggcattactggcaaacatatccgggtgttgtcacgagaagaaaaccattctaacaagtgggcttaaaagtgaaagtgagcccaaatacaaacaaaaccaacgaaaggagttggtagaccgagtgcaaacagcaaaaaatagtaaaagtagatcacagcacgtcaaaaaaaacagagggccggcaatgccttacgagctgtaaatattcgcaacgagaaattcatgcga

SEQ ID NO: 59497 - DNA, 1239 bp, Zea Mays
caactgtttaaagcataaagagtactcagtactgcaattcaacgctgactgctgcagagtatgagaaaaggagggagaactttgtcaaagagcttgactttgtgattgcagatgtggtcatggcaatagttgcagattttatgcttgtatggcttcctgctccaaccgtgtctttacagccaccactagcgatgaattctggagccattgctaagttcttctacaactgcccagataatgccttccaggttgctttgtctgggacgtcatactcacttttgcagagagtaggagcaattttgaggaatggtgcaaagctttttgctgtcggaactagtgcctctctgattggcactggtgtgaccaatgcactgataaaagcaaggcaggctgccagcaaggattttgccggtgaagttgagaatattccaattttatcaactagcgttgcatatggtgtgtacatggcagtttccagtaacctcaggtaccaggttttagctggagtgattgaacagcggatgctcgagccactactgcaccagcacaaactagtattgagtgcagcatgttttgcagttcggacagggaatacgtttttgggttccctactgtggatcgactatgccaggtggataggcgtacagtaggctcaagcatgggtacacaaatgcagttgctcggagttccagcaatatgggttcttcgtgattttatattaccacgcttcctccaactggcaagtactcgtttgcttcatgggagactcttaggacagattttgatatcattctttaaacaatgccttgaggaaagcgtgatttatcgaaattgttcccgcaagcaagagagtgaatttgttttgagggcttaaggttgtgttgtgcgtgttggattggattgattaaaattcgtagtttcgtacagttttgtcattgtttgtgcaagttcctgtgatttggttatcgtggtcgagcaccatttttgctggccatgcctacaccaaagtttggcattactggcaaacatatccgggtgttgtcacgagaagaaaaccattctaacaagtgggcttaaaagtgaaagtgagcccaaatacaaacaaaaccaacgaaaggagttggtagaccgagtgcaaacagcaaaaaatagtaaaagtagatcacagcacgtcaaaaaaaacagagggccggcaatgccttacgagctgtaaatattcgcaacgagaaattcatgcga

SEQ ID NO: 59498 - DNA, 1220 bp, Zea Mays
ggtttttaagaaactgggatataaactgactgctgcagagtatgagaaaaggagggagaactttgtcaaagagcttgactttgtgattgcagatgtggtcatggcaatagttgcagattttatgcttgtatggcttcctgctccaaccgtgtctttacagccaccactagcgatgaattctggagccattgctaagttcttctacaactgcccagataatgccttccaggttgctttgtctgggacgtcatactcacttttgcagagagtaggagcaattttgaggaatggtgcaaagctttttgctgtcggaactagtgcctctctgattggcactggtgtgaccaatgcactgataaaagcaaggcaggctgccagcaaggattttgccggtgaagttgagaatattccaattttatcaactagcgttgcatatggtgtgtacatggcagtttccagtaacctcaggtaccaggttttagctggagtgattgaacagcggatgctcgagccactactgcaccagcacaaactagtattgagtgcagcatgttttgcagttcggacagggaatacgtttttgggttccctactgtggatcgactatgccaggtggataggcgtacagtaggctcaagcatgggtacacaaatgcagttgctcggagttccagcaatatgggttcttcgtgattttatattaccacgcttcctccaactggcaagtactcgtttgcttcatgggagactcttaggacagattttgatatcattctttaaacaatgccttgaggaaagcgtgatttatcgaaattgttcccgcaagcaagagagtgaatttgttttgagggcttaaggttgtgttgtgcgtgttggattggattgattaaaattcgtagtttcgtacagttttgtcattgtttgtgcaagttcctgtgatttggttatcgtggtcgagcaccatttttgctggccatgcctacaccaaagtttggcattactggcaaacatatccgggtgttgtcacgagaagaaaaccattctaacaagtgggcttaaaagtgaaagtgagcccaaatacaaacaaaaccaacgaaaggagttggtagaccgagtgcaaacagcaaaaaatagtaaaagtagatcacagcacgtcaaaaaaaacagagggccggcaatgccttacgagctgtaaatattcgcaacgagaaattcatgcga

SEQ ID NO: 59499 - DNA, 1285 bp, Zea Mays
attggatctgcttactaacaatgaggagctgaggtcacttaggcgaggtggctaactgcttgcttaggactgcatgaattatattccaagagctggttgcctggttggattcctgatgaattgttttatccagctgagctgatagccttagcctcatttcaggtcatggcaatagttgcagattttatgcttgtatggcttcctgctccaaccgtgtctttacagccaccactagcgatgaattctggagccattgctaagttcttctacaactgcccagataatgccttccaggttgctttgtctgggacgtcatactcacttttgcagagagtaggagcaattttgaggaatggtgcaaagctttttgctgtcggaactagtgcctctctgattggcactggtgtgaccaatgcactgataaaagcaaggcaggctgccagcaaggattttgccggtgaagttgagaatattccaattttatcaactagcgttgcatatggtgtgtacatggcagtttccagtaacctcaggtaccaggttttagctggagtgattgaacagcggatgctcgagccactactgcaccagcacaaactagtattgagtgcagcatgttttgcagttcggacagggaatacgtttttgggttccctactgtggatcgactatgccaggtggataggcgtacagtaggctcaagcatgggtacacaaatgcagttgctcggagttccagcaatatgggttcttcgtgattttatattaccacgcttcctccaactggcaagtactcgtttgcttcatgggagactcttaggacagattttgatatcattctttaaacaatgccttgaggaaagcgtgatttatcgaaattgttcccgcaagcaagagagtgaatttgttttgagggcttaaggttgtgttgtgcgtgttggattggattgattaaaattcgtagtttcgtacagttttgtcattgtttgtgcaagttcctgtgatttggttatcgtggtcgagcaccatttttgctggccatgcctacaccaaagtttggcattactggcaaacatatccgggtgttgtcacgagaagaaaaccattctaacaagtgggcttaaaagtgaaagtgagcccaaatacaaacaaaaccaacgaaaggagttggtagaccgagtgcaaacagcaaaaaatagtaaaagtagatcacagcacgtcaaaaaaaacagagggccggcaatgccttacgagctgtaaatattcgcaacgagaaattcatgcga

SEQ ID NO: 59500 - DNA, 1185 bp, Zea Mays
aagaaacaccatcagtctgccacctacttgaacatgattaaatataaagagtactgcaataggtcatggcaatagttgcagattttatgcttgtatggcttcctgctccaaccgtgtctttacagccaccactagcgatgaattctggagccattgctaagttcttctacaactgcccagataatgccttccaggttgctttgtctgggacgtcatactcacttttgcagagagtaggagcaattttgaggaatggtgcaaagctttttgctgtcggaactagtgcctctctgattggcactggtgtgaccaatgcactgataaaagcaaggcaggctgccagcaaggattttgccggtgaagttgagaatattccaattttatcaactagcgttgcatatggtgtgtacatggcagtttccagtaacctcaggtaccaggttttagctggagtgattgaacagcggatgctcgagccactactgcaccagcacaaactagtattgagtgcagcatgttttgcagttcggacagggaatacgtttttgggttccctactgtggatcgactatgccaggtggataggcgtacagtaggctcaagcatgggtacacaaatgcagttgctcggagttccagcaatatgggttcttcgtgattttatattaccacgcttcctccaactggcaagtactcgtttgcttcatgggagactcttaggacagattttgatatcattctttaaacaatgccttgaggaaagcgtgatttatcgaaattgttcccgcaagcaagagagtgaatttgttttgagggcttaaggttgtgttgtgcgtgttggattggattgattaaaattcgtagtttcgtacagttttgtcattgtttgtgcaagttcctgtgatttggttatcgtggtcgagcaccatttttgctggccatgcctacaccaaagtttggcattactggcaaacatatccgggtgttgtcacgagaagaaaaccattctaacaagtgggcttaaaagtgaaagtgagcccaaatacaaacaaaaccaacgaaaggagttggtagaccgagtgcaaacagcaaaaaatagtaaaagtagatcacagcacgtcaaaaaaaacagagggccggcaatgccttacgagctgtaaatattcgcaacgagaaattcatgcga

SEQ ID NO: 59501 - DNA, 2306 bp, Zea Mays
tatcacgtttttataatctacgaatttgtcttcacagaagttgtggtaagcgggccggtacccacatgctcgcccatacattcagctcactgctcatatcaagcccacgcgtggtgtcggttaggcggcgcgctccgccttccccttcttcgacctcccgacgcgtgctcacctcctcttcggatcgtggatccgctgctgcgctgcacgaataatcaattccgagtgaaataaattacatatagccatctagaagagagtcctttctagagccgacgcgacgggatcaagatttgtatttgaacccggacgacgggaggagtacgaggcccagtcatggaggaggagaagcaagtgatggagggtgccgctacggcggcgaggcggcggctggtgatcggggtggggttctgggtgcagggcttccggctcttcccgtggctgggcgtcaatttcttcctcaaggacggcatgggcgttgctgcctcctcgctgcagatcctccaggcctccgccaacctgcccatggtcgccaagccgctcattggcctcctctcggatgccgtccccatacgcggccatcgccgcctgccctacgtcgccatcggcgctctcttgcaggcaatttcatggctagcaattgcactttggcaagatatctctcttcaagttcttaccatttttctcctcttgagcaactttggtgcttccatatgtgaggttgccaatgatgccattgtagcggagtctgggaagaaagcggcctcttcctcaggatcagttcttcacaactgtggctatacctgagggctctctcaaactccctaaggtagctacttctaccaatctatcagcactcaccagcatccgtaagcaagtcaaagagctgtcatgcgccctatctatgcctgaaatgttttggtcaattatatggtttacagcgtcatacgctgtcataccttttctacttgggaccatgttcttctaccagactgaagtgctaagactagactcctcggttatcggcttatcgaaggtgtttgggcaagtggctctattggcttggagcatgtcatacaacaagtacttcaagacaatgtccgcccggaagctcctgtcagttctgcagttcgtcacagcgctcgtaatgttgtcagatgtgttgttcgttcagggagtatacaggaaggtgggaattccagactccatatacacgattgtcttctccgggctgctcgagggccttatgtttttcaaggtcctgcccttcagtgttcatgttgcaaaactttgccctgctggctgtgagggatcagtgatggcctttgtcatgtctgcgcttgcccttgcgactatcgtcagtggctaccttggagttgctcttgctgccttcatgggagtgtctggagatgatttctcagcactgccagcttgcctgttgattgaggctgcgtgcacaatgttgccactatgttgctcgtccttgatcaaagagagaagagaaaaggagaaaaaacaagagtagattacatatatattatctgaagatgatgtaaagctcattgttgttaccctcgtcctcatggtgtcatttcagtttgttatgtgatcatagcttgcagaaacaaaataggagatgattacacatttacacttgtccggtgttaacacctctaaggcttgtcaagaactacagtcaaacgagcatatatgtacatacatgcgtgccgctaccattcttctacagatttaggccatgtttatttccctcttggatcttggattatataagttaaattatggtggaagggttggaaggtaaaatatcactttgggattataaataagctgaaataagctatctaatattaacttattttaacttatttgtggtttcaaagtgatattttacctttctatccgaatctaacttatataatcataatctgggagagaaacaaacataccttagtaattactttatgtaactagttttagtacatcgttttttatgtaatggtttgcctgtgacatgtgttttatatcgacagttcaatttgcttgtgttgcctcattgccaatgtttgtacgtttcttcgccaaaaaatgtactatgtactatgtattacagtggcaaactgtttgatgatggatatcgaaccattattatgtctagaatgcagcatgaaaaattaaatcacatagttggattttattacagtggcaaactgtttgatgatggatatcgaaccattattatgtctagaatgcagcatgaaaaattaaatcacatagttgggttttac

SEQ ID NO: 59502 - DNA, 2151 bp, Zea Mays
atcgtaggagtagcctgaaactccacaaggcagtagtactagtctagtactagaggacgccattattatcggacgaggagtaaccatccaatcagacaacacttcatcgacgcaaggacgcatgacatcgggcaattttaccgaaccatctctctcttgtcttcctcccttgcttttagccaagctacgctagcgtctgaagacgaaggaagctacagcggccgaggtccccgtttctgcgcccaccgaggcgtcgcgcatgcggccacccgcacccaggcgctggcacgggggagtgaggtgtggaggtcgagcaatggcgggcagccttcgccggcccgtggatctgtaggcgcggcgcggggggggggtgttggctggtgcgcgatgggatctgggagcagcaaggccaccacctcctcctcctcgcccacggcggcggaggcgggcggcgaggttaagaggccgaatgggagcgggaaggggaggagggggaggagcctgctgccactgccgagctcctcctgcttccgtggctccacgacgccgtgcgaaggcgacgctgccgcagcagcggtggacttcgagtgtaacaagggaggggagactgcaagcctgacttcactcactcacactgtaaagtctcatgaagatgttcttgcaatgcctaaatctcatcccagtgaaggggaagcaccaccttcatcagatagcgaaagagatcaagatgatgatgtgctacagaatgctgccactagcacatcaacagcggccaatcaattgccaaatccttctaggaggtcaaggccacgttttggtgtcaactttggcttgagtagagcggtcagcttgggttcatcagtagcctgctctattctgtcatctggcctcccgccgtctgctaatccaggtgaaggtcggggagatgtgcatgactcttctgagacaggcatctcacagcagggtagtgcaccgacttctgggattgattcaactctggatatgcttagagatagtgtcacggcacaagctagagcagctcatcaggctaggagaaatctgatagaatctgaagatgctagcttcaggagctcctacagaaggatggggtctcatgaaccttttgaaggcagtgtccggtttagccgaacattaagtgttgggcggcttcgggacagagttctcaggcggcctccattctcagatgggctattcaccccttcacttctttatgatagggcagtatggccgtctggaaatgctagtgctaggcaagattcagcagtaatgcaaaggactaattcagacaggagttcagaaccacggtctgatccttcaaccagcgatatgtacaactcgagctctgagaggcaggctagcaacggcgatctactggagcgcagatcagcttttcttgagaggaggaggaggataagatctcaggtcagagctctacaaaggttgggcagcaggtttgaaaatttatctggtcatgagagatcctgcatactatctggtcagcatagaacaggaaattgcaactgcagaacaggtagtcgacaaggcaatcctgatgaagaaactagcacaagggctagcatatcgagaattgttatgttagcagaagcactttttgaggttctggatgaaattcaccaccaatctgccgcattatcgtcatcaagaccatcattttcttcaattggatccgttcctgctccaagggagattgttgagcgtcttccttcaaaagtgtataggaaaccattgaaataccagagcgaggaagcagcacaatgctatatttgccttgttgaatatgaagagggagattgcctccgtatacttccatgccatcatgaattccatctaacatgtgtagacaaatggctaaaggagattcacagggtttgcccactttgtcgtggcgatgtttgcagatctgatgcacccattggaaagaccagctgattctgtctcttgagaatggagcttcttacagaaaattggagatcttggcatggttctcatccaattccgatagaaccgccaaacttctgcagctgttattttcatttccccctctcttaatggtgatggcgacaacagaataatgtttccagagccaacaccgagggcgttggaggaggg

SEQ ID NO: 59503 - DNA, 2221 bp, Zea Mays
tattatcggacgaggagtaaccatccaatcagacaacacttcatcgacgcaaggacgcatgacatcgggcaattttaccgaaccatctctctcttgtcttcctcccttgcttttagccaagctacgctagcgtctgaagacgaaggaagctacagcggccgaggtccccgtttctgcgcccaccgaggcgtcgcgcatgcggccacccgcacccaggcgctggcacgggggagtgaggtgtggaggtcgagcaatggcgggcagccttcgccggcccgtggatctgtaggcgcggcgcggggggggggtgttggctggtgcgcgatgggatctgggagcagcaaggccaccacctcctcctcctcgcccacggcggcggaggcgggcggcgaggttaagaggccgaatgggagcgggaaggggaggagggggaggagcctgctgccactgccgagctcctcctgcttccgtggctccacgacgccgtgcgaaggcgacgctgccgcagcagcggtggacttcgagggaggggagactgcaagcctgacttcactcactcacactgtaaagtctcatgaagatgttcttgcaatgcctaaatctcatcccagtgaaggggaagcaccaccttcatcagatagcgaaagagatcaagatgatgatgtgctacagaatgctgccactagcacatcaacagcggccaatcaattgccaaatccttctaggaggtcaaggccacgttttggtgtcaactttggcttgagtagagcggtcagcttgggttcatcagtagcctgctctattctgtcatctggcctcccgccgtctgctaatccaggtgaaggtcggggagatgtgcatgactcttctgagacaggcatctcacagcagggtagtgcaccgacttctgggattgattcaactctggatatgcttagagatagtgtcacggcacaagctagagcagctcatcaggctaggagaaatctgatagaatctgaagatgctagcttcaggagctcctacagaaggatggggtctcatgaaccttttgaaggcagtgtccggtttagccgaacattaagtgttgggcggcttcgggacagagttctcaggcggcctccattctcagatgggctattcaccccttcacttctttatgatagggcagtatggccgtctggaaatgctagtgctaggcaagattcagcagtaatgcaaaggactaattcagacaggagttcagaaccacggtctgatccttcaaccagcgatatgtacaactcgagctctgagaggcaggctagcaacggcgatctactggagcgcagatcagcttttcttgagaggaggaggaggataagatctcaggtcagagctctacaaaggttgggcagcaggtttgaaaatttatctggtcatgagagatcctgcatactatctggtcagcatagaacaggaaattgcaactgcagaacaggtagtcgacaaggcaatcctgatgaagaaactagcacaagggctagcatatcgagaattgttatgttagcagaagcactttttgaggttctggatgaaattcaccaccaatctgccgcattatcgtcatcaagaccatcattttcttcaattggatccgttcctgctccaagggagattgttgagcgtcttccttcaaaagtgtataggaaaccattgaaataccagagcgaggaagcagcacaatgctatatttgccttgttgaatatgaagagggagattgcctccgtatacttccatgccatcatgaattccatctaacatgtgtagacaaatggctaaaggagattcacagggtttgcccactttgtcgtggcgatgtttgcagatctgatgcacccattggaaagaccagctgattctgtctcttgagaatggagcttcttacagaaaattggagatcttggcatggttctcatccaattccgatagaaccgccaaacttctgcagctgttattttcatttccccctctcttaatggtcagtacagcatcgcagtcatcctattatgaaactgatgacgacatgccatggtgaatttaggattcttgtgtggtggggcgagtttgttgataatggattattggcttccgtttgggcgattgatgtcgggtgcagccattctggccaactttggttccacgtgtttcctactatttgaacaggggactaaaatcttc

SEQ ID NO: 59504 - DNA, 2197 bp, Zea Mays
tattatcggacgaggagtaaccatccaatcagacaacacttcatcgacgcaaggacgcatgacatcgggcaattttaccgaaccatctctctcttgtcttcctcccttgcttttagccaagctacgctagcgtctgaagacgaaggaagctacagcggccgaggtccccgtttctgcgcccaccgaggcgtcgcgcatgcggccacccgcacccaggcgctggcacgggggagtgaggtgtggaggtcgagcaatggcgggcagccttcgccggcccgtggatctgtaggcgcggcgcggggggggggtgttggctggtgcgcgatgggatctgggagcagcaaggccaccacctcctcctcctcgcccacggcggcggaggcgggcggcgaggttaagaggccgaatgggagcgggaaggggaggagggggaggagcctgctgccactgccgagctcctcctgcttccgtggctccacgacgccgtgcgaaggcgacgctgccgcagcagcggtggacttcgagtgtaacaagggaggggagactgcaagcctgacttcactcactcacactgtaaagtctcatgaagatgttcttgcaatgcctaaatctcatcccagtgaaggggaagcaccaccttcatcagatagcgaaagagatcaagatgatgatgtgctacagaatgctgccactagcacatcaacagcggccaatcaattgccaaatccttctaggaggtcaaggccacgttttggtgtcaactttggcttgagtagagcggtcagcttgggttcatcagtagcctgctctattctgtcatctggcctcccgccgtctgctaatccaggtgaaggtcggggagatgtgcatgactcttctgagacaggcatctcacagcagggtagtgcaccgacttctgggattgattcaactctggatatgcttagagatagtgtcacggcacaagctagagcagctcatcaggctaggagaaatctgatagaatctgaagatgctagcttcaggagctcctacagaaggatggggtctcatgaaccttttgaaggcagtgtccggtttagccgaacattaagtgttgggcggcttcgggacagagttctcaggcggcctccattctcagatgggctattcaccccttcacttctttatgatagggcagtatggccgtctggaaatgctagtgctaggcaagattcagcagtaatgcaaaggactaattcagacaggagttcagaaccacggtctgatccttcaaccagcgatatgtacaactcgagctctgagaggcaggctagcaacggcgatctactggagcgcagatcagcttttcttgagaggaggaggaggataagatctcaggtcagagctctacaaaggttgggcagcaggtttgaaaatttatctggtcatgagagatcctgcatactatctggtcagcatagaacaggaaattgcaactgcagaacaggtagtcgacaaggcaatcctgatgaagaaactagcacaagggctagcatatcgagaattgttatgttagcagaagcactttttgaggttctggatgaaattcaccaccaatctgccgcattatcgtcatcaagaccatcattttcttcaattggatccgttcctgctccaagggagattgttgagcgtcttccttcaaaagtgtataggaaaccattgaaataccagagcgaggaagcagcacaatgctatatttgccttgttgaatatgaagagggagattgcctccgtatacttccatgccatcatgaattccatctaacatgtgtagacaaatggctaaaggagattcacagatctgatgcacccattggaaagaccagctgattctgtctcttgagaatggagcttcttacagaaaattggagatcttggcatggttctcatccaattccgatagaaccgccaaacttctgcagctgttattttcatttccccctctcttaatggtcagtacagcatcgcagtcatcctattatgaaactgatgacgacatgccatggtgaatttaggattcttgtgtggtggggcgagtttgttgataatggattattggcttccgtttgggcgattgatgtcgggtgcagccattctggccaactttggttccacgtgtttcctactatttgaacaggggactaaaatcttc

SEQ ID NO: 59505 - DNA, 2225 bp, Zea Mays
tattatcggacgaggagtaaccatccaatcagacaacacttcatcgacgcaaggacgcatgacatcgggcaattttaccgaaccatctctctcttgtcttcctcccttgcttttagccaagctacgctagcgtctgaagacgaaggaagctacagcggccgaggtccccgtttctgcgcccaccgaggcgtcgcgcatgcggccacccgcacccaggcgctggcacgggggagtgaggtgtggaggtcgagcaatggcgggcagccttcgccggcccgtggatctgtaggcgcggcgcggggggggggtgttggctggtgcgcgatgggatctgggagcagcaaggccaccacctcctcctcctcgcccacggcggcggaggcgggcggcgaggttaagaggccgaatgggagcgggaaggggaggagggggaggagcctgctgccactgccgagctcctcctgcttccgtggctccacgacgccgtgcgaaggcgacgctgccgcagcagcggtggacttcgagtgtaacaagggaggggagactgcaagcctgacttcactcactcacactgtaaagtctcatgaagatgttcttgcaatgcctaaatctcatcccagtgaaggggaagcaccaccttcatcagatagcgaaagagatcaagatgatgatgtgctacagaatgctgccactagcacatcaacagcggccaatcaattgccaaatccttctaggaggtcaaggccacgttttggtgtcaactttggcttgagtagagcggtcagcttgggttcatcagtagcctgctctattctgtcatctggcctcccgccgtctgctaatccaggtgaaggtcggggagatgtgcatgactcttctgagacaggcatctcacagcagggtagtgcaccgacttctgggattgattcaactctggatatgcttagagatagtgtcacggcacaagctagagcagctcatcaggctaggagaaatctgatagaatctgaagatgctagcttcaggagctcctacagaaggatggggtctcatgaaccttttgaaggcagtgtccggtttagccgaacattaagtgttgggcggcttcgggacagagttctcaggcggcctccattctcagatgggctattcaccccttcacttctttatgatagggcagtatggccgtctggaaatgctagtgctaggcaagattcagcagtaatgcaaaggactaattcagacaggagttcagaaccacggtctgatccttcaaccagcgatatgtacaactcgagctctgagaggcaggctagcaacggcgatctactggagcgcagatcagcttttcttgagaggaggaggaggataagatctcagagctctacaaaggttgggcagcaggtttgaaaatttatctggtcatgagagatcctgcatactatctggtcagcatagaacaggaaattgcaactgcagaacaggtagtcgacaaggcaatcctgatgaagaaactagcacaagggctagcatatcgagaattgttatgttagcagaagcactttttgaggttctggatgaaattcaccaccaatctgccgcattatcgtcatcaagaccatcattttcttcaattggatccgttcctgctccaagggagattgttgagcgtcttccttcaaaagtgtataggaaaccattgaaataccagagcgaggaagcagcacaatgctatatttgccttgttgaatatgaagagggagattgcctccgtatacttccatgccatcatgaattccatctaacatgtgtagacaaatggctaaaggagattcacagggtttgcccactttgtcgtggcgatgtttgcagatctgatgcacccattggaaagaccagctgattctgtctcttgagaatggagcttcttacagaaaattggagatcttggcatggttctcatccaattccgatagaaccgccaaacttctgcagctgttattttcatttccccctctcttaatggtcagtacagcatcgcagtcatcctattatgaaactgatgacgacatgccatggtgaatttaggattcttgtgtggtggggcgagtttgttgataatggattattggcttccgtttgggcgattgatgtcgggtgcagccattctggccaactttggttccacgtgtttcctactatttgaacaggggactaaaatcttc

SEQ ID NO: 59506 - DNA, 2360 bp, Zea Mays
atgggagctgctcctccgacgactctcgtcaccgacactcccgctcgcttcggcggccctacccagcactcctcagggggcaccggctccggaggcggcaaaggcgatggccatggagcttcctcctcatccaacaagggcggacgtggaggccgcggtgaaggcgacaagagcggcaacagggatgagcgcaaatgtggtggctccaagcctgctgcgggaatctccgatagtccatggcccacgtactacaatccctggctcatcgtaccaaaggccttgtccacctgcgccacatcacaagcaggcgcttctggcacagcagcaacaggcgttgccgcccaacaccagcagccacagggtccccctccttgtagcctactaagatggtaatcttcagggggcgcccctaccctcacttggtgcttctgcaccaccaggcttctacactccgccgcccaatccgccacctggatttcctacttcctaggatcaacagttgctcgcctcgacgttcagcaccatgactctccagcagcctcagtataccaattggtacttcgactcaggtgctacctctcatatgacctctgatcctcattcacttactcattcagctacttcgtgatatctcgttccttcttccattattgttggtgatggctccttacttcctgttactgcagcagggaacacttccctcacaaattctctatgccttaattactttctaatctcacctagacttattaagaatcttatttatgttcgtcggttcactattgacaacaattgtgtcattgaatttgacccttctggttgctctatgaaggatctaacgtcccgacaggagattctaaggtgcaatatcttcgggccgctataccccctacagcttcccagtgctcatgcactcagcgttaattccacctcttcgctctggcaccgtcgtctggtcatctagggcatgatgtcatgtcaaaagtcgtccatgccattcctttcagcaataaagaacctagtattctgtgtcatgcttgtcagcttgggcgtcacactcgtcttccatttcagtcatcatcatcttgtgtgtctagtccctttgaacttgtacactgtgattgtggacttcccagtcgttattgtttcagatttcaaatactatcttgttatatttgatgattttgtacattatttgtggatgcttcccctacaccttaaatctgtcaccttcgacacactaactagtttcattgcctttgtgagtacacagttcgtcgtcaccataaaggcactccaatacaacaatggccgcgagtggcgaacgacatcgccgaggcggcgtggctacaatccgctgacgaggagcacacttgtataatgtgacaacgtcaatgccatgtacctctccaccagcccgtccagcactagcgcacgaagcatgtcgagctcgacctccacttcgtccgcgagtgtgtcaccattggggatgtgtgcgttcttcatgtcccgactacttctcagtttgttggcatcttcaccaagggcctccctacatcagtgtttgaggagtttcagtccaatgtcaacatctgtcgttactagagtttcgacggtggggtgttagatgtattgtgtgtgattgtccctgtattgggtctaggcccacgtaccactattattaatattcacccaaccctagtttagggtttctaatctaacacagattgaggattggaacttcatggagtgttgtagtaggatcaatggttcggtagaaggagcgataagactaggtttaaataacctggtcatattgggagcctggagcatttggaaccagaggaaccaatatgtctttgataaaatctctccttgtgtggcaacggtcatcaaaagggcggggggagaaccggagctctgggagatggtaggggctaggagtattactgtcctatcagcccctctactagggttgtaatcagctccccagtctttgcatggttgttgtagtttagtttttcatatggaccctttcttgtattttcttttttggccaccatgaggccttttttcttttgtatcagtctatgttggatccccttttttctccttaatataatgatgcgccgctctcctgcacgttcgagaaaaaatcctataacagtttggaaaagtaaagagcaaaagactaactaaaccatacagtacaaattaatgttctctactgtagtgtcattcaaaaaaaatctactgtatcagtcgtcctctccaacaatttttcctaaactacaaatggttactatggttctaatgcaattcatttgagggccacttacaaaatagtgaataagatgcac

SEQ ID NO: 59507 - DNA, 2711 bp, Zea Mays
cccccaccccctcccggcctcccctccctcagtccctcctcagccagtctatcgtggcccctcgcctcgctcctctgttcacacacgagcgcactcccctgtctcggtgtctcctcccctctcgctctccatgttcgcggcttccaacgccacggccacccgcctcatcctcccgcgtccttcagtcccgttccgcgcactcctcattccccgccggcggggtcgcctccgccgcgcggtccacgccaacgccgtcgcaggtggcggaggaggcagcgagggcgttgcgaaggagccgccgcggacgctattccccggcgggttcaagcggccggagatccaggtgccagcactcgtcttacgcgtcggcaccgaggaggcgctgcggtgcggggatgaggtggccgacgccgtgtcccggggcgtgggcatcgtcgtgctcgaggccggagaggagggtggaggcagatcgtacgaggccgctcgcgctctcagggccacggtcggggaccgcgcgtacctgctgatcgcggagcgcgtcgacgtcgcttccgcagtcggtgcgagtggcgtcgtgctcgccgacgacggtattcctgctattgttgcaaggagtatgatgatgaaatcaaatgctgactccatatatctccctattgttgctagaaggatacaatctgcaaactctgcattaagcgcttcaagttctgaaggggctgattttctgattgtaaatactggcagtggtgattttgtggatgttataaatgatgttgttggtcaacatgtgaagattccgattttcgtcacgttgaatcatttaagtgaaggaacttattctgacttcacatccaggttgctccaatctggtgcatctggagttgttacatccttagctggcatggaactcctcaatgacgatcttataaaaaaagacttcacaaaggtgggctcagctgaggaactcccacaagcgagttactcttctgctgggatgctggaagatgttaataatgtaatggtcctaactcgtgattgcgagaagactaaagttgctggatttacaaaattggatgaagaagtgataaagttgatagaaatagaaaagcctattctgaacgaagctatcactattatccgcaaggcagcaccaatggtgatcatcttacgttacacatttgatggaggaggttgagcttctagtggatgctgcttctcgcctgagtgagccatttttgttggttattgtgggtgaatttaactcaggaaagtcaacttttataaatgctttacttggaaggcagtatcttcaggagggagttgtgcctacgacaaatgagatcacactactatcatattctgaggttgaatctgaaaactttgaacgatgtgagaggcatccagatggtcaattcatgtgctatttatctgttccaattttaaaggaaatgaatctagttgatacacctggaacaaatgttattcttcagaggcagcaacgactcactgaagaatacgtgccacgagctgatttggtgctctttgtcctatcatcagatagaccattaactgaaagtgaggttggatttcttcagtatgtccagcagtggaagaagaaagttgtatttattctaaataaattggacctctatcggaacagcaatgagcttgaagaagctactgcatttgtcaaggaaaatgcaatgaaattgcttaccgcagaggatgtcacactgtttcctgtatcttcacgctctgctctggaagccaaactttcatattccaaaaacagtgatggaaagcattcaaccgaagctatgtataatgatcctagatggagaagcagcaaattttttgaacttgaggattacttactgagtttcttagatagttcaacggaaaatggaaaagaaagggtccggctgaaacttgaaacaccaataggcattgcagatcgattgttaacttcgtgtcaaaggctggtgaaactagaatatgaaaaggctgttgaagacttagcatccatcaaggatcttgtttatggtgcaaacaattatgccatcaaacttaagtctgatagcagttcctggcagaaccagatttcgtctctcattgagagagcaaaaggtcgagcagttacactcatggaatctacacttcagctgtcaaatattgaccttatttttgcatacacgatcaaaggaaaaacaggcagttccatgagagccacatcatttgttcagaatgatattctgagtccaacccttgatgatgctgtgaatttactaggtgactactcgacatggttgagttctagcaatacccgcgaagcaaatgtatatttggagtgtttctgtgaaagatgggatgcactggttgctccggaagaaagggctctgttagatccaaatgggcttgttaatgaaggggagaaactcaccataaaggcactggaaggcttcaatgccagtgctgccgccaaagattttgaagaggaaattcgagaattggtggtcaagcttcctgctgatagctttctagatgatgaactacttgtgccttgaaggaccggacttagtagaatccactgcatggtccaccttttgtaatttgaccttatgtggaacatttgaatatacacctttaggatttgtctggcaaacttattccctgtggatcggagtgttggagtggactgggatggattgacg

SEQ ID NO: 59508 - DNA, 3059 bp, Zea Mays
cccccaccccctcccggcctcccctccctcagtccctcctcagccagtctatcgtggcccctcgcctcgctcctctgttcacacacgagcgcactcccctgtctcggtgtctcctcccctctcgctctccatgttcgcggcttccaacgccacggccacccgcctcatcctcccgcgtccttcagtcccgttccgcgcactcctcattccccgccggcggggtcgcctccgccgcgcggtccacgccaacgccgtcgcaggtggcggaggaggcagcgagggcgttgcgaaggagccgccgcggacgctattccccggcgggttcaagcggccggagatccaggtgccagcactcgtcttacgcgtcggcaccgaggaggcgctgcggtgcggggatgaggtggccgacgccgtgtcccggggcgtgggcatcgtcgtgctcgaggccggagaggagggtggaggcagatcgtacgaggccgctcgcgctctcagggccacggtcggggaccgcgcgtacctgctgatcgcggagcgcgtcgacgtcgcttccgcagtcggtgcgagtggcgtcgtgctcgccgacgacggatacaatctgcaaactctgcattaagcgcttcaagttctgaaggggctgattttctgattgtaaatactggcagtggtgattttgtggatgttataaatgatgttgttggtcaacatgtgaagattccgattttcgtcacgttgaatcatttaagtgaaggaacttattctgacttcacatccaggttgctccaatctggtgcatctggagttgttacatccttagctggcatggaactcctcaatgacgatcttataaaaaaagacttcacaaaggtgggctcagctgaggaactcccacaagcgagttactcttctgctgggatgctggaagatgttaataatgtaatggtcctaactcgtgattgcgagaagactaaagttgctggatttacaaaattggatgaagaagtgataaagttgatagaaatagaaaagcctattctgaacgaagctatcactattatccgcaaggcagcaccaatgatggaggaggttgagcttctagtggatgctgcttctcgcctgagtgagccatttttgttggttattgtgggtgaatttaactcaggaaagtcaacttttataaatgctttacttggaaggcagtatcttcaggagggagttgtgcctacgacaaatgagatcacactactatcatattctgaggttgaatctgaaaactttgaacgatgtgagaggcatccagatggtcaattcatgtgctatttatctgttccaattttaaaggaaatgaatctagttgatacacctggaacaaatgttattcttcagaggcagcaacgactcactgaagaatacgtgccacgagctgatttggtgctctttgtcctatcatcagatagaccattaactgaaagtgaggttggatttcttcagtatgtccagcagtggaagaagaaagttgtatttattctaaataaattggacctctatcggaacagcaatgagcttgaagaagctactgcatttgtcaaggaaaatgcaatgaaattgcttaccgcagaggatgtcacactgtttcctgtatcttcacgctctgctctggaagccaaactttcatattccaaaaacagtgatggaaagcattcaaccgaagctatgtataatgatcctagatggagaagcagcaaattttttgaacttgaggattacttactgagtttcttagatagttcaacggaaaatggaaaagaaagggtccggctgaaacttgaaacaccaataggcattgcagatcgattgttaacttcgtgtcaaaggctggtgaaactagaatatgaaaaggctgttgaagacttagcatccatcaaggatcttgtttatggtgcaaacaattatgccatcaaacttaagtctgatagcagttcctggcagaaccagatttcgtctctcattgagagagcaaaaggtcgagcagttacactcatggaatctacacttcagctgtcaaatattgaccttatttttgcatacacgatcaaaggaaaaacaggcagttccatgagagccacatcatttgttcagaatgatattctgagtccaacccttgatgatgctgtgaatttactaggtgactactcgacatggttgagttctagcaatacccgcgaagcaaatgtatatttggagtgtttctgtgaaagatgggatgcactggttgctccggaagaaagggctctgttagatccaaatgggcttgttaatgaaggggagaaactcaccataaaggcactggaaggcttcaatgccagtgctgccgccaaagattttgaagaggaaattcgagaattggcttttggaacatttggagggctaggtattgctggactgtcagcttctctgttgacatctgttttgtcaactacccttgaagatcttcttgcccttgctctttgctcagctggcggtttttttgttttatcaagtttccctggtcggcggaagcatgcaatagacaagattaacaaggctgctgatgaactctctcgaaaagttgatgaagctatccaaaaggatatctcacagagtgctaataacctaatccgcttcgttgaggttatcagcaaaccttaccaggaagcatgtcagcgaaaaatagattggttacagggcgttcagggtgagctatctgctgtcgagcgtaagctccaaactttgaaagttgaaatccaaaatcttaatggatcataaggtttcatttcaacttgtttatttgcaattattttttggatactaatagtttttgttggtttatactgcgttgtgatgctattgagttgacgtagtgcctttcctgtatatgatgaagtctgaaagtgtaatatgtgttgtaaattcagaataagtgataaactatcacatgataattacacaccttgagaaccgagaaggatgttttgaaaacttgcctttttgataattttacaatatgatgtgggcaagaa

SEQ ID NO: 59509 - DNA, 3138 bp, Zea Mays
cccccaccccctcccggcctcccctccctcagtccctcctcagccagtctatcgtggcccctcgcctcgctcctctgttcacacacgagcgcactcccctgtctcggtgtctcctcccctctcgctctccatgttcgcggcttccaacgccacggccacccgcctcatcctcccgcgtccttcagtcccgttccgcgcactcctcattccccgccggcggggtcgcctccgccgcgcggtccacgccaacgccgtcgcaggtggcggaggaggcagcgagggcgttgcgaaggagccgccgcggacgctattccccggcgggttcaagcggccggagatccaggtgccagcactcgtcttacgcgtcggcaccgaggaggcgctgcggtgcggggatgaggtggccgacgccgtgtcccggggcgtgggcatcgtcgtgctcgaggccggagaggagggtggaggcagatcgtacgaggccgctcgcgctctcagggccacggtcggggaccgcgcgtacctgctgatcgcggagcgcgtcgacgtcgcttccgcagtcggtgcgagtggcgtcgtgctcgccgacgacggtattcctgctattgttgcaaggagtatgatgatgaaatcaaatgctgactccatatatctccctattgttgctagaaggatacaatctgcaaactctgcattaagcgcttcaagttctgaaggggctgattttctgattgtaaatactggcagtggtgattttgtggatgttataaatgatgttgttggtcaacatgtgaagattccgattttcgtcacgttgaatcatttaagtgaaggaacttattctgacttcacatccaggttgctccaatctggtgcatctggagttgttacatccttagctggcatggaactcctcaatgacgatcttataaaaaaagacttcacaaaggtgggctcagctgaggaactcccacaagcgagttactcttctgctgggatgctggaagatgttaataatgtaatggtcctaactcgtgattgcgagaagactaaagttgctggatttacaaaattggatgaagaagtgataaagttgatagaaatagaaaagcctattctgaacgaagctatcactattatccgcaaggcagcaccaatgatggaggaggttgagcttctagtggatgctgcttctcgcctgagtgagccatttttgttggttattgtgggtgaatttaactcaggaaagtcaacttttataaatgctttacttggaaggcagtatcttcaggagggagttgtgcctacgacaaatgagatcacactactatcatattctgaggttgaatctgaaaactttgaacgatgtgagaggcatccagatggtcaattcatgtgctatttatctgttccaattttaaaggaaatgaatctagttgatacacctggaacaaatgttattcttcagaggcagcaacgactcactgaagaatacgtgccacgagctgatttggtgctctttgtcctatcatcagatagaccattaactgaaagtgaggttggatttcttcagtatgtccagcagtggaagaagaaagttgtatttattctaaataaattggacctctatcggaacagcaatgagcttgaagaagctactgcatttgtcaaggaaaatgcaatgaaattgcttaccgcagaggatgtcacactgtttcctgtatcttcacgctctgctctggaagccaaactttcatattccaaaaacagtgatggaaagcattcaaccgaagctatgtataatgatcctagatggagaagcagcaaattttttgaacttgaggattacttactgagtttcttagatagttcaacggaaaatggaaaagaaagggtccggctgaaacttgaaacaccaataggcattgcagatcgattgttaacttcgtgtcaaaggctggtgaaactagaatatgaaaaggctgttgaagacttagcatccatcaaggatcttgtttatggtgcaaacaattatgccatcaaacttaagtctgatagcagttcctggcagaaccagatttcgtctctcattgagagagcaaaaggtcgagcagttacactcatggaatctacacttcagctgtcaaatattgaccttatttttgcatacacgatcaaaggaaaaacaggcagttccatgagagccacatcatttgttcagaatgatattctgagtccaacccttgatgatgctgtgaatttactaggtgactactcgacatggttgagttctagcaatacccgcgaagcaaatgtatatttggagtgtttctgtgaaagatgggatgcactggttgctccggaagaaagggctctgttagatccaaatgggcttgttaatgaaggggagaaactcaccataaaggcactggaaggcttcaatgccagtgctgccgccaaagattttgaagaggaaattcgagaattggcttttggaacatttggagggctaggtattgctggactgtcagcttctctgttgacatctgttttgtcaactacccttgaagatcttcttgcccttgctctttgctcagctggcggtttttttgttttatcaagtttccctggtcggcggaagcatgcaatagacaagattaacaaggctgctgatgaactctctcgaaaagttgatgaagctatccaaaaggatatctcacagagtgctaataacctaatccgcttcgttgaggttatcagcaaaccttaccaggaagcatgtcagcgaaaaatagattggttacagggcgttcagggtgagctatctgctgtcgagcgtaagctccaaactttgaaagttgaaatccaaaatcttaatggatcataaggtttcatttcaacttgtttatttgcaattattttttggatactaatagtttttgttggtttatactgcgttgtgatgctattgagttgacgtagtgcctttcctgtatatgatgaagtctgaaagtgtaatatgtgttgtaaattcagaataagtgataaactatcacatgataattacacaccttgagaaccgagaaggatgttttgaaaacttgcctttttgataattttacaatatgatgtgggcaagaa

SEQ ID NO: 59510 - DNA, 1528 bp, Zea Mays
tgatcatcttacgttacacatttgatggaggaggttgagcttctagtggatgctgcttctcgcctgaggtgaatttaactcaggaaagtcaacttttataaatgctttacttggaaggcagtatcttcaggagggagttgtgcctacgacaaatgagatcacactactatcatattctgaggttgaatctgaaaactttgaacgatgtgagaggcatccagatggtcaattcatgtgctatttatctgttccaattttaaaggaaatgaatctagttgatacacctggaacaaatgttattcttcagaggcagcaacgactcactgaagaatacgtgccacgagctgatttggtgctctttgtcctatcatcagatagaccattaactgaaagtgaggttggatttcttcagtatgtccagcagtggaagaagaaagttgtatttattctaaataaattggacctctatcggaacagcaatgagcttgaagaagctactgcatttgtcaaggaaaatgcaatgaaattgcttaccgcagaggatgtcacactgtttcctgtatcttcacgctctgctctggaagccaaactttcatattccaaaaacagtgatggaaagcattcaaccgaagctatgtataatgatcctagatggagaagcagcaaattttttgaacttgaggattacttactgagtttcttagatagttcaacggaaaatggaaaagaaagggtccggctgaaacttgaaacaccaataggcattgcagatcgattgttaacttcgtgtcaaaggctggtgaaactagaatatgaaaaggctgttgaagacttagcatccatcaaggatcttgtttatggtgcaaacaattatgccatcaaacttaagtctgatagcagttcctggcagaaccagatttcgtctctcattgagagagcaaaaggtcgagcagttacactcatggaatctacacttcagctgtcaaatattgaccttatttttgcatacacgatcaaaggaaaaacaggcagttccatgagagccacatcatttgttcagaatgatattctgagtccaacccttgatgatgctgtgaatttactaggtgactactcgacatggttgagttctagcaatacccgcgaagcaaatgtatatttggagtgtttctgtgaaagatgggatgcactggttgctccggaagaaagggctctgttagatccaaatgggcttgttaatgaaggggagaaactcaccataaaggcactggaaggcttcaatgccagtgctgccgccaaagattttgaagaggaaattcgagaattggtggtcaagcttcctgctgatagctttctagatgatgaactacttgtgccttgaaggaccggacttagtagaatccactgcatggtccaccttttgtaatttgaccttatgtggaacatttgaatatacacctttaggatttgtctggcaaacttattccctgtggatcggagtgttggagtggactgggatggattgacg

SEQ ID NO: 59511 - DNA, 2236 bp, Zea Mays
cgaaggcgtacccactgactgatgcgcagctaacgatgggtatcctcgatatcatccagcactccaccaactacaagcagctcaagaagggagcgaacgaagcgacgaataccctgaatagggggatatcagagtttgttgtgatggcggcggatacagagcctcttgagatcctactccacctccccttgttagctgaggataagacaaaatcatctcatacaagagttgatgattgaagactactgaattgcttctgcattctaaaaaggataaggtacccagccttcatcgatttcatgtgcgcaggctgcatccatgtctgcatcagcagactccgtcgcacctgaaggtatggtaacttgtgctttcaaacaattaataagttcgttgtgtagccaacctaggccaccttatagattgcctacccagacagctactagagatattgggagacttagctgatagaactggtgatggtgatagctccgcttccatcgctgctgattctaggtacagcctctgcctctttgtaccttgttgttgttgtctatttattaagtattccctttgctaagatttaccacaaatccaaagctgatttagaagtgtctcagcctttcttactttcactggattttgtgcatgttttcttcttttgtttcattcatgtttttctagcggtctgcaacatgaattgtgtgggagctttggatggttacagttcttttttgggaggaaggacaaatgtagcaggtttagtaggccttctaatctgataatagaaatatagttaataaataaatttgagataaatgtgcttaaaaggaaggctcagaaggcggcgaacccagcgagcggtgtggtaaggctcacaagcgcgagagcaggctacactgcagtggttgcaatcctgctattgtcctcatcattgtgttcttttcctgaccaagtaaaacataacagcaattcatttttaccatgaaggaaattctttgcaggtaacattgtattttactgtaactttttctttgatgtttcccttcttgatagtgtaaattgttctgtatccgattagaaatagagaacagtgaatgactacaaattatataggacaaccagccttacaaaaatcctaaataatacccatccgttccaataacataggagtcctaattattttacttttagcgtaagtcaaactatctagaaagttatacaaatatatactgctcccgttttaaattataaatcgttctacttggtgctatgcttataatttaaaatagaaagtacacaacactagatgacagaactatgataatctatgccatggtggatttaataaaaactattttaattttgtaattatcgatgtaatttctatagacttagtcaatgccctatagacttagttaatgttaataagagaaagatagaagacttacatttataaaataaatggagtattagtacaaatatattgagttattacaataaatacagaacaattatacttaagacaacatcaacctctcaatttagagcaaactatattataatatgaagaattattgttgcaatgggatgtattcttccattttgtttattacattcaattttttaaaaaaatacatgctatctcctcaaaatgctacccatcagctttgtttggtcatcccatcaatttgctaggaacagtagcagcgtagctttactttgtcagcagctaccagtgagagaggtccttgtgggttgaccatggacgttgaatccttgatggatggtcggatcagctatttttgttctcataaaatattcatgcatcattataattttaatataaaagtataatcctacaaacaatgtataagcttagagactagatcaacatatttgtaaacctcaatccaaacatctagcacatatgtaggggagctaatactaccaaatagggattatgaaacttgtcaaactctttttcaagtgtgcaaaatgctcgagcaagcaacacgaatccataccaagttcatggttcatatttgtgtcaagtactagcctggaatttaaatataattcatgaggcaggctgagtcccgtcaacggaacgctagcttcactaagcatcggcagccatgttcggctccaccaaatgagactatggcagccaaggctattagaaggcagtgaaacatattcacttagtgaacggcttatcatataaaacagagctctc

SEQ ID NO: 59512 - DNA, 2226 bp, Zea Mays
cttcttcatcacccggtccatcatcttcatcatatgttcccacttctcctctcccttctgctccacagtcgccatggctccggcacgaaacgtgtctggacataaggtttcaccaccggcgccgtcatgacagctccagagtcaacacgcttctgataccaaattgtcacgacctttggcctggggattcaccaaaccctaggcgtgagtccgtgaacaaccaaatacgaagaacttcccctcggataagttgccggtggcgaagaagagaaacaataccaaaaggcgtagagtagaggaacaatgccaagatcaaggaacatcagttaggcctgacaaaatccccactggcgcatctaaaattgttcaggttgaggcatgtccacatcctggacattttggtggactttgcattatctgtggcaagccacaagacgaggaagatgtttcaggagttgcttttggttacatccacaagggcttgaggctaggtacctcagaaattgacagactacgtggtgctgatttgaagaatctgttgcgtgaaagaaaattagtactcattttggacctggatcacacattgatcaactccaccaaactccaagacatttcttctgccgaaaaagatttgggtattcagtctgctgcttcaaaagatgatccaaatagaagcatcttcgcactagatttaatgccgatgctcacaaagttgagaccatttgtccgagaatttctgaaagaagcaagcaatatgtttgagatgtatatatacacgatgggtgacaaagcctatgcaattgaaattgcaaagcttcttgaccctagtaacatatattttccttcaaaagtgatttcaaactcagattgcactcagcgacatcagaaaggtcttgatgtgattcttggagctgaaagtgttgcagtgattcttgatgacactgagtatgtatggcagaagcataaagagaacctgattctgatggagagatatcatttctttgcttcaagctgccgccaatttggttttggtgttaggtctttgtcagaatcgttgcaagatgaaagggagagtgatggtgctttggctaccgttttagatgtcttgaagcgcatacacgctactttctttgacatggctgctgaaactgatctttcttcacgggatataagacaggtgatcaagacgttacggaaggaaatactgcaaggatgcaaaatagtcttcagtcgggtgttcccaaacaatacacgcccacaggagcagatggtctggaagatggccgagtatctgggtgccgtttgcgttaaagatgtggatcccagtgtcacccatgttgtaactgtggatctgggaacagagaaggcccgctggggtcttaacaacaagaagttcttggtccacccacgctggattgaagcagcaaatttccggtggcataggcaaccggaggaagattttcctgtcactgcccctaaggaaaagagcaaagagaaagatagtgataatgatgtggctggcaagaaggaaacgagcgaggataaagagaatactgcagctggcatgaaggaaacgaggaacgatgaaggaaatgtaaccggtaaagacaaagctgatgccaaagaaaacgttgtgaccacatctgctacgtgtcctgcagactcgtagtctgtgttgggctccaaaggtatctgacacattgtgtaggcgtgcaggtttggtatgggagatgaaaattcagcttttcttatccgttcgtgcaggctttagatctgtccataaaaaaaagacgttacatctgctccattgcaaattttgctgctgacctgaagctgattgggcctccggccatataacttacgctacgatgaaactataggagttgaagcaaactgatgtctttatgggacaatttttggtgaatccgtgcgactatgtgcgcagatgtacttaagtttgtgcctgcttcggtaggtactgccccctgatgtaagcattcgtgatcgctagtggaactacgttattctagttgaaaaaaaatgttccacacattaattcttgcactggaaaaggcataggcaaggtcgctatgatgttgccatacattgagtacgaagtgatatgttttccggcggagctgtaggggttttcgttatagtgatgaattgatgatgacaaaaataaattccgtcatttcttttatcgtcgaagaagcaggaaataat

SEQ ID NO: 59513 - DNA, 2521 bp, Zea Mays
cgacctttggcctggggattcaccaaaccctaggcgtgagtccgtgaacaaccaaatacgaagaacttcccctcggataagttgccggtggcgaagaagagaaacaatactcgcatctgctccgtcatgactcatgacaccgtagcttccttcctcgccgtcgccaaatgctgcaggccgcctccatgaggtgctagggttccctggccgacgccacgaccgtcgcacccggccgcctccgtccctgcgggccttcgccaccgccctcgccaaacgtcccgagctagggttcctcacagcttctcccaagcgccctccagtctcaccaacccttctgcggttctgcccttggcgccgcgcccatgagcctcaccgaggcgccgtccccgtccccgtcgtcgtcgagcgggagcgatgacttcgcggccttcctcgcctccgagctcgagctcacctccggtgctgactccgccttccctggtgacccctcctccgttttccccgccaccgacgacgagggcgaggacgaggatccggaggagctagaggttgaagccatagaacaaaacggtaccaaaaggcgtagagtagaggaacaatgccaagatcaaggaacatcagttaggcctgacaaaatccccactggcgcatctaaaattgttcaggttgaggcatgtccacatcctggacattttggtggactttgcattatctgtggcaagccacaagacgaggaagatgtttcaggagttgcttttggttacatccacaagggcttgaggctaggtacctcagaaattgacagactacgtggtgctgatttgaagaatctgttgcgtgaaagaaaattagtactcattttggacctggatcacacattgatcaactccaccaaactccaagacatttcttctgccgaaaaagatttgggtattcagtctgctgcttcaaaagatgatccaaatagaagcatcttcgcactagatttaatgccgatgctcacaaagttgagaccatttgtccgagaatttctgaaagaagcaagcaatatgtttgagatgtatatatacacgatgggtgacaaagcctatgcaattgaaattgcaaagcttcttgaccctagtaacatatattttccttcaaaagtgatttcaaactcagattgcactcagcgacatcagaaaggtcttgatgtgattcttggagctgaaagtgttgcagtgattcttgatgacactgagtatgtatggcagaagcataaagagaacctgattctgatggagagatatcatttctttgcttcaagctgccgccaatttggttttggtgttaggtctttgtcagaatcgttgcaagatgaaagggagagtgatggtgctttggctaccgttttagatgtcttgaagcgcatacacgctactttctttgacatggctgctgaaactgatctttcttcacgggatataagacaggtgatcaagacgttacggaaggaaatactgcaaggatgcaaaatagtcttcagtcgggtgttcccaaacaatacacgcccacaggagcagatggtctggaagatggccgagtatctgggtgccgtttgcgttaaagatgtggatcccagtgtcacccatgttgtaactgtggatctgggaacagagaaggcccgctggggtcttaacaacaagaagttcttggtccacccacgctggattgaagcagcaaatttccggtggcataggcaaccggaggaagattttcctgtcactgcccctaaggaaaagagcaaagagaaagatagtgataatgatgtggctggcaagaaggaaacgagcgaggataaagagaatactgcagctggcatgaaggaaacgaggaacgatgaaggaaatgtaaccggtaaagacaaagctgatgccaaagaaaacgttgtgaccacatctgctacgtgtcctgcagactcgtagtctgtgttgggctccaaaggtatctgacacattgtgtaggcgtgcaggtttggtatgggagatgaaaattcagcttttcttatccgttcgtgcaggctttagatctgtccataaaaaaaagacgttacatctgctccattgcaaattttgctgctgacctgaagctgattgggcctccggccatataacttacgctacgatgaaactataggagttgaagcaaactgatgtctttatgggacaatttttggtgaatccgtgcgactatgtgcgcagatgtacttaagtttgtgcctgcttcggtaggtactgccccctgatgtaagcattcgtgatcgctagtggaactacgttattctagttgaaaaaaaatgttccacacattaattcttgcactggaaaaggcataggcaaggtcgctatgatgttgccatacattgagtacgaagtgatatgttttccggcggagctgtaggggttttcgttatagtgatgaattgatgatgacaaaaataaattccgtcatttcttttatcgtcgaagaagcaggaaataat

SEQ ID NO: 59514 - DNA, 2610 bp, Zea Mays
ctcgcatctgctccgtcatgactcatgacaccgtagcttccttcctcgccgtcgccaaatgctgcaggccgcctccatgaggtgctagggttccctggccgacgccacgaccgtcgcacccggccgcctccgtccctgcgggccttcgccaccgccctcgccaaacgtcccgagctagggttcctcacagcttctcccaagcgccctccagtctcaccaacccttctgcggttctgcccttggcgccgcgcccatgagcctcaccgaggcgccgtccccgtccccgtcgtcgtcgagcgggagcgatgacttcgcggccttcctcgcctccgagctcgagctcacctccggtgctgactccgccttccctggtgacccctcctccgttttccccgccaccgacgacgagggcgaggacgaggatccggaggagctagaggttgaagccatagaacaaaacggtaccaaaaggcgtagagtagaggaacaatgccaagatcaaggaacatcagttaggcctgacaaaatccccactggttgaggcatgtccacatcctggacattttggtggactttgcattatctgtggcaagccacaagacgaggaagatgtttcaggagttgcttttggttacatccacaagggcttgaggctaggtacctcagaaattgacagactacgtggtgctgatttgaagaatctgttgcgtgaaagaaaattagtactcattttggacctggatcacacattgatcaactccaccaaactccaagacatttcttctgccgaaaaagatttgggtattcagtctgctgcttcaaaagcgccggcgtggccctggctgctgctcgctctgcagcgcgcctcacgtccctcgcgcgcctccgacggttatagggaagaccccacatgacacacacacacacacacacacacaaatgattatgtttttgtagctgtctatgtttcatgtcttttgacactgttgttgcttatccatgagtgtatataacatagctagtgaagcccttattttctaaatgcagatgatccaaatagaagcatcttcgcactagatttaatgccgatgctcacaaagttgagaccatttgtccgagaatttctgaaagaagcaagcaatatgtttgagatgtatatatacacgatgggtgacaaagcctatgcaattgaaattgcaaagcttcttgaccctagtaacatatattttccttcaaaagtgatttcaaactcagattgcactcagcgacatcagaaaggtcttgatgtgattcttggagctgaaagtgttgcagtgattcttgatgacactgagtatggcagaagcataaagagaacctgattctgatggagagatatcatttctttgcttcaagctgccgccaatttggttttggtgttaggtctttgtcagaatcgttgcaagatgaaagggagagtgatggtgctttggctaccgttttagatgtcttgaagcgcatacacgctactttctttgacatggctgctgaaactgatctttcttcacgggatataagacaggtgatcaagacgttacggaaggaaatactgcaaggatgcaaaatagtcttcagtcgggtgttcccaaacaatacacgcccacaggagcagatggtctggaagatggccgagtatctgggtgccgtttgcgttaaagatgtggatcccagtgtcacccatgttgtaactgtggatctgggaacagagaaggcccgctggggtcttaacaacaagaagttcttggtccacccacgctggattgaagcagcaaatttccggtggcataggcaaccggaggaagattttcctgtcactgcccctaaggaaaagagcaaagagaaagatagtgataatgatgtggctggcaagaaggaaacgagcgaggataaagagaatactgcagctggcatgaaggaaacgaggaacgatgaaggaaatgtaaccggtaaagacaaagctgatgccaaagaaaacgttgtgaccacatctgctacgtgtcctgcagactcgtagtctgtgttgggctccaaaggtatctgacacattgtgtaggcgtgcaggtttggtatgggagatgaaaattcagcttttcttatccgttcgtgcaggctttagatctgtccataaaaaaaagacgttacatctgctccattgcaaattttgctgctgacctgaagctgattgggcctccggccatataacttacgctacgatgaaactataggagttgaagcaaactgatgtctttatgggacaatttttggtgaatccgtgcgactatgtgcgcagatgtacttaagtttgtgcctgcttcggtaggtactgccccctgatgtaagcattcgtgatcgctagtggaactacgttattctagttgaaaaaaaatgttccacacattaattcttgcactggaaaaggcataggcaaggtcgctatgatgttgccatacattgagtacgaagtgatatgttttccggcggagctgtaggggttttcgttatagtgatgaattgatgatgacaaaaataaattccgtcatttcttttatcgtcgaagaagcaggaaataat

SEQ ID NO: 59515 - DNA, 2122 bp, Zea Mays
ctcgcatctgctccgtcatgactcatgacaccgtagcttccttcctcgccgtcgccaaatgctgcaggccgcctccatgaggtgctagggttccctggccgacgccacgaccgtcgcacccggccgcctccgtccctgcgggccttcgccaccgccctcgccaaacgtcccgagctagggttcctcacagcttctcccaagcgccctccagtctcaccaacccttctgcggttctgcccttggcgccgcgcccatgagcctcaccgaggcgccgtccccgtccccgtcgtcgtcgagcgggagcgatgacttcgcggccttcctcgcctccgagctcgagctcacctccggtgctgactccgccttccctggtgacccctcctccgttttccccgccaccgacgacgagggcgaggacgaggatccggaggagctagaggttgaagccatagaacaaaacggtaccaaaaggcgtagagtagaggaacaatgccaagatcaaggaacatcagttaggcctgacaaaatccccactggcgcatctaaaattgttcaggttgaggcatgtccacatcctggacattttggtggactttgcattatctgtggcaagccacaagacgaggaagatgtttcaggagttgcttttggttacatccacaagggcttgaggctaggtacctcagaaattgacagactacgtggtgctgatttgaagaatctgttgcgtgaaagaaaattagtactcattttggacctggatcacacattgatcaactccaccaaactccaagacatttcttctgccgaaaaagatttgggtattcagtctgctgcttcaaaaggtatggcagaagcataaagagaacctgattctgatggagagatatcatttctttgcttcaagctgccgccaatttggttttggtgttaggtctttgtcagaatcgttgcaagatgaaagggagagtgatggtgctttggctaccgttttagatgtcttgaagcgcatacacgctactttctttgacatggctgctgaaactgatctttcttcacgggatataagacaggtgatcaagacgttacggaaggaaatactgcaaggatgcaaaatagtcttcagtcgggtgttcccaaacaatacacgcccacaggagcagatggtctggaagatggccgagtatctgggtgccgtttgcgttaaagatgtggatcccagtgtcacccatgttgtaactgtggatctgggaacagagaaggcccgctggggtcttaacaacaagaagttcttggtccacccacgctggattgaagcagcaaatttccggtggcataggcaaccggaggaagattttcctgtcactgcccctaaggaaaagagcaaagagaaagatagtgataatgatgtggctggcaagaaggaaacgagcgaggataaagagaatactgcagctggcatgaaggaaacgaggaacgatgaaggaaatgtaaccggtaaagacaaagctgatgccaaagaaaacgttgtgaccacatctgctacgtgtcctgcagactcgtagtctgtgttgggctccaaaggtatctgacacattgtgtaggcgtgcaggtttggtatgggagatgaaaattcagcttttcttatccgttcgtgcaggctttagatctgtccataaaaaaaagacgttacatctgctccattgcaaattttgctgctgacctgaagctgattgggcctccggccatataacttacgctacgatgaaactataggagttgaagcaaactgatgtctttatgggacaatttttggtgaatccgtgcgactatgtgcgcagatgtacttaagtttgtgcctgcttcggtaggtactgccccctgatgtaagcattcgtgatcgctagtggaactacgttattctagttgaaaaaaaatgttccacacattaattcttgcactggaaaaggcataggcaaggtcgctatgatgttgccatacattgagtacgaagtgatatgttttccggcggagctgtaggggttttcgttatagtgatgaattgatgatgacaaaaataaattccgtcatttcttttatcgtcgaagaagcaggaaataat

SEQ ID NO: 59516 - DNA, 2088 bp, Zea Mays
gtcatgactcatgacaccgtagcttccttcctcgccgtcgccaaatgctgcaggccgcctccatgaggtgctagggttccctggccgacgccacgaccgtcgcacccggccgcctccgtccctgcgggccttcgccaccgccctcgccaaacgtcccgagctagggttcctcacagcttctcccaagcgccctccagtctcaccaacccttctgcggttctgcccttggcgccgcgcccatgagcctcaccgaggcgccgtccccgtccccgtcgtcgtcgagcgggagcgatgacttcgcggccttcctcgcctccgagctcgagctcacctccggtgctgactccgccttccctggtgacccctcctccgttttccccgccaccgacgacgagggcgaggacgaggatccggaggagctagaggttgaagccatagaacaaaacggtaccaaaaggcgtagagtagaggaacaatgccaagatcaaggaacatcagttaggcctgacaaaatccccactggttgaggcatgtccacatcctggacattttggtggactttgcattatctgtggcaagccacaagacgaggaagatgtttcaggagttgcttttggttacatccacaagggcttgaggctaggtacctcagaaattgacagactacgtggtgctgatttgaagaatctgttgcgtgaaagaaaattagtactcattttggacctggatcacacattgatcaactccaccaaactccaagacatttcttctgccgaaaaagatttgggtattcagtctgctgcttcaaaaggtatggcagaagcataaagagaacctgattctgatggagagatatcatttctttgcttcaagctgccgccaatttggttttggtgttaggtctttgtcagaatcgttgcaagatgaaagggagagtgatggtgctttggctaccgttttagatgtcttgaagcgcatacacgctactttctttgacatggctgctgaaactgatctttcttcacgggatataagacaggtgatcaagacgttacggaaggaaatactgcaaggatgcaaaatagtcttcagtcgggtgttcccaaacaatacacgcccacaggagcagatggtctggaagatggccgagtatctgggtgccgtttgcgttaaagatgtggatcccagtgtcacccatgttgtaactgtggatctgggaacagagaaggcccgctggggtcttaacaacaagaagttcttggtccacccacgctggattgaagcagcaaatttccggtggcataggcaaccggaggaagattttcctgtcactgcccctaaggaaaagagcaaagagaaagatagtgataatgatgtggctggcaagaaggaaacgagcgaggataaagagaatactgcagctggcatgaaggaaacgaggaacgatgaaggaaatgtaaccggtaaagacaaagctgatgccaaagaaaacgttgtgaccacatctgctacgtgtcctgcagactcgtagtctgtgttgggctccaaaggtatctgacacattgtgtaggcgtgcaggtttggtatgggagatgaaaattcagcttttcttatccgttcgtgcaggctttagatctgtccataaaaaaaagacgttacatctgctccattgcaaattttgctgctgacctgaagctgattgggcctccggccatataacttacgctacgatgaaactataggagttgaagcaaactgatgtctttatgggacaatttttggtgaatccgtgcgactatgtgcgcagatgtacttaagtttgtgcctgcttcggtaggtactgccccctgatgtaagcattcgtgatcgctagtggaactacgttattctagttgaaaaaaaatgttccacacattaattcttgcactggaaaaggcataggcaaggtcgctatgatgttgccatacattgagtacgaagtgatatgttttccggcggagctgtaggggttttcgttatagtgatgaattgatgatgacaaaaataaattccgtcatttcttttatcgtcgaagaagcaggaaataat

SEQ ID NO: 59517 - DNA, 2394 bp, Zea Mays
gtcatgactcatgacaccgtagcttccttcctcgccgtcgccaaatgctgcaggccgcctccatgaggtgctagggttccctggccgacgccacgaccgtcgcacccggccgcctccgtccctgcgggccttcgccaccgccctcgccaaacgtcccgagctagggttcctcacagcttctcccaagcgccctccagtctcaccaacccttctgcggttctgcccttggcgccgcgcccatgagcctcaccgaggcgccgtccccgtccccgtcgtcgtcgagcgggagcgatgacttcgcggccttcctcgcctccgagctcgagctcacctccggtgctgactccgccttccctggtgacccctcctccgttttccccgccaccgacgacgagggcgaggacgaggatccggaggagctagaggttgaagccatagaacaaaacggtaccaaaaggcgtagagtagaggaacaatgccaagatcaaggaacatcagttaggcctgacaaaatccccactggcgcatctaaaattgttcaggttgaggcatgtccacatcctggacattttggtggactttgcattatctgtggcaagccacaagacgaggaagatgtttcaggagttgcttttggttacatccacaagggcttgaggctaggtacctcagaaattgacagactacgtggtgctgatttgaagaatctgttgcgtgaaagaaaattagtactcattttggacctggatcacacattgatcaactccaccaaactccaagacatttcttctgccgaaaaagatttgggtattcagtctgctgcttcaaaagatgatccaaatagaagcatcttcgcactagatttaatgccgatgctcacaaagttgagaccatttgtccgagaatttctgaaagaagcaagcaatatgtttgagatgtatatatacacgatgggtgacaaagcctatgcaattgaaattgcaaagcttcttgaccctagtaacatatattttccttcaaaagtgatttcaaactcagattgcactcagcgacatcagaaaggtcttgatgtgattcttggagctgaaagtgttgcagtgattcttgatgacactgagtatggcagaagcataaagagaacctgattctgatggagagatatcatttctttgcttcaagctgccgccaatttggttttggtgttaggtctttgtcagaatcgttgcaagatgaaagggagagtgatggtgctttggctaccgttttagatgtcttgaagcgcatacacgctactttctttgacatggctgctgaaactgatctttcttcacgggatataagacaggtgatcaagacgttacggaaggaaatactgcaaggatgcaaaatagtcttcagtcgggtgttcccaaacaatacacgcccacaggagcagatggtctggaagatggccgagtatctgggtgccgtttgcgttaaagatgtggatcccagtgtcacccatgttgtaactgtggatctgggaacagagaaggcccgctggggtcttaacaacaagaagttcttggtccacccacgctggattgaagcagcaaatttccggtggcataggcaaccggaggaagattttcctgtcactgcccctaaggaaaagagcaaagagaaagatagtgataatgatgtggctggcaagaaggaaacgagcgaggataaagagaatactgcagctggcatgaaggaaacgaggaacgatgaaggaaatgtaaccggtaaagacaaagctgatgccaaagaaaacgttgtgaccacatctgctacgtgtcctgcagactcgtagtctgtgttgggctccaaaggtatctgacacattgtgtaggcgtgcaggtttggtatgggagatgaaaattcagcttttcttatccgttcgtgcaggctttagatctgtccataaaaaaaagacgttacatctgctccattgcaaattttgctgctgacctgaagctgattgggcctccggccatataacttacgctacgatgaaactataggagttgaagcaaactgatgtctttatgggacaatttttggtgaatccgtgcgactatgtgcgcagatgtacttaagtttgtgcctgcttcggtaggtactgccccctgatgtaagcattcgtgatcgctagtggaactacgttattctagttgaaaaaaaatgttccacacattaattcttgcactggaaaaggcataggcaaggtcgctatgatgttgccatacattgagtacgaagtgatatgttttccggcggagctgtaggggttttcgttatagtgatgaattgatgatgacaaaaataaattccgtcatttcttttatcgtcgaagaagcaggaaataat

SEQ ID NO: 59518 - DNA, 2618 bp, Zea Mays
catgactcatgacaccgtagcttccttcctcgccgtcgccaaatgctgcaggccgcctccatgaggtgctagggttccctggccgacgccacgaccgtcgcacccggccgcctccgtccctgcgggccttcgccaccgccctcgccaaacgtcccgagctagggttcctcacagcttctcccaagcgccctccagtctcaccaacccttctgcggttctgcccttggcgccgcgcccatgagcctcaccgaggcgccgtccccgtccccgtcgtcgtcgagcgggagcgatgacttcgcggccttcctcgcctccgagctcgagctcacctccggtgctgactccgccttccctggtgacccctcctccgttttccccgccaccgacgacgagggcgaggacgaggatccggaggagctagaggttgaagccatagaacaaaacggtaccaaaaggcgtagagtagaggaacaatgccaagatcaaggaacatcagttaggcctgacaaaatccccactggcgcatctaaaattgttcaggttgaggcatgtccacatcctggacattttggtggactttgcattatctgtggcaagccacaagacgaggaagatgtttcaggagttgcttttggttacatccacaagggcttgaggctaggtacctcagaaattgacagactacgtggtgctgatttgaagaatctgttgcgtgaaagaaaattagtactcattttggacctggatcacacattgatcaactccaccaaactccaagacatttcttctgccgaaaaagatttgggtattcagtctgctgcttcaaaagcgccggcgtggccctggctgctgctcgctctgcagcgcgcctcacgtccctcgcgcgcctccgacggttatagggaagaccccacatgacacacacacacacacacacacacaaatgattatgtttttgtagctgtctatgtttcatgtcttttgacactgttgttgcttatccatgagtgtatataacatagctagtgaagcccttattttctaaatgcagatgatccaaatagaagcatcttcgcactagatttaatgccgatgctcacaaagttgagaccatttgtccgagaatttctgaaagaagcaagcaatatgtttgagatgtatatatacacgatgggtgacaaagcctatgcaattgaaattgcaaagcttcttgaccctagtaacatatattttccttcaaaagtgatttcaaactcagattgcactcagcgacatcagaaaggtcttgatgtgattcttggagctgaaagtgttgcagtgattcttgatgacactgagtatgtatggcagaagcataaagagaacctgattctgatggagagatatcatttctttgcttcaagctgccgccaatttggttttggtgttaggtctttgtcagaatcgttgcaagatgaaagggagagtgatggtgctttggctaccgttttagatgtcttgaagcgcatacacgctactttctttgacatggctgctgaaactgatctttcttcacgggatataagacaggtgatcaagacgttacggaaggaaatactgcaaggatgcaaaatagtcttcagtcgggtgttcccaaacaatacacgcccacaggagcagatggtctggaagatggccgagtatctgggtgccgtttgcgttaaagatgtggatcccagtgtcacccatgttgtaactgtggatctgggaacagagaaggcccgctggggtcttaacaacaagaagttcttggtccacccacgctggattgaagcagcaaatttccggtggcataggcaaccggaggaagattttcctgtcactgcccctaaggaaaagagcaaagagaaagatagtgataatgatgtggctggcaagaaggaaacgagcgaggataaagagaatactgcagctggcatgaaggaaacgaggaacgatgaaggaaatgtaaccggtaaagacaaagctgatgccaaagaaaacgttgtgaccacatctgctacgtgtcctgcagactcgtagtctgtgttgggctccaaaggtatctgacacattgtgtaggcgtgcaggtttggtatgggagatgaaaattcagcttttcttatccgttcgtgcaggctttagatctgtccataaaaaaaagacgttacatctgctccattgcaaattttgctgctgacctgaagctgattgggcctccggccatataacttacgctacgatgaaactataggagttgaagcaaactgatgtctttatgggacaatttttggtgaatccgtgcgactatgtgcgcagatgtacttaagtttgtgcctgcttcggtaggtactgccccctgatgtaagcattcgtgatcgctagtggaactacgttattctagttgaaaaaaaatgttccacacattaattcttgcactggaaaaggcataggcaaggtcgctatgatgttgccatacattgagtacgaagtgatatgttttccggcggagctgtaggggttttcgttatagtgatgaattgatgatgacaaaaataaattccgtcatttcttttatcgtcgaagaagcaggaaataat

SEQ ID NO: 59519 - DNA, 2204 bp, Zea Mays
catgactcatgacaccgtagcttccttcctcgccgtcgccaaatgctgcaggccgcctccatgaggtgctagggttccctggccgacgccacgaccgtcgcacccggccgcctccgtccctgcgggccttcgccaccgccctcgccaaacgtcccgagctagggttcctcacagcttctcccaagcgccctccagtctcaccaacccttctgcggttctgcccttggcgccgcgcccatgagcctcaccgaggcgccgtccccgtccccgtcgtcgtcgagcgggagcgatgacttcgcggccttcctcgcctccgagctcgagctcacctccggtgctgactccgccttccctggtgacccctcctccgttttccccgccaccgacgacgagggcgaggacgaggatccggaggagctagaggttgaagccatagaacaaaacggtaccaaaaggcgtagagtagaggaacaatgccaagatcaaggaacatcagttaggcctgacaaaatccccactggcgcatctaaaattgttcaggttgaggcatgtccacatcctggacattttggtggactttgcattatctgtggcaagccacaagacgaggaagatgtttcaggagttgcttttggttacatccacaagggcttgaggctaggtacctcagaaattgacagactacgtggtgctgatttgaagaatctgttgcgtgaaagaaaattagtactcattttggacctggatcacacattgatcaactccaccaaactccaagacatttcttctgccgaaaaagatttgggtattcagtctgctgcttcaaaagtgatttcaaactcagattgcactcagcgacatcagaaaggtcttgatgtgattcttggagctgaaagtgttgcagtgattcttgatgacactgagtatgtatggcagaagcataaagagaacctgattctgatggagagatatcatttctttgcttcaagctgccgccaatttggttttggtgttaggtctttgtcagaatcgttgcaagatgaaagggagagtgatggtgctttggctaccgttttagatgtcttgaagcgcatacacgctactttctttgacatggctgctgaaactgatctttcttcacgggatataagacaggtgatcaagacgttacggaaggaaatactgcaaggatgcaaaatagtcttcagtcgggtgttcccaaacaatacacgcccacaggagcagatggtctggaagatggccgagtatctgggtgccgtttgcgttaaagatgtggatcccagtgtcacccatgttgtaactgtggatctgggaacagagaaggcccgctggggtcttaacaacaagaagttcttggtccacccacgctggattgaagcagcaaatttccggtggcataggcaaccggaggaagattttcctgtcactgcccctaaggaaaagagcaaagagaaagatagtgataatgatgtggctggcaagaaggaaacgagcgaggataaagagaatactgcagctggcatgaaggaaacgaggaacgatgaaggaaatgtaaccggtaaagacaaagctgatgccaaagaaaacgttgtgaccacatctgctacgtgtcctgcagactcgtagtctgtgttgggctccaaaggtatctgacacattgtgtaggcgtgcaggtttggtatgggagatgaaaattcagcttttcttatccgttcgtgcaggctttagatctgtccataaaaaaaagacgttacatctgctccattgcaaattttgctgctgacctgaagctgattgggcctccggccatataacttacgctacgatgaaactataggagttgaagcaaactgatgtctttatgggacaatttttggtgaatccgtgcgactatgtgcgcagatgtacttaagtttgtgcctgcttcggtaggtactgccccctgatgtaagcattcgtgatcgctagtggaactacgttattctagttgaaaaaaaatgttccacacattaattcttgcactggaaaaggcataggcaaggtcgctatgatgttgccatacattgagtacgaagtgatatgttttccggcggagctgtaggggttttcgttatagtgatgaattgatgatgacaaaaataaattccgtcatttcttttatcgtcgaagaagcaggaaataat

SEQ ID NO: 59520 - DNA, 2411 bp, Zea Mays
ctcatgacaccgtagcttccttcctcgccgtcgccaaatgctgcaggccgcctccatgaggtgctagggttccctggccgacgccacgaccgtcgcacccggccgcctccgtccctgcgggccttcgccaccgccctcgccaaacgtcccgagctagggttcctcacagcttctcccaagcgccctccagtctcaccaacccttctgcggttctgcccttggcgccgcgcccatgagcctcaccgaggcgccgtccccgtccccgtcgtcgtcgagcgggagcgatgacttcgcggccttcctcgcctccgagctcgagctcacctccggtgctgactccgccttccctggtgacccctcctccgttttccccgccaccgacgacgagggcgaggacgaggatccggaggagctagaggttgaagccatagaacaaaacggtaccaaaaggcgtagagtagaggaacaatgccaagatcaaggaacatcagttaggcctgacaaaatccccactggcgcatctaaaattgttcaggttgaggcatgtccacatcctggacattttggtggactttgcattatctgtggcaagccacaagacgaggaagatgtttcaggagttgcttttggttacatccacaagggcttgaggctaggtacctcagaaattgacagactacgtggtgctgatttgaagaatctgttgcgtgaaagaaaattagtactcattttggacctggatcacacattgatcaactccaccaaactccaagacatttcttctgccgaaaaagatttgggtattcagtctgctgcttcaaaagcccttattttctaaatgcagatgatccaaatagaagcatcttcgcactagatttaatgccgatgctcacaaagttgagaccatttgtccgagaatttctgaaagaagcaagcaatatgtttgagatgtatatatacacgatgggtgacaaagcctatgcaattgaaattgcaaagcttcttgaccctagtaacatatattttccttcaaaagtgatttcaaactcagattgcactcagcgacatcagaaaggtcttgatgtgattcttggagctgaaagtgttgcagtgattcttgatgacactgagtatgtatggcagaagcataaagagaacctgattctgatggagagatatcatttctttgcttcaagctgccgccaatttggttttggtgttaggtctttgtcagaatcgttgcaagatgaaagggagagtgatggtgctttggctaccgttttagatgtcttgaagcgcatacacgctactttctttgacatggctgctgaaactgatctttcttcacgggatataagacaggtgatcaagacgttacggaaggaaatactgcaaggatgcaaaatagtcttcagtcgggtgttcccaaacaatacacgcccacaggagcagatggtctggaagatggccgagtatctgggtgccgtttgcgttaaagatgtggatcccagtgtcacccatgttgtaactgtggatctgggaacagagaaggcccgctggggtcttaacaacaagaagttcttggtccacccacgctggattgaagcagcaaatttccggtggcataggcaaccggaggaagattttcctgtcactgcccctaaggaaaagagcaaagagaaagatagtgataatgatgtggctggcaagaaggaaacgagcgaggataaagagaatactgcagctggcatgaaggaaacgaggaacgatgaaggaaatgtaaccggtaaagacaaagctgatgccaaagaaaacgttgtgaccacatctgctacgtgtcctgcagactcgtagtctgtgttgggctccaaaggtatctgacacattgtgtaggcgtgcaggtttggtatgggagatgaaaattcagcttttcttatccgttcgtgcaggctttagatctgtccataaaaaaaagacgttacatctgctccattgcaaattttgctgctgacctgaagctgattgggcctccggccatataacttacgctacgatgaaactataggagttgaagcaaactgatgtctttatgggacaatttttggtgaatccgtgcgactatgtgcgcagatgtacttaagtttgtgcctgcttcggtaggtactgccccctgatgtaagcattcgtgatcgctagtggaactacgttattctagttgaaaaaaaatgttccacacattaattcttgcactggaaaaggcataggcaaggtcgctatgatgttgccatacattgagtacgaagtgatatgttttccggcggagctgtaggggttttcgttatagtgatgaattgatgatgacaaaaataaattccgtcatttcttttatcgtcgaagaagcaggaaataat

SEQ ID NO: 59521 - DNA, 2000 bp, Zea Mays
aggattttaacctcgtcccccacccccaccctctcctagaatttactgagtaccaaaaggcgtagagtagaggaacaatgccaagatcaaggaacatcagttaggcctgacaaaatccccactggcgcatctaaaattgttcaggttgaggcatgtccacatcctggacattttggtggactttgcattatctgtggcaagccacaagacgaggaagatgtttcaggagttgcttttggttacatccacaagggcttgaggctaggtacctcagaaattgacagactacgtggtgctgatttgaagaatctgttgcgtgaaagaaaattagtactcattttggacctggatcacacattgatcaactccaccaaactccaagacatttcttctgccgaaaaagatttgggtattcagtctgctgcttcaaaagatgatccaaatagaagcatcttcgcactagatttaatgccgatgctcacaaagttgagaccatttgtccgagaatttctgaaagaagcaagcaatatgtttgagatgtatatatacacgatgggtgacaaagcctatgcaattgaaattgcaaagcttcttgaccctagtaacatatattttccttcaaaagtgatttcaaactcagattgcactcagcgacatcagaaaggtcttgatgtgattcttggagctgaaagtgttgcagtgattcttgatgacactgagtatgtatggcagaagcataaagagaacctgattctgatggagagatatcatttctttgcttcaagctgccgccaatttggttttggtgttaggtctttgtcagaatcgttgcaagatgaaagggagagtgatggtgctttggctaccgttttagatgtcttgaagcgcatacacgctactttctttgacatggctgctgaaactgatctttcttcacgggatataagacaggtgatcaagacgttacggaaggaaatactgcaaggatgcaaaatagtcttcagtcgggtgttcccaaacaatacacgcccacaggagcagatggtctggaagatggccgagtatctgggtgccgtttgcgttaaagatgtggatcccagtgtcacccatgttgtaactgtggatctgggaacagagaaggcccgctggggtcttaacaacaagaagttcttggtccacccacgctggattgaagcagcaaatttccggtggcataggcaaccggaggaagattttcctgtcactgcccctaaggaaaagagcaaagagaaagatagtgataatgatgtggctggcaagaaggaaacgagcgaggataaagagaatactgcagctggcatgaaggaaacgaggaacgatgaaggaaatgtaaccggtaaagacaaagctgatgccaaagaaaacgttgtgaccacatctgctacgtgtcctgcagactcgtagtctgtgttgggctccaaaggtatctgacacattgtgtaggcgtgcaggtttggtatgggagatgaaaattcagcttttcttatccgttcgtgcaggctttagatctgtccataaaaaaaagacgttacatctgctccattgcaaattttgctgctgacctgaagctgattgggcctccggccatataacttacgctacgatgaaactataggagttgaagcaaactgatgtctttatgggacaatttttggtgaatccgtgcgactatgtgcgcagatgtacttaagtttgtgcctgcttcggtaggtactgccccctgatgtaagcattcgtgatcgctagtggaactacgttattctagttgaaaaaaaatgttccacacattaattcttgcactggaaaaggcataggcaaggtcgctatgatgttgccatacattgagtacgaagtgatatgttttccggcggagctgtaggggttttcgttatagtgatgaattgatgatgacaaaaataaattccgtcatttcttttatcgtcgaagaagcaggaaataat

SEQ ID NO: 59522 - DNA, 657 bp, Zea Mays
gatcccaaatccacgtcgaaatgcttccccagatcgttcccgggcacctcggcgcggtcgtcggcgtcgaagatcaccttggccccgtgctggatggcgaagaggtagcccgccgtcttgcggacgtgggagccgtagggcaggaagtcgacggagcggtatccgagctgtgcctgcagctcgagggagaggaagacggcgcccttaagctcccaccctgcgggcgtgtgggaatcgccgacggcgaggagctgccagcccttgacgcgggcgagcgcggccagcgccgcggtaggtggggacgagacagcgaccacgatccaccgctccgcccggaatgacgcgaaggggctacccgcagcgatcgcgagcggcgggaccttggaccaggcgacgtccgggtacgggagcttggcgggggcgcccgagcgcgagcgggcggagcggtcgaggcagagcagcgcggcggcgtcgggggccgcgccgcgcaggaggaagacggcggcggcggatgcgatcgcgaggaggaggagcaggagcttggaggagtgctcggacgcccatgtggcgaagtcgaggttcttggcgaagggccgcgggtgccggcggtccgcccccggcgcgccgcgcggggacgaggacggcttctggcccgcg

SEQ ID NO: 59523 - DNA, 3757 bp, Zea Mays
cacacagcgacatccgttatcctttccctttcgaaccatccaattccattccttccggcaggggaaacacgaacacggtcacgcactccgccgatcccgccaccgcggcgcggggacgcgcacatgctgccacgaatactcctccagtcctcccccgtggtgccggcccccacctgacccccgatccccgcaaccttctatccagaggggaaaaaaagaagacaaaaaccgccggcgagcatgggcacgcaacccggctcggcggttcgtgtcgctgcggatgagagctcgctccctggactttacttaactctactctgagtctcggatgctccagagtccagacttccgggattagaaatccacgcacatcgccgtgcacgcacgcgacggcggagatgtccgtggccgtggggaagcgggtgctcgatacgggctggctcgccgcgcgctccaccgaggtcgcgctcaccggcgtccagctcaccaccacgcacccgccggcagctgaccccgccccagccgcgccctggatgagcgccgccgtccccggcaccgtgctggggacgctgctcaagaacaagctgatccccgaccccttctacgggctgaacaaccaggccatcatcgacatcgccgacgccgggagggagtactacaccttttggttcttcaccacgttccagtgtgccctgtcaggaaatcagcatgcgactttaaacttccggggaataaactactcagctgaaatgtatttaaatgggcacaaggaggtactaccaaaaggaatgttccgaaggcacaacattgatattactgatatcctccatcctgatggtaacaatctgcttgctgtccttgttcatcctcctgatcaccctggcaaaattcctcctcaggggggccagggtggtgatcatgagattggaaaagatgttgctacacaatatgttgaaggatgggattggatgtgcccaataagggatcgaaatactggtatctgggatgaggtatcaatttccatatctgggcctgtgaatataacagacccccatctggtttcaacttttcatgatgattttaagaggtcatacctacattgtacacttcagttggagaacaaaagttcttggattgcagattgtaccttgaaaatacaagtttcaactgaacttgaagggaacatttgtttggtggaacaccttcaaagttatgcaataacagttcctcctcaatcagatatagagtacaccattccttctttattcttctataagcccaacttgtggtggccaaatggcatgggaaagcaatccttatacaacattgagattagtgtggatgtaaaagggtttggagaatctgattcctggagccattattttggattccgcaagattgagagtacaattgatgattctacgggtgggaggatcttcaaggtaaatggtgaacctatttttatccgaggagggaactggatattgtcagatggccttcttagattaacaaagaagcgatatatgaccgacatcaagttccatgctgacatgaacttcaatatgcttagatgttggggtggtgggctagcagagaggcctgacttttatcatttttgcgatgtctatggtctgatgggttggtggagaggtagaaacactgatattctcatagtagacgagggtgctctagaactacgcatgatggagtttctagagaagctgacgcaaccaggatgcttcggcaataccattagcgatggcgcgatactccacctcagcactcgagtgggagacgacgttctgacacttggaggaccaggttacaaggtatggcaagaattttggataactggagatgttgatggccgaggaattcctgtatctaaccctaatggccctttggatcatgatctctttcttttgtgtgctagagataccgtgaaattactcaggaatcatgctagtctagctttatgggttggtggtaatgagcaagttccaccggttgacattaacaaagcactgaagaatgatttgaagctacatccaatgtttgtaagttaccagacatcaaaaagtgaagtaatatatttatctgaagaatcaactgaccctagtaaataccttgatggtactcgggtgtatgtgcaaggatcaatgtgggatggttttgcgaatggtaaaggggacttcactgatggtccatatgagattcagtatccagagagttttttcaaggacagcttctacaaatatgggttcaaccctgaagttgggtctgtaggggttccagttgccgcaacaattagggccacaatgcctccagtaggatggagcattccgattttaaagaaaagaattgatgggtacatcgaagaagtaccaaatccaatatgggactaccacaagtatattccatactcaaaaccagggaaggtccatgatcagattgaactatatggagccccaaaagacctggatgatttttgtgaaaaggcacagctggtgaactatgttcagtacagagcacttttggaaggatggacttccttcatgtggacaaagtttacaggtgtcctaatttggaagacgcagaatccttggactggactaaggggccaattctatgatcacctccaagaccaaacggctgggttttatggttgccggtgtgctgctcaacctattcatgtccaactgaatttggttacctattttgtagaggtggtaaacactacagctgatgaactcaaagacatggctgtcgagatttcagtgtgggatctagatggtgcatgcccctattacaaagttaccgagaaaatagttataccgccaaagaaagtgaagcaaattatcgagatgaaatacccaaagatgaaagatgccaagcctgtgtattttctgctcctcaagctcttcaggctgtcagacaatggaacaatctccagaaacttctactggttacaccttcctgggcaggactacaaatcgctggagcagtatcagcagaaaaagattccattaaaaattgattctgatgtttcagtctcaggcacgaggcacaaagtaagaatgacagtagagaacatctcaaagaagtccgtagtagacagcacacgttcagtatcagcaatggatctaggtgatgcaagtggttcccacagcactcgcaaagaaactactcggaagggaaacgggagcgacggactgtggaggaaaatacgcagtggcctcggggtcgcaagaccaagcgacaaccgaagaacactggaggtcagcgggaccgattcaggggttgccttcttcctccatttctcagtgcacacctccgaatcatccacggacggggaggaatacaatgacacaagaatcctcccggtccactactcggacaactacttttcgctgacgccgggggagaacatggccgtcgacatctcgttcgaggctccccagggatccagtcccagagttgtcctcagaggctggaaccatcatctggaccacgccgtgatgatctgagatccgtgtaataaaataagcacgtaccgaataaagtgcagacatcagatcgtgttcgtgcctgttgttggattataattaggcttgtcctaattttattttattttattaaataaatcgtacgacctaaattgaattctaggttaaatggcttcaaggtactctatatccttcgtaattgttttagatgtcagtgttatttaaagcttatatatacatccttataaaag

SEQ ID NO: 59524 - DNA, 3493 bp, Zea Mays
ccttccggcaggggaaacacgaacacggtcacgcactccgccgatcccgccaccgcggcgcggggacgcgcacatgctgccacgaatactcctccagtcctcccccgtggtgccggcccccacctgacccccgatccccgcaaccttctatccagaggggaaaaaaagaagacaaaaaccgccggcgagcatgggcacgcaacccggctcggcggttcgtgtcgctgcggatgagagctcgctccctggactttacttaactctactctgagtctcggatgctccagagtccagacttccgggattagaaatccacgcacatcgccgtgcacgcacgcgacggcggagatgtccgtggccgtggggaagcgggtgctcgatacgggctggctcgccgcgcgctccaccgaggtcgcgctcaccggcgtccagctcaccaccacgcacccgccggcagctgaccccgccccagccgcgccctggatgagcgccgccgtccccggcaccgtgctggggacgctgctcaagaacaagctgatccccgaccccttctacgggctgaacaaccaggccatcatcgacatcgccgacgccgggagggagtactacaccttttggttcttcaccacgttccagtgtgccctgtcaggaaatcagcatgcgactttaaacttccggggaataaactactcagctgaaatgtatttaaatgggcacaaggaggtactaccaaaaggaatgttccgaaggcacaacattgatattactgatatcctccatcctgatggtaacaatctgcttgctgtccttgttcatcctcctgatcaccctggcaaaattcctcctcaggggggccagggtggtgatcatgagattggaaaagatgttgctacacaatatgttgaaggatgggattggatgtgcccaataagggatcgaaatactggtatctgggatgaggtatcaatttccatatctgggcctgtgaatataacagacccccatctggtttcaacttttcatgatgattttaagaggtcatacctacattgtacacttcagttggagaacaaaagttcttggattgcagattgtaccttgaaaatacaagtttcaactgaacttgaagggaacatttgtttggtggaacaccttcaaagttatgcaataacagttcctcctcaatcagatatagagtacaccattccttctttattcttctataagcccaacttgtggtggccaaatggcatgggaaagcaatccttatacaacattgagattagtgtggatgtaaaagggtttggagaatctgattcctggagccattattttggattccgcaagattgagagtacaattgatgattctacgggtgggaggatcttcaaggtaaatggtgaacctatttttatccgaggagggaactggatattgtcagatggccttcttagattaacaaagaagcgatatatgaccgacatcaagttccatgctgacatgaacttcaatatgcttagatgttggggtggtgggctagcagagaggcctgacttttatcatttttgcgatgtctatggtctgatggctctaaagttaccagttttagtgcctatcatgactgaatctacgttccctaagtggtggaaaaagtcaaaaaaggtatggcaagaattttggataactggagatgttgatggccgaggaattcctgtatctaaccctaatggccctttggatcatgatctctttcttttgtgtgctagagataccgtgaaattactcaggaatcatgctagtctagctttatgggttggtggtaatgagcaagttccaccggttgacattaacaaagcactgaagaatgatttgaagctacatccaatgtttgatcaatgtgggatggttttgcgaatggtaaaggggacttcactgatggtccatatgagattcagtatccagagagttttttcaaggacagcttctacaaatatgggttcaaccctgaagttgggtctgtaggggttccagttgccgcaacaattagggccacaatgcctccagtaggatggagcattccgattttaaagaaaagaattgatgggtacatcgaagaagtaccaaatccaatatgggactaccacaagtatattccatactcaaaaccagggaaggtccatgatcagattgaactatatggagccccaaaagacctggatgatttttgtgaaaaggcacagctggtgaactatgttcagtacagagcacttttggaaggatggacttccttcatgtggacaaagtttacaggtgtcctaatttggaagacgcagaatccttggactggactaaggggccaattctatgatcacctccaagaccaaacggctgggttttatggttgccggtgtgctgctcaacctattcatgtccaactgaatttggttacctattttgtagaggtggtaaacactacagctgatgaactcaaagacatggctgtcgagatttcagtgtgggatctagatggtgcatgcccctattacaaagttaccgagaaaatagttataccgccaaagaaagtgaagcaaattatcgagatgaaatacccaaagatgaaagatgccaagcctgtgtattttctgctcctcaagctcttcaggctgtcagacaatggaacaatctccagaaacttctactggttacaccttcctgggcaggactacaaatcgctggagcagtatcagcagaaaaagattccattaaaaattgattctgatgtttcagtctcaggcacgaggcacaaagtaagaatgacagtagagaacatctcaaagaagtccgtagtagacagcacacgttcagtatcagcaatggatctaggtgatgcaagtggttcccacagcactcgcaaagaaactactcggaagggaaacgggagcgacggactgtggaggaaaatacgcagtggcctcggggtcgcaagaccaagcgacaaccgaagaacactggaggtcagcgggaccgattcaggggttgccttcttcctccatttctcagtgcacacctccgaatcatccacggacggggaggaatacaatgacacaagaatcctcccggtccactactcggacaactacttttcgctgacgccgggggagaacatggccgtcgacatctcgttcgaggctccccagggatccagtcccagagttgtcctcagaggctggaaccatcatctggaccacgccgtgatgatctgagatccgtgtaataaaataagcacgtaccgaataaagtgcagacatcagatcgtgttcgtgcctgttgttggattataattaggcttgtcctaattttattttattttattaaataaatcgtacgacctaaattgaattctaggttaaatggcttcaaggtactctatatccttcgtaattgttttagatgtcagtgttatttaaagcttatatatacatccttataaaag

SEQ ID NO: 59525 - DNA, 3386 bp, Zea Mays
gcactccgccgatcccgccaccgcggcgcggggacgcgcacatgctgccacgaatactcctccagtcctcccccgtggtgccggcccccacctgacccccgatccccgcaaccttctatccagaggggaaaaaaagaagacaaaaaccgccggcgagcatgggcacgcaacccggctcggcggttcgtgtcgctgcggatgagagctcgctccctggactttacttaactctactctgagtctcggatgctccagagtccagacttccgggattagaaatccacgcacatcgccgtgcacgcacgcgacggcggagatgtccgtggccgtggggaagcgggtgctcgatacgggctggctcgccgcgcgctccaccgaggtcgcgctcaccggcgtccagctcaccaccacgcacccgccggcagctgaccccgccccagccgcgccctggatgagcgccgccgtccccggcaccgtgctggggacgctgctcaagaacaagctgatccccgaccccttctacgggctgaacaaccaggccatcatcgacatcgccgacgccgggagggagtactacaccttttggttcttcaccacgttccagtgtgccctgtcaggaaatcagcatgcgactttaaacttccggggaataaactactcagctgaaatgtatttaaatgggcacaaggaggtactaccaaaaggaatgttccgaaggcacaacattgatattactgatatcctccatcctgatggtaacaatctgcttgctgtccttgttcatcctcctgatcaccctggcaaaattcctcctcaggggggccagggtggtgatcatgagattggaaaagatgttgctacacaatatgttgaaggatgggattggatgtgcccaataagggatcgaaatactggtatctgggatgaggtatcaatttccatatctgggcctgtgaatataacagacccccatctggtttcaacttttcatgatgattttaagaggtcatacctacattgtacacttcagttggagaacaaaagttcttggattgcagattgtaccttgaaaatacaagtttcaactgaacttgaagggaacatttgtttggtggaacaccttcaaagttatgcaataacagttcctcctcaatcagatatagagtacaccattccttctttattcttctataagcccaacttgtggtggccaaatggcatgggaaagcaatccttatacaacattgagattagtgtggatgtaaaagggtttggagaatctgattcctggagccattattttggattccgcaagattgagagtacaattgatgattctacgggtgggaggatcttcaaggtaaatggtgaacctatttttatccgaggagggaactggatattgtcagatggccttcttagattaacaaagaagcgatatatgaccgacatcaagttccatgctgacatgaacttcaatatgcttagatgttggggtggtgggctagcagagaggcctgacttttatcatttttgcgatgtctatggtctgatggtatggcaagaattttggataactggagatgttgatggccgaggaattcctgtatctaaccctaatggccctttggatcatgatctctttcttttgtgtgctagagataccgtgaaattactcaggaatcatgctagtctagctttatgggttggtggtaatgagcaagttccaccggttgacattaacaaagcactgaagaatgatttgaagctacatccaatgtttgatcaatgtgggatggttttgcgaatggtaaaggggacttcactgatggtccatatgagattcagtatccagagagttttttcaaggacagcttctacaaatatgggttcaaccctgaagttgggtctgtaggggttccagttgccgcaacaattagggccacaatgcctccagtaggatggagcattccgattttaaagaaaagaattgatgggtacatcgaagaagtaccaaatccaatatgggactaccacaagtatattccatactcaaaaccagggaaggtccatgatcagattgaactatatggagccccaaaagacctggatgatttttgtgaaaaggcacagctggtgaactatgttcagtacagagcacttttggaaggatggacttccttcatgtggacaaagtttacaggtgtcctaatttggaagacgcagaatccttggactggactaaggggccaattctatgatcacctccaagaccaaacggctgggttttatggttgccggtgtgctgctcaacctattcatgtccaactgaatttggttacctattttgtagaggtggtaaacactacagctgatgaactcaaagacatggctgtcgagatttcagtgtgggatctagatggtgcatgcccctattacaaagttaccgagaaaatagttataccgccaaagaaagtgaagcaaattatcgagatgaaatacccaaagatgaaagatgccaagcctgtgtattttctgctcctcaagctcttcaggctgtcagacaatggaacaatctccagaaacttctactggttacaccttcctgggcaggactacaaatcgctggagcagtatcagcagaaaaagattccattaaaaattgattctgatgtttcagtctcaggcacgaggcacaaagtaagaatgacagtagagaacatctcaaagaagtccgtagtagacagcacacgttcagtatcagcaatggatctaggtgatgcaagtggttcccacagcactcgcaaagaaactactcggaagggaaacgggagcgacggactgtggaggaaaatacgcagtggcctcggggtcgcaagaccaagcgacaaccgaagaacactggaggtcagcgggaccgattcaggggttgccttcttcctccatttctcagtgcacacctccgaatcatccacggacggggaggaatacaatgacacaagaatcctcccggtccactactcggacaactacttttcgctgacgccgggggagaacatggccgtcgacatctcgttcgaggctccccagggatccagtcccagagttgtcctcagaggctggaaccatcatctggaccacgccgtgatgatctgagatccgtgtaataaaataagcacgtaccgaataaagtgcagacatcagatcgtgttcgtgcctgttgttggattataattaggcttgtcctaattttattttattttattaaataaatcgtacgacctaaattgaattctaggttaaatggcttcaaggtactctatatccttcgtaattgttttagatgtcagtgttatttaaagcttatatatacatccttataaaag

SEQ ID NO: 59526 - DNA, 3531 bp, Zea Mays
cttctatccagaggggaaaaaaagaagacaaaaaccgccggcgagcatgggcacgcaacccggctcggcggttcgtgtcgctgcggatgagagctcgctccctggactttacttaactctactctgagtctcggatgctccagagtccagacttccgggattagaaatccacgcacatcgccgtgcacgcacgcgacggcggagatgtccgtggccgtggggaagcgggtgctcgatacgggctggctcgccgcgcgctccaccgaggtcgcgctcaccggcgtccagctcaccaccacgcacccgccggcagctgaccccgccccagccgcgccctggatgagcgccgccgtccccggcaccgtgctggggacgctgctcaagaacaagctgatccccgaccccttctacgggctgaacaaccaggccatcatcgacatcgccgacgccgggagggagtactacaccttttggttcttcaccacgttccagtgtgccctgtcaggaaatcagcatgcgactttaaacttccggggaataaactactcagctgaaatgtatttaaatgggcacaaggaggtactaccaaaaggaatgttccgaaggcacaacattgatattactgatatcctccatcctgatggtaacaatctgcttgctgtccttgttcatcctcctgatcaccctggcaaaattcctcctcaggggggccagggtggtgatcatgagatttggattgtcttttgcttctttttttagcaaagctcaaacaagacttgtgttgcttagttgccaatgtgttttccctcggatgattggaaaagatgttgctacacaatatgttgaaggatgggattggatgtgcccaataagggatcgaaatactggtatctgggatgaggtatcaatttccatatctgggcctgtgaatataacagacccccatctggtttcaacttttcatgatgattttaagaggtcatacctacattgtacacttcagttggagaacaaaagttcttggattgcagattgtaccttgaaaatacaagtttcaactgaacttgaagggaacatttgtttggtggaacaccttcaaagttatgcaataacagttcctcctcaatcagatatagagtacaccattccttctttattcttctataagcccaacttgtggtggccaaatggcatgggaaagcaatccttatacaacattgagattagtgtggatgtaaaagggtttggagaatctgattcctggagccattattttggattccgcaagattgagagtacaattgatgattctacgggtgggaggatcttcaaggtaaatggtgaacctatttttatccgaggagggaactggatattgtcagatggccttcttagattaacaaagaagcgatatatgaccgacatcaagttccatgctgacatgaacttcaatatgcttagatgttggggtggtgggctagcagagaggcctgacttttatcatttttgcgatgtctatggtctgatggctctaaagttaccagttttagtgcctatcatgactgaatctacgttccctaagtggtggaaaaagtcaaaaaaggtatggcaagaattttggataactggagatgttgatggccgaggaattcctgtatctaaccctaatggccctttggatcatgatctctttcttttgtgtgctagagataccgtgaaattactcaggaatcatgctagtctagctttatgggttggtggtaatgagcaagttccaccggttgacattaacaaagcactgaagaatgatttgaagctacatccaatgtttgtaagttaccagacatcaaaaagtgaagtaatatatttatctgaagaatcaactgaccctagtaaataccttgatggtactcgggtgtatgtgcaaggatcaatgtgggatggttttgcgaatggtaaaggggacttcactgatggtccatatgagattcagtatccagagagttttttcaaggacagcttctacaaatatgggttcaaccctgaagttgggtctgtaggggttccagttgccgcaacaattagggccacaatgcctccagtaggatggagcattccgattttaaagaaaagaattgatgggtacatcgaagaagtaccaaatccaatatgggactaccacaagtatattccatactcaaaaccagggaaggtccatgatcagattgaactatatggagccccaaaagacctggatgatttttgtgaaaaggcacagctggtgaactatgttcagtacagagcacttttggaaggatggacttccttcatgtggacaaagtttacaggtgtcctaatttggaagacgcagaatccttggactggactaaggggccaattctatgatcacctccaagaccaaacggctgggttttatggttgccggtgtgctgctcaacctattcatgtccaactgaatttggttacctattttgtagaggtggtaaacactacagctgatgaactcaaagacatggctgtcgagatttcagtgtgggatctagatggtgcatgcccctattacaaagttaccgagaaaatagttataccgccaaagaaagtgaagcaaattatcgagatgaaatacccaaagatgaaagatgccaagcctgtgtattttctgctcctcaagctcttcaggctgtcagacaatggaacaatctccagaaacttctactggttacaccttcctgggcaggactacaaatcgctggagcagtatcagcagaaaaagattccattaaaaattgattctgatgtttcagtctcaggcacgaggcacaaagtaagaatgacagtagagaacatctcaaagaagtccgtagtagacagcacacgttcagtatcagcaatggatctaggtgatgcaagtggttcccacagcactcgcaaagaaactactcggaagggaaacgggagcgacggactgtggaggaaaatacgcagtggcctcggggtcgcaagaccaagcgacaaccgaagaacactggaggtcagcgggaccgattcaggggttgccttcttcctccatttctcagtgcacacctccgaatcatccacggacggggaggaatacaatgacacaagaatcctcccggtccactactcggacaactacttttcgctgacgccgggggagaacatggccgtcgacatctcgttcgaggctccccagggatccagtcccagagttgtcctcagaggctggaaccatcatctggaccacgccgtgatgatctgagatccgtgtaataaaataagcacgtaccgaataaagtgcagacatcagatcgtgttcgtgcctgttgttggattataattaggcttgtcctaattttattttattttattaaataaatcgtacgacctaaattgaattctaggttaaatggcttcaaggtactctatatccttcgtaattgttttagatgtcagtgttatttaaagcttatatatacatccttataaaag

SEQ ID NO: 59527 - DNA, 2967 bp, Zea Mays
ctgtcttctgctgaactgaacttcaggaaatcagcatgcgactttaaacttccggggaataaactactcagctgaaatgtatttaaatgggcacaaggaggtactaccaaaaggaatgttccgaaggcacaacattgatattactgatatcctccatcctgatggtaacaatctgcttgctgtccttgttcatcctcctgatcaccctggcaaaattcctcctcaggggggccagggtggtgatcatgagattggaaaagatgttgctacacaatatgttgaaggatgggattggatgtgcccaataagggatcgaaatactggtatctgggatgaggtatcaatttccatatctgggcctgtgaatataacagacccccatctggtttcaacttttcatgatgattttaagaggtcatacctacattgtacacttcagttggagaacaaaagttcttggattgcagattgtaccttgaaaatacaagtttcaactgaacttgaagggaacatttgtttggtggaacaccttcaaagttatgcaataacagttcctcctcaatcagatatagagtacaccattccttctttattcttctataagcccaacttgtggtggccaaatggcatgggaaagcaatccttatacaacattgagattagtgtggatgtaaaagggtttggagaatctgattcctggagccattattttggattccgcaagattgagagtacaattgatgattctacgggtgggaggatcttcaaggtaaatggtgaacctatttttatccgaggagggaactggatattgtcagatggccttcttagattaacaaagaagcgatatatgaccgacatcaagttccatgctgacatgaacttcaatatgcttagatgttggggtggtgggctagcagagaggcctgacttttatcatttttgcgatgtctatggtctgatggctctaaagttaccagttttagtgcctatcatgactgaatctacgttccctaagtggtggaaaaagtcaaaaaaggtatggcaagaattttggataactggagatgttgatggccgaggaattcctgtatctaaccctaatggccctttggatcatgatctctttcttttgtgtgctagagataccgtgaaattactcaggaatcatgctagtctagctttatgggttggtggtaatgagcaagttccaccggttgacattaacaaagcactgaagaatgatttgaagctacatccaatgtttgtaagttaccagacatcaaaaagtgaagtaatatatttatctgaagaatcaactgaccctagtaaataccttgatggtactcgggtgtatgtgcaaggatcaatgtgggatggttttgcgaatggtaaaggggacttcactgatggtccatatgagattcagtatccagagagttttttcaaggacagcttctacaaatatgggttcaaccctgaagttgggtctgtaggggttccagttgccgcaacaattagggccacaatgcctccagtaggatggagcattccgattttaaagaaaagaattgatgggtacatcgaagaagtaccaaatccaatatgggactaccacaagtatattccatactcaaaaccagggaaggtccatgatcagattgaactatatggagccccaaaagacctggatgatttttgtgaaaaggcacagctggtgaactatgttcagtacagagcacttttggaaggatggacttccttcatgtggacaaagtttacaggtgtcctaatttggaagacgcagaatccttggactggactaaggggccaattctatgatcacctccaagaccaaacggctgggttttatggttgccggtgtgctgctcaacctattcatgtccaactgaatttggttacctattttgtagaggtggtaaacactacagctgatgaactcaaagacatggctgtcgagatttcagtgtgggatctagatggtgcatgcccctattacaaagttaccgagaaaatagttataccgccaaagaaagtgaagcaaattatcgagatgaaatacccaaagatgaaagatgccaagcctgtgtattttctgctcctcaagctcttcaggctgtcagacaatggaacaatctccagaaacttctactggttacaccttcctgggcaggactacaaatcgctggagcagtatcagcagaaaaagattccattaaaaattgattctgatgtttcagtctcaggcacgaggcacaaagtaagaatgacagtagagaacatctcaaagaagtccgtagtagacagcacacgttcagtatcagcaatggatctaggtgatgcaagtggttcccacagcactcgcaaagaaactactcggaagggaaacgggagcgacggactgtggaggaaaatacgcagtggcctcggggtcgcaagaccaagcgacaaccgaagaacactggaggtcagcgggaccgattcaggggttgccttcttcctccatttctcagtgcacacctccgaatcatccacggacggggaggaatacaatgacacaagaatcctcccggtccactactcggacaactacttttcgctgacgccgggggagaacatggccgtcgacatctcgttcgaggctccccagggatccagtcccagagttgtcctcagaggctggaaccatcatctggaccacgccgtgatgatctgagatccgtgtaataaaataagcacgtaccgaataaagtgcagacatcagatcgtgttcgtgcctgttgttggattataattaggcttgtcctaattttattttattttattaaataaatcgtacgacctaaattgaattctaggttaaatggcttcaaggtactctatatccttcgtaattgttttagatgtcagtgttatttaaagcttatatatacatccttataaaag

SEQ ID NO: 59528 - DNA, 2565 bp, Zea Mays
gttagtctcatatccttcagattggaaaagatgttgctacacaatatgttgaaggatgggattggatgtgcccaataagggatcgaaatactggtatctgggatgaggtatcaatttccatatctgggcctgtgaatataacagacccccatctggtttcaacttttcatgatgattttaagaggtcatacctacattgtacacttcagttggagaacaaaagttcttggattgcagattgtaccttgaaaatacaagtttcaactgaacttgaagggaacatttgtttggtggaacaccttcaaagttatgcaataacagttcctcctcaatcagatatagagtacaccattccttctttattcttctataagcccaacttgtggtggccaaatggcatgggaaagcaatccttatacaacattgagattagtgtggatgtaaaagggtttggagaatctgattcctggagccattattttggattccgcaagattgagagtacaattgatgattctacgggtgggaggatcttcaaggtaaatggtgaacctatttttatccgaggagggaactggatattgtcagatggccttcttagattaacaaagaagcgatatatgaccgacatcaagttccatgctgacatgaacttcaatatgcttagatgttggggtggtgggctagcagagaggcctgacttttatcatttttgcgatgtctatggtctgatggtatggcaagaattttggataactggagatgttgatggccgaggaattcctgtatctaaccctaatggccctttggatcatgatctctttcttttgtgtgctagagataccgtgaaattactcaggaatcatgctagtctagctttatgggttggtggtaatgagcaagttccaccggttgacattaacaaagcactgaagaatgatttgaagctacatccaatgtttgatcaatgtgggatggttttgcgaatggtaaaggggacttcactgatggtccatatgagattcagtatccagagagttttttcaaggacagcttctacaaatatgggttcaaccctgaagttgggtctgtaggggttccagttgccgcaacaattagggccacaatgcctccagtaggatggagcattccgattttaaagaaaagaattgatgggtacatcgaagaagtaccaaatccaatatgggactaccacaagtatattccatactcaaaaccagggaaggtccatgatcagattgaactatatggagccccaaaagacctggatgatttttgtgaaaaggcacagctggtgaactatgttcagtacagagcacttttggaaggatggacttccttcatgtggacaaagtttacaggtgtcctaatttggaagacgcagaatccttggactggactaaggggccaattctatgatcacctccaagaccaaacggctgggttttatggttgccggtgtgctgctcaacctattcatgtccaactgaatttggttacctattttgtagaggtggtaaacactacagctgatgaactcaaagacatggctgtcgagatttcagtgtgggatctagatggtgcatgcccctattacaaagttaccgagaaaatagttataccgccaaagaaagtgaagcaaattatcgagatgaaatacccaaagatgaaagatgccaagcctgtgtattttctgctcctcaagctcttcaggctgtcagacaatggaacaatctccagaaacttctactggttacaccttcctgggcaggactacaaatcgctggagcagtatcagcagaaaaagattccattaaaaattgattctgatgtttcagtctcaggcacgaggcacaaagtaagaatgacagtagagaacatctcaaagaagtccgtagtagacagcacacgttcagtatcagcaatggatctaggtgatgcaagtggttcccacagcactcgcaaagaaactactcggaagggaaacgggagcgacggactgtggaggaaaatacgcagtggcctcggggtcgcaagaccaagcgacaaccgaagaacactggaggtcagcgggaccgattcaggggttgccttcttcctccatttctcagtgcacacctccgaatcatccacggacggggaggaatacaatgacacaagaatcctcccggtccactactcggacaactacttttcgctgacgccgggggagaacatggccgtcgacatctcgttcgaggctccccagggatccagtcccagagttgtcctcagaggctggaaccatcatctggaccacgccgtgatgatctgagatccgtgtaataaaataagcacgtaccgaataaagtgcagacatcagatcgtgttcgtgcctgttgttggattataattaggcttgtcctaattttattttattttattaaataaatcgtacgacctaaattgaattctaggttaaatggcttcaaggtactctatatccttcgtaattgttttagatgtcagtgttatttaaagcttatatatacatccttataaaag

SEQ ID NO: 59529 - DNA, 1851 bp, Zea Mays
ctgacacttggaggaccaggttacaagagataccgtgaaattactcaggaatcatgctagtctagctttatgggttggtggtaatgagcaagttccaccggttgacattaacaaagcactgaagaatgatttgaagctacatccaatgtttgtaagttaccagacatcaaaaagtgaagtaatatatttatctgaagaatcaactgaccctagtaaataccttgatggtactcgggtgtatgtgcaaggatcaatgtgggatggttttgcgaatggtaaaggggacttcactgatggtccatatgagattcagtatccagagagttttttcaaggacagcttctacaaatatgggttcaaccctgaagttgggtctgtaggggttccagttgccgcaacaattagggccacaatgcctccagtaggatggagcattccgattttaaagaaaagaattgatgggtacatcgaagaagtaccaaatccaatatgggactaccacaagtatattccatactcaaaaccagggaaggtccatgatcagattgaactatatggagccccaaaagacctggatgatttttgtgaaaaggcacagctggtgaactatgttcagtacagagcacttttggaaggatggacttccttcatgtggacaaagtttacaggtgtcctaatttggaagacgcagaatccttggactggactaaggggccaattctatgatcacctccaagaccaaacggctgggttttatggttgccggtgtgctgctcaacctattcatgtccaactgaatttggttacctattttgtagaggtggtaaacactacagctgatgaactcaaagacatggctgtcgagatttcagtgtgggatctagatggtgcatgcccctattacaaagttaccgagaaaatagttataccgccaaagaaagtgaagcaaattatcgagatgaaatacccaaagatgaaagatgccaagcctgtgtattttctgctcctcaagctcttcaggctgtcagacaatggaacaatctccagaaacttctactggttacaccttcctgggcaggactacaaatcgctggagcagtatcagcagaaaaagattccattaaaaattgattctgatgtttcagtctcaggcacgaggcacaaagtaagaatgacagtagagaacatctcaaagaagtccgtagtagacagcacacgttcagtatcagcaatggatctaggtgatgcaagtggttcccacagcactcgcaaagaaactactcggaagggaaacgggagcgacggactgtggaggaaaatacgcagtggcctcggggtcgcaagaccaagcgacaaccgaagaacactggaggtcagcgggaccgattcaggggttgccttcttcctccatttctcagtgcacacctccgaatcatccacggacggggaggaatacaatgacacaagaatcctcccggtccactactcggacaactacttttcgctgacgccgggggagaacatggccgtcgacatctcgttcgaggctccccagggatccagtcccagagttgtcctcagaggctggaaccatcatctggaccacgccgtgatgatctgagatccgtgtaataaaataagcacgtaccgaataaagtgcagacatcagatcgtgttcgtgcctgttgttggattataattaggcttgtcctaattttattttattttattaaataaatcgtacgacctaaattgaattctaggttaaatggcttcaaggtactctatatccttcgtaattgttttagatgtcagtgttatttaaagcttatatatacatccttataaaag

SEQ ID NO: 59530 - DNA, 3299 bp, Zea Mays
gttccgtgtcgtgtcggaccccaccacaaccctcttctccgtttcgtttcccgaccaggcctcgccggctcaccgcccccgccgcgcccgccatggacttctcggaacaggacgtcgacgtcttcggcgaggactacgacgtccacgacggcggcgccgaggccgaggccgaggccgacggcggcggggactcgtcgggctcctcctccccatcatcgtcctcgtcgtcctctgccgccgcgtcctcctcatcctcaagtggcggctcaagcctcagcagcagcggcggcgctgccggtgagggcgaggatggcgccgatgcgggggacggggaggaatacgattcgtccaacctcatagccacaaggagcgccggcgccgccggctatctggacgatgagaggagggaatatgagaaccaggaggtagaggaggagagagatttgttcggctcagataacgaagagtacgtcagaactccggcgcgcagccactacctagtcccagtgcttcctccaattcggaacactaataatcattctcgaggaggctttggaggacgaggtggtagaggcccaccacttcttccaaggccaggaggccatccagggcgacataactttggttacgggagattcgggaatgggcgtcatgttgaaggtttagtttcagatatgaagcttaataagagcgaagaaacattgtctagaaaagctgttacttttcaggagccttgtgagattgcatgcttaagccgtgttgagggtggagaggtgtattttgatgatcgcagcttgaggctcttcaaacgtgaaatctgtgaataccgcggtgcagatctcaataaaggattcgagtcatatatagagaagagagatattggccactgcttacctaagagaaccatggaagatgggcgttcataaaagaaggggtgttgtatatcttgatgttcataagctccctgaaagaccaaaaagtgaagttgagcgtaagagatgttattggggctattcttttgaaaaccttgccactgagaactcattcagcgacgatggaaggggtatcgatgcaaatgtagagttttgttctgtaataaagacaaaattgggtgcccatcggattgtcatgggtgctgagatggactgctgtgatgcaactgatgatggcaggaggttctatgtggagctgaaaacaagcagagagctggaataccatacagtggaagcatatgaaaaagaaaagctacttagattttggattcaatcgtttcttgccggtgttccttatgttgttgtgggattcaggaatgatgctggcatacttgtacggacggaaagactaagaaccaaagatattacacaaaaggtgaaggcaaagaactactggcagggtggcgtttgccttgcctttgccgatgaagtcttatgttggttgtatgggactgtcaaagagaatgaagactatgttcttcaatttgtacatccatttaaccgcctcgaacttctgcgtgcccagtccccctgtccggaagccataacgttgcatgtgcagcagctctcaggtgcagcggactagattctagcagtgacctcggcggggactacttgccttggagaaaaacccaattctagcagcagcactgaacaatggttgatctggcaacttactcaaccccaattaccaagcagatgtgctaatgcatcaaagaactgatgagatcgatcactggtctagctacatccatggtttacactcttgaatggccaaagagattttgaatccatcaaacatgtatttccattgtaacattattacataataaacaatacagacagagctactagtgctgtgctactgtaacattattgcatcaaatcctgtaaacttcagcaagggatggatgttcttaaacatccgaattgtcagcctttataagtcataatatgtaagcagaactttttcgtactctagcgttttgaaataataaatttcattaatgacgattagaatggtgagtggctgtcgcctatggctgcagatggttttatgctcacaaggcatcgtggattgcaatgtgaacctgctgtaatacgagctttaaaggtcaccttttgtcattgtttgtgtaggcgctgtggaattgttcatgatgagtcccggtcccgctgcctgtcccaagaacatctcgcttctcgcacgggcacagcaggtcaacgctctacacgcctcgacgccttgtccggcctgcaaagctgcagccccgctgcccagccgcctgcctcaaccctctccctctatcttcgtgagccagcggggaaggaaggaagcaacacccagggtaggatgggggtaggcgagtgcaagagcaacgactacggcgccgccgcatactgggacgcccgctactcctccggctcgccagcttccgccgccgccggctgtgggttcttcgactggtaccagacgtacccggcgctgcggccgctcctccgcgcccgcgtcccgacctcctcccgcgtcctgatgctcggctgcggcaactcccttttgtcggaggatatggtgaaggatggttacgaggacattgtaaacatagacatttcatctgtggtcatcgagcaaatgagagagaaacacaaggagattacacagctaacatatatgcagatggatattagagacatgggatttttcggtgatgagtcatttgattgtgtccttgataaagggaccctggatgctatgatgtgtgctgatgatgctcctcatggtgctttcaaaatgctagcagaagtggcaaggcttttgatgcctcatgggatctacttattgataacatatggtgctccaaaggaacgtgtcccacttctggaccagtccggatgcagctggagtattgcactctacatcatgcccacagctggataccaactgagaatgagtaaaggtgctcaacatcttataatggaggaggttacactcacagagggtggccaactgccacctgactatgttctcaaagatccagattcacatttcatttatgtttgtgagaagttggaagagaaagggactaattgcagagatactgatccaaaggaatcaacaaatgcaaattaactcactaccaacttcagatttcattttgattattgctggggaagtttgttgttgcaaaggcatagtcggagctcgtcttttgaatcatgtgttacccttcgtatgaaaaacctggctggcttcgccccgactgggtgtttggtttaaagaacgtgttagtatcttttcacttctca

SEQ ID NO: 59531 - DNA, 3368 bp, Zea Mays
atggatcgcgccacgccgcgcgtttgcggccgccgcggcgtatcccaagcggcggtggaagctgcgccgtcctcctcccgcgcgcgccgccgcgataaggcgccggccgttgtcatggaccttggcgacgacgactgcggcggtggcggggccaggaagacggttggtggcgctgcaggtaggtgcgagggatccacgaaggctcctttgcctctgctgccgccgatgatggtgccggcgggagcggtggcgctgcggacacgatcgaggaggcgggcgatgctggcggcggcagtggtggaagaggcgccaacgaagaagaagaagaaggaaggagcgatcccagatgccgcggaggcgccccgtggccacgggagcaaggccgctgctacctcgatggcgacgtcgagccataagcggcgcgctgggacctcgaggtcgacgtcgagagataagcggcgcgcgcgctcgggacgtgcctcggagccagctcgcgtgggccgcgcgcgcaagcgcaaaaggaacgagttggaggcccccgctcggagagaacgtgtgaaggcgccatgtgtcagtgaaagtgatgacaacagcgggcgaggcgatgacgcttctcatgacggggatgcggagcctcgcgtcggggtcgccattggcactgatctggttaacggggatcatccggcagctaaagaggtagtggaaggtgctggtgacgaggacacaggggacggagggaacagtggcctggcatcgactgctgatgtgtttgctgaggagatggcaccctttgaagatgactacgatgatgagatgttggaggagcagcttgttggagatgtgattcgtgcttacagtaatggcagaaacttcgattcagatggagtggattgggaggcagaggatgagatggagttcaatgacgatgctgacaatagtgattttatggatgatgctgacgatagtgattttatggatgatgcttatgaaggtggcaattccaaaccaattcaaaatcatgctaagttggaaatacaagactgggtgaaccagaaagttgttttgagtggagggaggtgtgaggcgaggggcgagggggatctggaggaagaattggatgtgggaaaggaagcagatgaggaggacgtggaaccaaagagtgaagcggctccaggttctgataaaagggtcttgcagttagaaatcctaggttccgatgaggaaatcaaggtgcttgaaaatatgagtagtgccccatccaggaaggcgtcagttcaatcgaagttaccaactattccatcttgtgttgcatggagaacccgatcatcatggggggtaaatcaagatagactatcgtacgatacatattttgaggaattatctgatgagccaaaagaggatgatgatgatacagaggtggaacttgatgaagttgaggatgacaacaatgacgatgacagtagtgatgcttatgataaagatgacgaagagaaggaggaagaggaagaagaggctgaaagaagaaaacttaataacaggatttgcacatccgatgaagacatgatcaatattactgttcctacatcaagatatgatatgtttaagaaaaaaaattcctcaagatatgatattgagtgggtggaggatgaagatgcaagtgttgatatgttacagccagtttcctttaagaaagatagcagctggaagcctgtggctgttggcaacgacacatttactgagcaacaaaagcgatcacgatttacttgggagcttgagaggaggaaaaagcttaagcttgagatgaagacaaatcctttgcatgagcgggatttggactcagatccgaactcatcaggttctgaccagatcagaaagtatggtttcaaaagtgatgggagtcataaagttgataggaaaaagaagcatacatcgcccaaatcgggcaagaaacccagcagcgcaatcatactaaagcggcagtctcttttgaagcttttggtagataaaatgagtggtgataaaagtttagcatcttttccatttgatcagaatcctcagcttcagtttattttcaaagaaatgcatccattggtattttcatttggagatgaagatctagtagcagctgacaggccagagcaagatgttggattggatatgttatgggctgactttgactttgctttagagtctgagaatatcggtacttattatgatgatgagtgtcaagaaggcaatcaactagatttttctcttgccccagtaacaccctgttctcgtgggaagcatgaatttgttattgatgatcaaatagggatcagatgcaaatactgttccttggtaaacctggagatcaaattcatgtttccatcactggtgtcagtgtttgccgagaaatcagcatggccaaatgacaaaggcgtgaaaaatacactgatgtttcatgatctttatgaacaaggagtcaatgacactgaacaatctcaagatattcatcaatatggaacggtgtggaatcttattccaggggtcatcagtactatgtatgagcatcagcgtgaagcatttgaatttatgtggacaaatttagttggtgatattagacttgatgagataaagcatggagcaaaacctgatgttgttggtggatgtgttatctgtcatgctcctggaacaggaaagacacgattagctattgtgtttatccagacatacatgaaggtgtttccagactgtcggccagtgattattgcaccacgtggtatgctctttgcttgggatgaggaatttaagaaatggaatgttgatgttccttttcatatactaaacacaactgattacactggaaaagaggatcgggagatatgcaagttaataaagaaagaacataggacagaaaagttgacaagactagtcaaactgctttcatggaacaaaggtcatggtattcttggaataagttatggtctgtacacaaaactgacctctgaaaaacctggctgcacagaagaaaacaaagctaggcatgcgtgggaggaccctgcaggcttcattttctttattattgtctaccgcacaatgaatctgcaattttgtatcttgggaaggactaaaagcagaagttaataatgggtggcagagccacaatgtacatggtggttcacaaggttgtgggcattacgatgcccatacctatatccaaatgtcatgtctaataataaaactattggacctttttggcggttcaattttatttacataaaagacagcctcaattcgaatacataggctctgccccctttcagcattttgggtgttccactttcattgcgttattatccttgctatcaaccgtagttcatgaggtg

SEQ ID NO: 59532 - DNA, 2104 bp, Zea Mays
ggactctcatgattggagttgctcttaagcactcgcgcgaggactcctactttgggatgtgcgttcggcgccatgcaacggcggcgaccaagagcagcgcaccgctgccgcttcctcacggcggcggccgcctcgttccacatccacctcctcctcctcagcgccgtgtccgctgccggcgtcgatgatgacgcggacacaccggcgattctggacacggtgtgcgcggctacgcagactgtggatccagaggccttcgacatgagcttcgacacaaccatggagatgatctaccagaacgtgaagagctcgggcttcggtgccgtcggctccggcgagggcagcaacacagtgttcggcctcgcgcagtgcatgagctacctctcccccaccgactgccaactctgctacggacaggcccgcgtgaagctgccgcactgcctccccgccgacggcggccgcatctacctcgacggctgcttcctccgctacggtggcgacaacttcacggccgctgccaccgacgccagcgacgctgcggtgtgttccaacgccaccgcgccggctgggttcgcggccgccgccgccgcgctggtgcggaacgtcacggcggctgcgccgggcgccaaggactactactacgcggcggcatccgggcgcggcgcatacgccgcagcgcagtgctggaggtcgctcaacgccagcgcgtgcgccgcgtgcgtgggcagcgcgcgcgaccagcttgtccgcgagtgcctaccggccgcgcccgaggggtacggcctcaacgccgggtgcgtcgtcaggtactccacgcgggcgttctacctgcccgtcaacgccggcggcggcagcggcagcggcagatcgtccgcacggcgcattgctgtcatcgtggtcgcttcagtcttgtcggcgctgcttgtagccatgggcatattattcatctggacaagaatgaggtccagatcaagagacgatctcctccatgacgatacagacatggacggctccggcgggatgatccgcgccatcgccgcgtcgcatctgagcttcaagtaccaggagctgcggacggccaccggcgagttcagccagaccaacaagctcggccagggaggctacggctccgtctacaagggtgtgctggcggacgggcgggaggtggcggtgaagcggctcttcttcagcacgcggcagtgggcggagcagttcttcaacgaggtgaagctggtgagccaggtgaggcacaagaacctggtcaagctgctgggctgcagcgtggacggccccgagagcctcctcgtctacgaacgcgctcaagaaggccgtgctggattgggagcggaggttcgagatcgtgctgggcaccgcggagggcctctcctacctgcacagcgcttcggaggtcaggatcatacaccgggacatcaaggctggcaacgtcctgctggacggcaggttcaggccaaagatcgccgacttcggcctcgccaggaacatcatggacgaccagagccatctcagcaccggcctcgccggaacttttggatacatggctccagagtacatcgtccacgggcagctcacggagaaggccgacatctacagctacggcgtgctgatcctcgagatcgtcactggcaggaagagcaacaactcggtggcgtcgtcggaagaaggcctttcactcatggcactgatatggagtcactacaacaccggcaccctgatggagctgttggacctgaacctccgcgagcagtgctcggaggaggatgccctccgggtgttccacgtcgggttgttgtgcacccaagcgtcaccgaaccttcggccgccgatgtggaaggtggtggagatgctcagcggcggcagggaggtgcttccccggcccacccagcctccgttcatcaacatcacggggcccaacatcaagagcgacaacttcgggtcgccgttctcgctgaaccagctctcaatgagtggggtgcaggccaggtaaaacgtgtgtatggcgttgtgttagtaacacttttttcagaagttgaagagatgtttgactttaattttctgatcatggatattttgttgatctggtgac

SEQ ID NO: 59533 - DNA, 456 bp, Zea Mays
gtttgtagtttgtacattagtacattactgatgttggaacatcttgttggtcatgaatttgcaagaaatggaattattcttcagagttcagatgtaatgggctgttaccagaagttaggcaatgaaccaaatgaatgccagaagttgtcaaagctactaagcctatttgacagagatatgtcatagagatctcactatctttctgagggcacgcaaggttcgttcaatgaccgaggggtgaggtgaacacaagtctgatctcgccagttgcaacaatgttgctttagactgccatgttaaataattctccgagcaaaagatacacccattacaatttacaagtgggttgccccatgattgtattgttagacgggagttcggtgaaccccaacagttatactgatacaaagacaaaagacgtaataaaggacaatcaaagcgtaaacattggcgacg

SEQ ID NO: 59534 - DNA, 1304 bp, Zea Mays
aggattattccgacctttttcatcccacgcccaaacgccaaactccatctccatcacctcgcacttatcggtgaaaccgcgcgatgattacggcggcgcccgcgctgcccatgttcctccggctgtgcccggcctcgcccttcctcctccgccccagcctacacgtccccagctcaaggcgccccactccgtcgcgcctgagctcttttcgccctgcaaggccactcttccccatctcagctgtggagaaaaccaacgaggctgctgcggctggggagggtgagctcgaggggatgccgcccgagttctacgacgaggagtggcaggcccgtcagcgggagaggactaaggagtggcatgcatatcggcagaaagaggaggccgaggaggaaagaataacaaatgagtaccgagagataggcatgcgcctgaaagcttatccgcaagaagaagttcgcaaagctaggattttagtttcaagtttcataagagctggtggagatgttgaggaggaaattgagaaggctgctgaaagaggagagcttactgaacttgtccttatggtcatctggaatcgacttgatattgctcggcgtgatgatgagcgggatgccatcagaagccttgatctcttgtatagaagggtagagacagagattctgaagagtgaagcaactcctgccatgagattgctcaatgatcttcttaatcttcatgatggaggcgacaatgagaagtggttaaagaaatgtagaaagcgcatgcttgaagtctttccaagagaggacccattcactgtggtctttcctgctgggttcaacatggagaatggcgaattgagctaccgcctcaggatgatgatcttcttctgagagtggactttgtcagggaagttgatgagctgctgaaagaggttcgtgctgtggaagacaagaacaagcaacaaattgggtttgacccagaatcagttgcatatatgctgaagcagcaggagaagatgcagacgatgcgtcaggtggaatctctcctggacttggcgtcctccttgaaatggtgaggattgagtactatcgaacaactgaacaactatgctgtttgcttggaagctagacgtcattgacttgacatttatactcaacagttagagggggtatctgttttcagctagttagaccaataaccgttctgggtagagccatgcagtttacttggacatccatgtacatttgtatgtgtagagatatcttactatatatcaatgtatgtctacacttctaatgaaaaaactatctgacccattttct

SEQ ID NO: 59535 - DNA, 1246 bp, Zea Mays
aggattattccgacctttttcatcccacgcccaaacgccaaactccatctccatcacctcgcacttatcggtgaaaccgcgcgatgattacggcggcgcccgcgctgcccatgttcctccggctgtgcccggcctcgcccttcctcctccgccccagcctacacgtccccagctcaaggcgccccactccgtcgcgcctgagctcttttcgccctgcaaggccactcttccccatctcagctgtggagaaaaccaacgaggctgctgcggctggggagggtgagctcgaggggatgccgcccgagttctacgacgaggagtggcaggcccgtcagcgggagaggactaaggagtggcatgcatatcggcagaaagaggaggccgaggaggaaagaataacaaatgagtaccgagagataggcatgcgcctgaaagcttatccgcaagaagaagttcgcaaagctaggattttagtttcaagtttcataagagctggtggagatgttgaggaggaaattgagaaggctgctgaaagaggagagcttactgaacttgtccttatggtcatctggaatcgacttgatattgctcggcgtgatgatgagcgggatgccatcagaagccttgatctcttgtatagaagggtagagacagagattctgaagagtgaagcaactcctgccatgagattgctcaatgatcttcttaatcttcatgatggaggcgacaatgagaagtggttaaagaaatgtagaaagcgcatgcttgaagtctttccaagagaggacccattcactgtggtctttcctgctgggttcaacatggagaatggaagttgatgagctgctgaaagaggttcgtgctgtggaagacaagaacaagcaacaaattgggtttgacccagaatcagttgcatatatgctgaagcagcaggagaagatgcagacgatgcgtcaggtggaatctctcctggacttggcgtcctccttgaaatggtgaggattgagtactatcgaacaactgaacaactatgctgtttgcttggaagctagacgtcattgacttgacatttatactcaacagttagagggggtatctgttttcagctagttagaccaataaccgttctgggtagagccatgcagtttacttggacatccatgtacatttgtatgtgtagagatatcttactatatatcaatgtatgtctacacttctaatgaaaaaactatctgacccattttct

SEQ ID NO: 59536 - DNA, 1530 bp, Zea Mays
aggattattccgacctttttcatcccacgcccaaacgccaaactccatctccatcacctcgcacttatcggtgaaaccgcgcgatgattacggcggcgcccgcgctgcccatgttcctccggctgtgcccggcctcgcccttcctcctccgccccagcctacacgtccccagctcaaggcgccccactccgtcgcgcctgagctcttttcgccctgcaaggccactcttccccatctcagctgtggagaaaaccaacgaggctgctgcggctggggagggtgagctcgaggggatgccgcccgagttctacgacgaggagtggcaggcccgtcagcgggagaggactaaggagtggcatgcatatcggcagaaagaggaggccgaggaggaaagaataacaaatgagtaccgagagataggcatgcgcctgaaagcttatccgcaagaagaagttcgcaaagctaggattttagtttcaagtttcataagagctggtggagatgttgaggaggaaattgagaaggctgctgaaagaggagagcttactgaacttgtccttatggtcatctggaatcgacttgatattgctcggcgtgatgatgagcgggatgccatcagaagccttgatctcttgtatagaagggtagagacagagattctgaagagtgaagcaactcctgccatgagattgctcaatgatcttcttaatcttcatgatggaggcgacaatgagaagtggttaaagaaatgtagaaagcgcatgcttgaagtctttccaagagaggacccattcactgtggtctttcctgctgggttcaacatggagaatgtatgctatttcagtctaagtggccttcccatatcttctgaagactcagtacaagatctgtcaaaatcgagcataacaaatttacaaaaaatacactaacaattttctgttcttacacattgctactgcatttttttgacttgcgcagaagtatatataaaagaacgacctgcagggaaagaccgttcccatggccattgacttcagacttgcacagaacgtgaagggcgaattgagctaccgcctcaggatgatgatcttcttctgagagtggactttgtcagggaagttgatgagctgctgaaagaggttcgtgctgtggaagacaagaacaagcaacaaattgggtttgacccagaatcagttgcatatatgctgaagcagcaggagaagatgcagacgatgcgtcaggtggaatctctcctggacttggcgtcctccttgaaatggtgaggattgagtactatcgaacaactgaacaactatgctgtttgcttggaagctagacgtcattgacttgacatttatactcaacagttagagggggtatctgttttcagctagttagaccaataaccgttctgggtagagccatgcagtttacttggacatccatgtacatttgtatgtgtagagatatcttactatatatcaatgtatgtctacacttctaatgaaaaaactatctgacccattttct

SEQ ID NO: 59537 - DNA, 2030 bp, Zea Mays
aggattattccgacctttttcatcccacgcccaaacgccaaactccatctccatcacctcgcacttatcggtgaaaccgcgcgatgattacggcggcgcccgcgctgcccatgttcctccggctgtgcccggcctcgcccttcctcctccgccccagcctacacgtccccagctcaaggcgccccactccgtcgcgcctgagctcttttcgccctgcaaggccactcttccccatctcagctgtggagaaaaccaacgaggctgctgcggctggggagggtgagctcgaggggatgccgcccgagttctacgacgaggagtggcaggcccgtcagcgggagaggactaaggagtggcatgcatatcggcagaaagaggaggccgaggaggaaagaataacaaatgagtaccgagagataggcatgcgcctgaaagcttatccgcaagaagaagttcgcaaagctaggattttagtttcaagtttcataagagctggtggagatgttgaggaggaaattgagaaggctgctgaaagaggagagcttactgaacttgtccttatggtcatctggaatcgacttgatattgctcggcgtgatgatgagcgggatgccatcagaagccttgatctcttgtatagaagggtagagacagagattctgaagagtgaagcaactcctgccatgagattgctcaatgatcttcttaatcttcatgatggaggcgacaatgagaagtggttaaagaaatgtagaaagcgcatgcttgaagtctttccaagagaggacccattcactgtggtctttcctgctgggttcaacatggagaatgtatgctatttcagtctaagtggccttcccatatcttctgaagactcagtacaagatctgtcaaaatcgagcataacaaatttacaaaaaatacactaacaattttctgttcttacacattgctactgcatttttttgacttgcgcagaagtatatataaaagaacgacctgcagggaaagaccgttcccatggccattgacttcagacttgcacagaagtatactataatatagtaaaagtaggacagatacaatacacctgtaattggttcttcaacacatatattgttgagtcctttgtcatgcagatctcttagtttttgttgaaagttttgaaatcattgaaataagaaacagcttgatttcttgctgaagaaaagcatacatgataaacaatatagacatcattgccacatcacccttagcaaaatagttgagtctcaatgaaatcaatatatccttttcgatcaatgattggatttaggatctcttgtttccttttaaaatgacttctctatgttttcatggttctaagtctatctccagcacctctcttatcttattccatatctcacctcttattttcaaactccactttgcaaacagttttatctacagtgcaaaacaatattttgcacgatctgttggagacaacttaacgtggtaaagaaatattctgagtatttttttttatatatcattctgtttttttggtcagcgtgaagggcgaattgagctaccgcctcaggatgatgatcttcttctgagagtggactttgtcagggaagttgatgagctgctgaaagaggttcgtgctgtggaagacaagaacaagcaacaaattgggtttgacccagaatcagttgcatatatgctgaagcagcaggagaagatgcagacgatgcgtcaggtggaatctctcctggacttggcgtcctccttgaaatggtgaggattgagtactatcgaacaactgaacaactatgctgtttgcttggaagctagacgtcattgacttgacatttatactcaacagttagagggggtatctgttttcagctagttagaccaataaccgttctgggtagagccatgcagtttacttggacatccatgtacatttgtatgtgtagagatatcttactatatatcaatgtatgtctacacttctaatgaaaaaactatctgacccattttct

SEQ ID NO: 59538 - DNA, 1571 bp, Zea Mays
ctttcttcggtgttgcagtgacctagaaagcacttagatataggaaaattattgaaattgagaaggctgctgaaagaggagagcttactgaacttgtccttatggtcatctggaatcgacttgatattgctcggcgtgatgatgagcgggatgccatcagaagccttgatctcttgtatagaagggtagagacagagattctgaagagtgaagcaactcctgccatgagattgctcaatgatcttcttaatcttcatgatggaggcgacaatgagaagtggttaaagaaatgtagaaagcgcatgcttgaagtctttccaagagaggacccattcactgtggtctttcctgctgggttcaacatggagaatgtatgctatttcagtctaagtggccttcccatatcttctgaagactcagtacaagatctgtcaaaatcgagcataacaaatttacaaaaaatacactaacaattttctgttcttacacattgctactgcatttttttgacttgcgcagaagtatatataaaagaacgacctgcagggaaagaccgttcccatggccattgacttcagacttgcacagaagtatactataatatagtaaaagtaggacagatacaatacacctgtaattggttcttcaacacatatattgttgagtcctttgtcatgcagatctcttagtttttgttgaaagttttgaaatcattgaaataagaaacagcttgatttcttgctgaagaaaagcatacatgataaacaatatagacatcattgccacatcacccttagcaaaatagttgagtctcaatgaaatcaatatatccttttcgatcaatgattggatttaggatctcttgtttccttttaaaatgacttctctatgttttcatggttctaagtctatctccagcacctctcttatcttattccatatctcacctcttattttcaaactccactttgcaaacagttttatctacagtgcaaaacaatattttgcacgatctgttggagacaacttaacgtggtaaagaaatattctgagtatttttttttatatatcattctgtttttttggtcagcgtgaagggcgaattgagctaccgcctcaggatgatgatcttcttctgagagtggactttgtcagggaagttgatgagctgctgaaagaggttcgtgctgtggaagacaagaacaagcaacaaattgggtttgacccagaatcagttgcatatatgctgaagcagcaggagaagatgcagacgatgcgtcaggtggaatctctcctggacttggcgtcctccttgaaatggtgaggattgagtactatcgaacaactgaacaactatgctgtttgcttggaagctagacgtcattgacttgacatttatactcaacagttagagggggtatctgttttcagctagttagaccaataaccgttctgggtagagccatgcagtttacttggacatccatgtacatttgtatgtgtagagatatcttactatatatcaatgtatgtctacacttctaatgaaaaaactatctgacccattttct

SEQ ID NO: 59539 - DNA, 1129 bp, Zea Mays
tattttcatagggaagcgattgggaaaattcttgcccgtggtcatagtcgtgttcctgtatactcaagaaaccctaaaaacatcatcggtctcctattgagtcttttgactgttcgtgctgaaacggagacgccggttagtgctgtttcaattagaaggattccaagggttccttcagacatgcctttgtatgatatactcaatgagtttcagaaaggaagtagtcatatggctgctgttgtgaaggctaaacctaaaactgaaccaccgcctgacagaactgaaccaaatagggaagcagttgggccagcacaattgactgttaccttgttatctaatgctgaagaaagtgcagacaatgtggttgtggatatcgaaagaccacataacaggcagattaatgggatcccagcatctaacgcagtgcctaggtcatcagaggatattgaggatggtgaggtcgttggaatcatcacacttgaggatgtatttgaagaactcctacaggaggaaattgtggatgagactgatgaatatgttgatgtccataaaaggatccgagtagctgctgctgctgctgcatcatcggttgcaagggctccatccgttaggagattaacgggccaaaaggctgcaaaccttcagggagcacagaatcgccaaggacagcagcctcctggaattctcaagaaacctactgagggtgattcaaactcatcaaaacaagtgaaccttgtcgaacctcttcttgaaaagaggaggtaactctaaaaacgtagccgataaaacgcatggaatcaagccggaagagcctatggttcttgctattataacaagaggtaaatatagatgaactcgttgttgtaaattccaacaggagcttttggtgtcatggacattagtcatgaattctctctccccctctccccttctcccctctttggttatggactgcgaaagtagaatggccactcttgaatttatttatcaccgctcaccgcagtagcaactgcattatatatatgcttcaaatccctagattcctagggtttatagctatgcataaggcctagtttaggaaccctattttttccagggatttttattttctcaagaaaaaataaactaa

SEQ ID NO: 59540 - DNA, 1166 bp, Zea Mays
tattttcatagggaagcgattgggaaaattcttgcccgtggtcatagtcgtgttcctgtatactcaagaaaccctaaaaacatcatcggtctcctattggtgaagagtcttttgactgttcgtgctgaaacggagacgccggttagtgctgtttcaattagaaggattccaagggttccttcagacatgcctttgtatgatatactcaatgagtttcagaaaggaagtagtcatatggctgctgttgtgaaggctaaacctaaaactgaaccaccgcctgacagaactgaaccaaatagggaagcagttgggccagcacaattgactgttaccttgttatctaatgctgaagaaagtgcagacaatgtggttgtggatatcgaaagaccacataacaggcagattaatgggatcccagcatctaacgcagtgcctaggtcatcagaggatattgaggatggtgaggtcgttggaatcatcacacttgaggatgtatttgaagaactcctacaggaggaaattgtggatgagactgatgaatatgttgatgtccataaaaggatccgagtagctgctgctgctgctgcatcatcggttgcaagggctccatccgttaggagattaacgggccaaaaggctgcaaaccttcagggagcacagaatcgccaaggacagcagcctcctggaattctcaagaaacctactgagggtgattcaaactcatcaaaacaagtgaaccttgtcgaacctcttcttgaaaagaggaggtaactctaaaaacgtagccgataaaacgcatggaatcaagccggaagagcctatggttcttgctattataacaagagttcaacgtgaaaataagagaatggaatacgtttagttgaacgtgatcgaatgaacaaagaaaacgtacccaatacccgtcctcctgctcatgacaggcatggtctctacggccaaaaaaaggtaaaaaaaaaaggtgggggatcagaatgtcatcgaaaagaatctgaaaaacataaataagaccgaaactatcttgtcgtggtttaatattactaggacgtctaccacttgttctattatattctctatcttattctttatttcaaattttactctacaaacagttaacaatataattaaattgtaaattttcttttttt

SEQ ID NO: 59541 - DNA, 528 bp, Zea Mays
acgcacccgccgacgcccgcgcggccacgcactaggcggcaccgcagcgacggtcgacgatcgccacacccggacaccccacacaggcacccagccacgcgagcggcgaaactgcgggagccaatcagaacctacagcgatgcaatgatcgccgtcgcatcgtccttcccctcgcgcgcccacgcggctccgttcggctcggggacactgccaccgccgtctacgcggcgcagcacgtccctccgccacccgcgcgtctcggcgctcggtggaggcctcgaaggagagccggggaagatactggatccgcgcgccacgccgttccagatcctcggcctcgacgccgccgccggctactccgccgccgaactcaaggccgcctttcgcgcccgggttaaggaattccatcctgatgtttgcaaggacccagaaaatgcagatttaataatgaggcgagtgatcgaggcctatcagtgcgagtgtggccttaaaggtttcagaattgtgaaggaactttagaaatctgac

SEQ ID NO: 59542 - DNA, 1298 bp, Zea Mays
acgcacccgccgacgcccgcgcggccacgcactaggcggcaccgcagcgacggtcgacgatcgccacacccggacaccccacacaggcacccagccacgcgagcggcgaaactgcgggagccaatcagaacctacagcgatgcaatgatcgccgtcgcatcgtccttcccctcgcgcgcccacgcggctccgttcggctcggggacactgccaccgccgtctacgcggcgcagcacgtccctccgccacccgcgcgtctcggcgctcggtggaggcctcgaaggagagccggggaagatactggatccgcgcgccacgccgttccagatcctcggcctcgacgccgccgccggctactccgccgccgaactcaaggccgcctttcgcgcccggtgtatctaaacaacttggcgtacctccatgatctcctttaatcatggattgtgaaaccaccatttttgggtgttggttacttcgtgacgaggggaagaagacaccgagtggcacggttaaggaattccatcctgatgtttgcaaggacccagaaaatgcagatttaataatgaggcgagtgatcgaggcctatcaggaacaatgttgacccatttgatgaacctgagtgtgaagctcgtgacatatttgtcaatgaacttctatgcattggcactggatgtccatattcttgtgttaaaagggcacctcatgtattttcattttcagatgatactggtacagctcgtgcaatatctcaaggtaatggagaagatgatcttgttcagctcgctgttgggcagtgtccaagaaagtgcatatactatgtgacgccttgccaacgcactattttggaggatgttcttgctagtgtgttgatggtgccttacgatcttgctgaagcagcagttctggattccctcctttcaaaagcgaagttcgagaataacaggtataagaagccccaaagaggagcaaaatcatcctccgattatgttgattggatgtgatctgatcccgagacacaaagaggatgccagattcagccgaaggcagttcggtagatttatgctggtttgcctattctccttggtcagttgcccgatagtttataaaatggaatacgtttacgtggacagactgctttgtttgtggtatacggttatgatttctataatatttctttctgccagaattttactccgtcttttcttggcataagaaactcctaggattgactgggagcttaataatgttttggtctaaaaactcacaagtataataatgtatagctattccgtgcaata

SEQ ID NO: 59543 - DNA, 1132 bp, Zea Mays
acgcacccgccgacgcccgcgcggccacgcactaggcggcaccgcagcgacggtcgacgatcgccacacccggacaccccacacaggcacccagccacgcgagcggcgaaactgcgggagccaatcagaacctacagcgatgcaatgatcgccgtcgcatcgtccttcccctcgcgcgcccacgcggctccgttcggctcggggacactgccaccgccgtctacgcggcgcagcacgtccctccgccacccgcgcgtctcggcgctcggtggaggcctcgaaggagagccggggaagatactggatccgcgcgccacgccgttccagatcctcggcctcgacgccgccgccggctactccgccgccgaactcaaggccgcctttcgcgcccgggttaaggaattccatcctgatgtttgcaaggacccagaaaatgcagatttaataatgaggcgagtgatcgaggcctatcaggaacaatgttgacccatttgatgaacctgagtgtgaagctcgtgacatatttgtcaatgaacttctatgcattggcactgatgatactggtacagctcgtgcaatatctcaaggtaatggagaagatgatcttgttcagctcgctgttgggcagtgtccaagaaagtgcatatactatgtgacgccttgccaacgcactattttggaggatgttcttgctagtgtgttgatggtgccttacgatcttgctgaagcagcagttctggattccctcctttcaaaagcgaagttcgagaataacaggtataagaagccccaaagaggagcaaaatcatcctccgattatgttgattggatgtgatctgatcccgagacacaaagaggatgccagattcagccgaaggcagttcggtagatttatgctggtttgcctattctccttggtcagttgcccgatagtttataaaatggaatacgtttacgtggacagactgctttgtttgtggtatacggttatgatttctataatatttctttctgccagaattttactccgtcttttcttggcataagaaactcctaggattgactgggagcttaataatgttttggtctaaaaactcacaagtataataatgtatagctattccgtgcaata

SEQ ID NO: 59544 - DNA, 1180 bp, Zea Mays
acgcacccgccgacgcccgcgcggccacgcactaggcggcaccgcagcgacggtcgacgatcgccacacccggacaccccacacaggcacccagccacgcgagcggcgaaactgcgggagccaatcagaacctacagcgatgcaatgatcgccgtcgcatcgtccttcccctcgcgcgcccacgcggctccgttcggctcggggacactgccaccgccgtctacgcggcgcagcacgtccctccgccacccgcgcgtctcggcgctcggtggaggcctcgaaggagagccggggaagatactggatccgcgcgccacgccgttccagatcctcggcctcgacgccgccgccggctactccgccgccgaactcaaggccgcctttcgcgcccgggttaaggaattccatcctgatgtttgcaaggacccagaaaatgcagatttaataatgaggcgagtgatcgaggcctatcagatgttatctggcaaccaagaaatgatgtttgaaaggaacaatgttgacccatttgatgaacctgagtgtgaagctcgtgacatatttgtcaatgaacttctatgcattggcactggatgtccatattcttgtgttaaaagggcacctcatgtattttcattttcagatgatactggtacagctcgtgcaatatctcaaggtaatggagaagatgatcttgttcagctcgctgttgggcagtgtccaagaaagtgcatatactatgtgacgccttgccaacgcactattttggaggatgttcttgctagttctggattccctcctttcaaaagcgaagttcgagaataacaggtataagaagccccaaagaggagcaaaatcatcctccgattatgttgattggatgtgatctgatcccgagacacaaagaggatgccagattcagccgaaggcagttcggtagatttatgctggtttgcctattctccttggtcagttgcccgatagtttataaaatggaatacgtttacgtggacagactgctttgtttgtggtatacggttatgatttctataatatttctttctgccagaattttactccgtcttttcttggcataagaaactcctaggattgactgggagcttaataatgttttggtctaaaaactcacaagtataataatgtatagctattccgtgcaata

SEQ ID NO: 59545 - DNA, 814 bp, Zea Mays
aacaatgctgtactccttattttacaagcagaacacattacacataggattgtgttccttcctttgatgcaaccgagctcgttcagtttcctagtttttatagactttatagtctatacattagggacataggccttccatgtagttgttcaccacaaatcgtgtggacatattttgtcaactttatccggcaaattacaactgttgatggctactgcaggatgtccatattcttgtgttaaaagggcacctcatgtattttcattttcagatgatactggtacagctcgtgcaatatctcaaggtaatggagaagatgatcttgttcagctcgctgttgggcagtgtccaagaaagtgcatatactatgtgacgccttgccaacgcactattttggaggatgttcttgctagcagttctggattccctcctttcaaaagcgaagttcgagaataacaggtataagaagccccaaagaggagcaaaatcatcctccgattatgttgattggatgtgatctgatcccgagacacaaagaggatgccagattcagccgaaggcagttcggtagatttatgctggtttgcctattctccttggtcagttgcccgatagtttataaaatggaatacgtttacgtggacagactgctttgtttgtggtatacggttatgatttctataatatttctttctgccagaattttactccgtcttttcttggcataagaaactcctaggattgactgggagcttaataatgttttggtctaaaaactcacaagtataataatgtatagctattccgtgcaata

SEQ ID NO: 59546 - DNA, 2903 bp, Zea Mays
caacgggtcgttcctattcaaaaatcgaactcctacgctccttcggtccttcccctccccatcttcccaaaccgccccacgcttcatcctcgcaagcctccccgaccccccagctcaacgagatccggcgagcgaattccctcttccccgaccaccagatcgcagcgatggagccggatcgggtcgccgcgggggcatcctcctcgccgcagccctcaccagcgccggccatgttcctgccggggcaaacgcgaggagtttggggatcaaggagaggactccattatcttgtcaccgcggctgcaggagatttgtactcctgaccgccccactgccctgcgcttcttaggtactggctctccaagaaagttggaatgtcttataatttggaacggagggagtacaagcaactattatacacatgctttgcttaagtcttcaaagtatttttattcgtataattatttgtggttggtctttgtttgtgtgtagggaagaaatataataacctcatggagagatacaagaagcaggtggtcaagtgttctgaggagtgtgaccctagatataacggcttgaagaagaagtacacagacgagtgtgcagagaggcggcgtctgtacaatgagcttattgagctaagaggtaacattagggtgttctgcagatgcagacctctgagctccaatgagctcgcccgtgggtgttcatcagtagttgagattgactcatcacaggagactgagctgcagtttgtccccaatgaaaaagaaaggaagccctttaagttcgaccatgtttttggcccagaggatgaccaagaggccgtgttttcagaaacagtgcccgttgttgggtcagtgatggatggtttcaacgtatgcatctttgcatatgggcaaacaggaaccgggaaaactttcacaatggaaggggttccagaaaataggggtgtaaattatagggctttggaagaattgttcagaatctcagagaaaagaagtgcatctgttgcatacacattttccgtaagcatcttggaagtttacaatgaaaagatcagggatcttcttgatgagagcaatgatcaatcaaaaaggttggatattaagcaaaatgctgatggaacacaagaagttcatggtttggttgaggctccaatttataacatagatggtgtgtgggagaaactgaagtttggcgctcaaaataggtctgttggctcaaccaatgctaatgaactcagcagccgctcccacagtttggttagggtcactgttaggagcgagcacttggtgacttatcagaggagcagaagccacatgtggttggttgaccttgctggaagtgagagaatagctaaaactggggtagaaggagataggctgaaagaatcacagttcatcaacaaatcactatctgccttgggtgatgttatatctgcccttgcctcaaaaaattcccatattccatacaggaattccaagctgactcatttgctccaaagctctttaggcggagattgcaagactctaatgttcgtgcagataagcccaagctcaatggattcaggagaaactctcagttcactcaattttgcgagtagagtccgagctgtagaacatggccctgctgctcgtaagcaagcggatccagctgggagtttgaagttaaagcagatgactgaaaaacttcagcatgaggaaaaggagaatgcacagctgaatcaaagcttgcagctgatgcaactgaagtatgcttctcgtgagaatgtcttcaggacactaaatgaaaaggtgaaggatgctgaacaagcatgcagaaattatcagcagcggattagagagctggaaaatgaattaggcaatgagaagagggcttctagggattctgctagatcctcaaggcccccacttgttcctacgagacagagacaacctcagggaaggactaacagcttcgcaccaccttcaggcccttctagatggaggctcaaagcccccgcaaaacacaacaaagagaacattcctgtggcgatgaataaaccaaatgctggggatgatcctaataagcctgtcggcagagcaaggcgtgtttcacttgctccggtgattcgacaaatccccatccagcccaagaggcgatcttcgatggcagtgctaccatccgtgagagagcatctttctgtgctaaacgacaagaaagcaggatctcgactgtcgcaagccaacatggcaagaggatcacttggggcatttggcttgaatttggttccaggaacacccctagcaggacatggtggacctgttgatgctacaccagatggagcaaagttcaggagatttgatttcggaagcagcagcaagttcacaagccctgccccaaatgtgggcatgtggaacaaaatggtcacgccgcagcagaagctgggaatggcaccggcaggagcgaagctgtgtttcagcatccagaaaagagttacgcctccacatgttcgggcgaaacctggattgggcatcttcgacccagctctgcgtgagaatatggtcgtggggagagccggcaatgcgctgcgggtgctcaaccccaagcgaaggcaatctgttatctaactcttgaagccaaaggtacagcagatgtttggacgttcaaacggagcgtgtggttcttagtgaaaccgtgaagatgttcttttcagcatctttaaatggattctgcttggttgttactagttgataggaaagctatgttaatactgttaatggaagttgttaattgtatttgttcgttactaagaatcgcttcaactgttgagcaattttaggacttgtttggtagagtcccgcttcacaattctctaatagagtgattctgattgattctctaccgaaagtgaatctatt

SEQ ID NO: 59547 - DNA, 1356 bp, Zea Mays
agattgctaggaaaaactgtattattttgctcgacttcctagttaaacactgaatagtggtgaaacttgtaattttttttgatcagttgctttatccaattcagggtctatgccaatgggtgttaggccatctccaggagaccgtgtaaaaggaagatagccgacaaggttgcttcgtcagggtactttgttgtggtaccagatttgtttcatggggatccttatgcacctgagaatgttgagaagccctttcctgtgtggataaagtcacatactccggaaaaagggtttgaagagacaaaacaagttattggggctctaaaggagaagggagtgtctgctgttggagctgcagggtattgctggggtgcaaaggttgttgtggagttggcaaaagctcatgagatccaggctgctgtgctgttgcacccttcttttgttaccgttgacgatatcaaagaggtcaagtgcgcaatttctatcctcggagctgagattgacaaaatgtccccaccggagctaatcaagcagttcgagcaggtcctttctttgaactcaggggttggccacttcgtcaagatcttccctggtgtggcgcatggatggagcgtgagatacaaccacgacgacgcagctgccgtgaagagtgctgaggaagcctttgcggacatgctcgactggttcaacaagaatctgaaataaactctgcaattgcatcctgccttgtaataatgcgtgttccagtgccctgggatcgaatctgctgtgtttgggcttttgcatggtcaggctattcagagttgtcatggacttagggttgtgttagtagattggttgcgctgaatctataataaaaacgaggtaaactaggacaatgatgatgtggccgtgtgtatttaatgtattctgttcacaattatgtttcgtgctctttttttttactccaattctctcctaccattttttttgacctgggatatttgagtttatttacatcaatcaccctctatttcgctcctaccactttctatttcacttctcactcttattttacaccaccaaactattgtctttcttggactcagactttgatggccaaagatgagatactcgatatgctgcatcatactatgatggatacgacgatgaagcttacctccgagtcttcaacaagaaggagatgaaagacacactattgaagctatatcgactgggatcgtgaagtcgctcatgatcagttgatgcaagcctatttcaatgacccatcaacctagtactgggaattgggccgggccggagtccatcgtgcttcgtgccaaacgggtttgagccaacaaagcccaaaagatttttggg

SEQ ID NO: 59548 - DNA, 1012 bp, Zea Mays
gctccatgcatcgagtgatcgatctataaataccagctacgtgcctcccatatttccgcaccaaaccatcgacgctctcaatctcacacacacttgcaccgtcgttgtgcacgcacatccaacacaatagcgaccacgatcgagaacccatggcgcccaagctccccgtcgtcctcctcgctgcctgcgccgtcctcctggcgctcgctaccccgctgctcgccggcgatcccgacatgctccaggacatctgcgtcgccgactacgaatcgcttgaaggcccgctgcgggtgaacgggttcccttgcaagcgtgaggcgaacgtgacggcggacgacttcttcttcggcgggctcgccgcggccgccgacgtgtactcgggcaacccgatggggtcggcggcgacggcggcggacgtgtcggtgctcccgggtctcaacaccctgggcgtgtccatggcgcgcacggacttcgcgccgtcgggcggcgtcagcccgccgcacgtgcacccgcgcgccacggagatcctcttcgtcgtggagggcaccctcgaggtgggcttcgtcacctcggcaaaccgcctcttcagccgcgccgtcggcaagggagaggtgttcgtgttcccccgcggcctcgtgcacttccagcgcatcgtcggggcggcgcccgccgtggcgatctcggctttcaacgcccagctgcctggcacgcagacggtcgccggggcactgttcggcgctgcgccggcggtgccgacggacgtgctggcgcgggcgttacagatcgacggtggagcgatcgagtacatcaagtccaagtttgcgcccaactagggcatgtctcgaattgcaaatgctcaggtgatcgaaaagagggtacgaacgaacataactactaaataaagtctcaagtgaacaagtcatttcaggtttcagcaagataataatgtgatgatgatgccgcacacctgtctgctttatattttcgatcataatgtctgctttactaggta

SEQ ID NO: 59549 - DNA, 1188 bp, Zea Mays
gtccaacgcagccaggatgcgacaatgcgaggcaggctgcttcatgcgtgaaaccaatcgtttcttcggcccggcacatgcaagcagccatgggcgagaaagaataggaccgccgccgccgctttgtccctccgttcacaaccttgtcgcacgagtctcttattcgggaaaagttaaacagattgttggctctactcttcgggatttagcaaatgatagcatggaacttgtgacaaactttgaatcagacaaatctcctgcagaatttgctaaattttataaagcagatgaacttctaggaggacatgttataatgcttggcgcaaatccttcaagccaggctgctgcactggaggcactacgtgcatatcctgtatgtgtttagtgatggcaagatgaacactgaaaggttaagaaaacttgtcgagctggttgggaaacagaggctcgtgctggacctcagttgtcgaaaaaaggatggccgatataccattgtaactgacaggtggcaaaagttcagtgatgtgtttgtggatgaaccaacattagaatatctcgctgcctttgcagatgagtttttggttcatggtgttgatgtggagggcaaaaggttaggaattgatgaggaacttgtggaactattggggcactattcaccaatcccagtcacttatgctgggggtgtgtcaacaatggacgacctagagaggataaagaaagcaggcaaaagtcgggtagatgtaacaattgggagtgctctagatatatttggaggagatttgccttacaaagatgttgtcctttggcacaggaagcaaagtatggttggtcaagtgtgaagaaacacaagttaggctatctccaacagatcctctatctcatctcctatttcaaactattttgcgtcccctattttacactacactggagacagtcttcagtgatgtaattcaaatctgaggagcatgacttgtttgggtttggacaccagggttggcgctaactcaaaaggtggtcaatttgtgagtaatgtactgttcttgacagtttctgacctcgatttgtctattgtaactgaataggctgaattgatgctgatagatacattttgcctgctacaacactgacattctgatttttaagttcctcgtttgagaaaataataatattgatgcaaattttggctct

SEQ ID NO: 59550 - DNA, 2661 bp, Zea Mays
gtccaacgcagccaggatgcgacaatgcgaggcaggctgcttcatgcgtgaaaccaatcgtttcttcggcccggcacatgcaagcagccatgggcgagaaagaataggaccgccgccgccgctttgtccctccgttcacaaccttgtcgcacgagtctcttattcgcaactggacctgttttgtttaacaaatttaaatatcctgcatggagatagtggaaagggtattatgcagactttggaaagggaaggcgttatcagtgatctattattcagttgttagcttggctctttgggcatgtaagctgaatgtacgggatttttggtacccttgaacaagttgactcctgctgttttttgtcgaacagtggtgcttcttgatctgtaaaccatgttaacttcatctttatgcaatattgtggactaggactagcccctttaactcttcaaataaaaggtctacttgtgatctaatgttgctatactcaagtgatttgttattgccgtgtactcctgtgatttgctgaaagttttagttgtgttcaaactcatgttgtcacttcattcataaaaagatcaaagcagtggtaacttcaccaaaatgagaaatagtgatcaaaccaaagtgagtgcagccttccaaacacagagttcagcactgacatatgcagtccaagccagtggcggacccagaaagtttcaaaagcctgggcaaagattacaaaagctgaggcttgcccaattgttatgtatcctgaaacgtattttactcctaaattatgtatacatgtctataacttacaacacgggagcctgggcagccgcccggggtcgccgggcggtgagtcggccactggtccaagccacaacctagacaaccaatcaccagcacaatgcagcctggctcagcaatactagcaaaccaaacatgattgcctgcattcacacaagctggccacgcttggcctggttctactccccagccacactcaaccaatcaggcccattctgaatgagccagtgctgcttctcttccccacgacacatgaataataaactcgtgaaacatgttttagtcgtccgatccatcttctggtgcatcttgactgttcatattaacaccttaccccatacttcggacttcggagtccccttaggttttggccataactacatcacacatcacaccacatgagccggaaagtcattgaaaccctcttattaaaaaaaactgaagcaatgttgccaccaccgccatgccattgccgccacagccagtccgtcgctcttgccctatcctgttagccgtcaacgacacctgtggtgtgacgaggatgacatcaacatgtgcggcaagggtaccgtctctgcggtgggcgccacaacgtggctgggtgggttcgtgggtttcagtacgcccagcgaaatgcaggacatcgggaggacatgccgttgtgtgcgctgctgttagcttcagaccatgcattgacattcacaagggaaaagttaaacagattgttggctctactcttcgggatttagcaaatgatagcatggaacttgtgacaaactttgaatcagacaaatctcctgcagaatttgctaaattttataaagcagatgaacttctaggaggacatgttataatgcttggcgcaaatccttcaagccaggctgctgcactggaggcactacgtgcatatcctggtggtttgcaagttggaggtgggataaatttggagaatgcaatgtcttaccttaatgaaggggccagtcatgtgatagtgacctcttatgtgtttagtgatggcaagatgaacactgaaaggttaagaaaacttgtcgagctggttgggaaacagaggctcgtgctggacctcagttgtcgaaaaaaggtggcaaaagttcagtgatgtgtttgtggatgaaccaacattagaatatctcgctgcctttgcagatgagtttttggttcatggtgttgatgtggagggcaaaaggttaggaattgatgaggaacttgtggaactattggggcactattcaccaatcccagtcacttatgctgggggtgtgtcaacaatggacgacctagagaggataaagaaagcaggcaaaagtcgggtagatgtaacaattgggagtgctctagatatatttggaggagatttgccttacaaagatgttgtcctttggcacaggaagcaaagtatggttggtcaagtgtgaagaaacacaaggtattgatcagtattaccagttcatttgattcaagcttctgcacaaagtatattttctgaacatttttgttcaaataattcagttaggctatctccaacagatcctctatctcatctcctatttcaaactattttgcgtcccctattttacactacactggagacagtcttcagtgatgtaattcaaatctgaggagcatgacttgtttgggtttggacaccagggttggcgctaactcaaaaggtggtcaatttgtgagtaatgtactgttcttgacagtttctgacctcgatttgtctattgtaactgaataggctgaattgatgctgatagatacattttgcctgctacaacactgacattctgatttttaagttcctcgtttgagaaaataataatattgatgcaaattttggctct

SEQ ID NO: 59551 - DNA, 2503 bp, Zea Mays
gtccaacgcagccaggatgcgacaatgcgaggcaggctgcttcatgcgtgaaaccaatcgtttcttcggcccggcacatgcaagcagccatgggcgagaaagaataggaccgccgccgccgctttgtccctccgttcacaaccttgtcgcacgagtctcttattcgcaactggacctgttttgtttaacaaatttaaatatcctgcatggagatagtggaaagggtattatgcagactttggaaagggaaggcgttatcagtgatctattattcagttgttagcttggctctttgggcatgtaagctgaatgtacgggatttttggtacccttgaacaagttgactcctgctgttttttgtcgaacagtggtgcttcttgatctgtaaaccatgttaacttcatctttatgcaatattgtggactaggactagcccctttaactcttcaaataaaaggtctacttgtgatctaatgttgctatactcaagtgatttgttattgccgtgtactcctgtgatttgctgaaagttttagttgtgttcaaactcatgttgtcacttcattcataaaaagatcaaagcagtggtaacttcaccaaaatgagaaatagtgatcaaaccaaagtgagtgcagccttccaaacacagagttcagcactgacatatgcagtccaagccagtggcggacccagaaagtttcaaaagcctgggcaaagattacaaaagctgaggcttgcccaattgttatgtatcctgaaacgtattttactcctaaattatgtatacatgtctataacttacaacacgggagcctgggcagccgcccggggtcgccgggcggtgagtcggccactggtccaagccacaacctagacaaccaatcaccagcacaatgcagcctggctcagcaatactagcaaaccaaacatgattgcctgcattcacacaagctggccacgcttggcctggttctactccccagccacactcaaccaatcaggcccattctgaatgagccagtgctgcttctcttccccacgacacatgaataataaactcgtgaaacatgttttagtcgtccgatccatcttctggtgcatcttgactgttcatattaacaccttaccccatacttcggacttcggagtccccttaggttttggccataactacatcacacatcacaccacatgagccggaaagtcattgaaaccctcttattaaaaaaaactgaagcaatgttgccaccaccgccatgccattgccgccacagccagtccgtcgctcttgccctatcctgttagccgtcaacgacacctgtggtgtgacgaggatgacatcaacatgtgcggcaagggtaccgtctctgcggtgggcgccacaacgtggctgggtgggttcgtgggtttcagtacgcccagcgaaatgcaggacatcgggaggacatgccgttgtgtgcgctgctgttagcttcagaccatgcattgacattcacaagggaaaagttaaacagattgttggctctactcttcgggatttagcaaatgatagcatggaacttgtgacaaactttgaatcagacaaatctcctgcagaatttgctaaattttataaagcagatgaacttctaggaggacatgttataatgcttggcgcaaatccttcaagccaggctgctgcactggaggcactacgtgcatatcctgtatgtgtttagtgatggcaagatgaacactgaaaggttaagaaaacttgtcgagctggttgggaaacagaggctcgtgctggacctcagttgtcgaaaaaaggatggccgatataccattgtaactgacaggtggcaaaagttcagtgatgtgtttgtggatgaaccaacattagaatatctcgctgcctttgcagatgagtttttggttcatggtgttgatgtggagggcaaaaggttaggaattgatgaggaacttgtggaactattggggcactattcaccaatcccagtcacttatgctgggggtgtgtcaacaatggacgacctagagaggataaagaaagcaggcaaaagtcgggtagatgtaacaattgggagtgctctagatatatttggaggagatttgccttacaaagatgttgtcctttggcacaggaagcaaagtatggttggtcaagtgtgaagaaacacaagatcctctatctcatctcctatttcaaactattttgcgtcccctattttacactacactggagacagtcttcagtgatgtaattcaaatctgaggagcatgacttgtttgggtttggacaccagggttggcgctaactcaaaaggtggtcaatttgtgagtaatgtactgttcttgacagtttctgacctcgatttgtctattgtaactgaataggctgaattgatgctgatagatacattttgcctgctacaacactgacattctgatttttaagttcctcgtttgagaaaataataatattgatgcaaattttggctct

SEQ ID NO: 59552 - DNA, 2772 bp, Zea Mays
gtccaacgcagccaggatgcgacaatgcgaggcaggctgcttcatgcgtgaaaccaatcgtttcttcggcccggcacatgcaagcagccatgggcgagaaagaataggaccgccgccgccgctttgtccctccgttcacaaccttgtcgcacgagtctcttattcggtgagttcttcgcttctcctctcctctcttctctcgctcccccctcccctctctctatcacacacacagttccctctctatggtcagtcccatccggtcctctttctgggcttcaaatctctctttgttgttgcaatcggtattcgatttgctgctggattgcaaccgttgtttggaaaaaaaaacaaatattccccccaaatccatttccttcactgtgtattattttgcaccaaactgtaaatttgtcatctttctctttgtcaaatatgcattataggcttggatttgatctgttgcagcaactggacctgttttgtttaacaaatttaaatatcctgcatggagatagtggaaagggtattatgcagactttggaaagggaaggcgttatcagtgatctattattcagttgttagcttggctctttgggcatgtaagctgaatgtacgggatttttggtacccttgaacaagttgactcctgctgttttttgtcgaacagtggtgcttcttgatctgtaaaccatgttaacttcatctttatgcaatattgtggactaggactagcccctttaactcttcaaataaaaggtctacttgtgatctaatgttgctatactcaagtgatttgttattgccgtgtactcctgtgatttgctgaaagttttagttgtgttcaaactcatgttgtcacttcattcataaaaagatcaaagcagtggtaacttcaccaaaatgagaaatagtgatcaaaccaaagtgagtgcagccttccaaacacagagttcagcactgacatatgcagtccaagccagtggcggacccagaaagtttcaaaagcctgggcaaagattacaaaagctgaggcttgcccaattgttatgtatcctgaaacgtattttactcctaaattatgtatacatgtctataacttacaacacgggagcctgggcagccgcccggggtcgccgggcggtgagtcggccactggtccaagccacaacctagacaaccaatcaccagcacaatgcagcctggctcagcaatactagcaaaccaaacatgattgcctgcattcacacaagctggccacgcttggcctggttctactccccagccacactcaaccaatcaggcccattctgaatgagccagtgctgcttctcttccccacgacacatgaataataaactcgtgaaacatgttttagtcgtccgatccatcttctggtgcatcttgactgttcatattaacaccttaccccatacttcggacttcggagtccccttaggttttggccataactacatcacacatcacaccacatgagccggaaagtcattgaaaccctcttattaaaaaaaactgaagcaatgttgccaccaccgccatgccattgccgccacagccagtccgtcgctcttgccctatcctgttagccgtcaacgacacctgtggtgtgacgaggatgacatcaacatgtgcggcaagggtaccgtctctgcggtgggcgccacaacgtggctgggtgggttcgtgggtttcagtacgcccagcgaaatgcaggacatcgggaggacatgccgttgtgtgcgctgctgttagcttcagaccatgcattgacattcacaagggaaaagttaaacagattgttggctctactcttcgggatttagcaaatgatagcatggaacttgtgacaaactttgaatcagacaaatctcctgcagaatttgctaaattttataaagcagatgaacttctaggaggacatgttataatgcttggcgcaaatccttcaagccaggctgctgcactggaggcactacgtgcatatcctgtatgtgtttagtgatggcaagatgaacactgaaaggttaagaaaacttgtcgagctggttgggaaacagaggctcgtgctggacctcagttgtcgaaaaaaggttaggaattgatgaggaacttgtggaactattggggcactattcaccaatcccagtcacttatgctgggggtgtgtcaacaatggacgacctagagaggataaagaaagcaggcaaaagtcgggtagatgtaacaattgggagtgctctagatatatttggaggagatttgccttacaaagatgttgtcctttggcacaggaagcaaagtatggttggtcaagtgtgaagaaacacaaggtattgatcagtattaccagttcatttgattcaagcttctgcacaaagtatattttctgaacatttttgttcaaataattcagttaggctatctccaacagatcctctatctcatctcctatttcaaactattttgcgtcccctattttacactacactggagacagtcttcagtgatgtaattcaaatctgaggagcatgacttgtttgggtttggacaccagggttggcgctaactcaaaaggtggtcaatttgtgagtaatgtactgttcttgacagtttctgacctcgatttgtctattgtaactgaataggctgaattgatgctgatagatacattttgcctgctacaacactgacattctgatttttaagttcctcgtttgagaaaataataatattgatgcaaattttggctct

SEQ ID NO: 59553 - DNA, 1481 bp, Zea Mays
gtccaacgcagccaggatgcgacaatgcgaggcaggctgcttcatgcgtgaaaccaatcgtttcttcggcccggcacatgcaagcagccatgggcgagaaagaataggaccgccgccgccgctttgtccctccgttcacaaccttgtcgcacgagtctcttattcgccagtccgtcgctcttgccctatcctgttagccgtcaacgacacctgtggtgtgacgaggatgacatcaacatgtgcggcaagggtaccgtctctgcggtgggcgccacaacgtggctgggtgggttcgtgggtttcagtacgcccagcgaaatgcaggacatcgggaggacatgccgttgtgtgcgctgctgttagcttcagaccatgcattgacattcacaagggaaaagttaaacagattgttggctctactcttcgggatttagcaaatgatagcatggaacttgtgacaaactttgaatcagacaaatctcctgcagaatttgctaaattttataaagcagatgaacttctaggaggacatgttataatgcttggcgcaaatccttcaagccaggctgctgcactggaggcactacgtgcatatcctggtggtttgcaagttggaggtgggataaatttggagaatgcaatgtcttaccttaatgaaggggccagtcatgtgatagtgacctcttatgtgtttagtgatggcaagatgaacactgaaaggttaagaaaacttgtcgagctggttgggaaacagaggctcgtgctggacctcagttgtcgaaaaaaggatggccgatataccattgtaactgacaggtggcaaaagttcagtgatgtgtttgtggatgaaccaacattagaatatctcgctgcctttgcagatgagtttttggttcatggtgttgatgtggagggcaaaaggttaggaattgatgaggaacttgtggaactattggggcactattcaccaatcccagtcacttatgctgggggtgtgtcaacaatggacgacctagagaggataaagaaagcaggcaaaagtcgggtagatgtaacaattgggagtgctctagatatatttggaggagatttgccttacaaagatgttgtcctttggcacaggaagcaaagtatggttggtcaagtgtgaagaaacacaagatcctctatctcatctcctatttcaaactattttgcgtcccctattttacactacactggagacagtcttcagtgatgtaattcaaatctgaggagcatgacttgtttgggtttggacaccagggttggcgctaactcaaaaggtggtcaatttgtgagtaatgtactgttcttgacagtttctgacctcgatttgtctattgtaactgaataggctgaattgatgctgatagatacattttgcctgctacaacactgacattctgatttttaagttcctcgtttgagaaaataataatattgatgcaaattttggctct

SEQ ID NO: 59554 - DNA, 1475 bp, Zea Mays
gtccaacgcagccaggatgcgacaatgcgaggcaggctgcttcatgcgtgaaaccaatcgtttcttcggcccggcacatgcaagcagccatgggcgagaaagaataggaccgccgccgccgctttgtccctccgttcacaaccttgtcgcacgagtctcttattcggttttggccataactacatcacacatcacaccacatgagccggaaagtcattgaaaccctcttattaaaaaaaactgaagcaatgttgccaccaccgccatgccattgccgccacagccagtccgtcgctcttgccctatcctgttagccgtcaacgacacctgtggtgtgacgaggatgacatcaacatgtgcggcaagggtaccgtctctgcggtgggcgccacaacgtggctgggtgggttcgtgggtttcagtacgcccagcgaaatgcaggacatcgggaggacatgccgttgtgtgcgctgctgttagcttcagaccatgcattgacattcacaagggaaaagttaaacagattgttggctctactcttcgggatttagcaaatgatagcatggaacttgtgacaaactttgaatcagacaaatctcctgcagaatttgctaaattttataaagcagatgaacttctaggaggacatgttataatgcttggcgcaaatccttcaagccaggctgctgcactggaggcactacgtgcatatcctggtggtttgcaagttggaggtgggataaatttggagaatgcaatgtcttaccttaatgaaggggccagtcatgtgatagtgacctcttatgtgtttagtgatggcaagatgaacactgaaaggttaagaaaacttgtcgagctggttgggaaacagaggctcgtgctggacctcagttgtcgaaaaaaggatggccgatataccattgtaactgacaggtggcaaaagttcagtgatgtgtttgtggatgaaccaacattagaatatctcgctgcctttgcagatgagtttttggttcatggtgttgatgtggagggcaaaaggttaggaattgatgaggaacttgtggaactattggggcactattcaccaatcccagtcacttatgctgggggtgtgtcaacaatggacgacctagagaggataaagaaagcaggcaaaagtcgggtagatgtaacaattgggagtgctctagatatatttggaggagatttgccttacaaagatgttgtcctttggcacaggaagcaaagtatggttggtcaagtgtgaagaaacacaagggttggcgctaactcaaaaggtggtcaatttgtgagtaatgtactgttcttgacagtttctgacctcgatttgtctattgtaactgaataggctgaattgatgctgatagatacattttgcctgctacaacactgacattctgatttttaagttcctcgtttgagaaaataataatattgatgcaaattttggctct

SEQ ID NO: 59555 - DNA, 1395 bp, Zea Mays
gtccaacgcagccaggatgcgacaatgcgaggcaggctgcttcatgcgtgaaaccaatcgtttcttcggcccggcacatgcaagcagccatgggcgagaaagaataggaccgccgccgccgctttgtccctccgttcacaaccttgtcgcacgagtctcttattcgcaatgttgccaccaccgccatgccattgccgccacagccagtccgtcgctcttgccctatcctgttagccgtcaacgacacctgtggtgtgacgaggatgacatcaacatgtgcggcaagggtaccgtctctgcggtgggcgccacaacgtggctgggtgggttcgtgggtttcagtacgcccagcgaaatgcaggacatcgggaggacatgccgttgtgtgcgctgctgttagcttcagaccatgcattgacattcacaagggaaaagttaaacagattgttggctctactcttcgggatttagcaaatgatagcatggaacttgtgacaaactttgaatcagacaaatctcctgcagaatttgctaaattttataaagcagatgaacttctaggaggacatgttataatgcttggcgcaaatccttcaagccaggctgctgcactggaggcactacgtgcatatcctggtggtttgcaagttggaggtgggataaatttggagaatgcaatgtcttaccttaatgaaggggccagtcatgtgatagtgacctcttatgtgtttagtgatggcaagatgaacactgaaaggttaagaaaacttgtcgagctggttgggaaacagaggctcgtgctggacctcagttgtcgaaaaaaggatggccgatataccattgtaactgacaggtggcaaaagttcagtgatgtgtttgtggatgaaccaacattagaatatctcgctgcctttgcagatgagtttttggttcatggtgttgatgtggagggcaaaaggttaggaattgatgaggaacttgtggaactattggggcactattcaccaatcccagtcacttatgctgggggtgtgtcaacaatggacgacctagagaggataaagaaagcaggcaaaagtcgggtagatgtaacaattgggagtgctctagatatatttggaggagatttgccttacaaagatgttgtcctttggcacaggaagcaaagtatggttggtcaagtgtgaagaaacacaagggttggcgctaactcaaaaggtggtcaatttgtgagtaatgtactgttcttgacagtttctgacctcgatttgtctattgtaactgaataggctgaattgatgctgatagatacattttgcctgctacaacactgacattctgatttttaagttcctcgtttgagaaaataataatattgatgcaaattttggctct

SEQ ID NO: 59556 - DNA, 1400 bp, Zea Mays
gtccaacgcagccaggatgcgacaatgcgaggcaggctgcttcatgcgtgaaaccaatcgtttcttcggcccggcacatgcaagcagccatgggcgagaaagaataggaccgccgccgccgctttgtccctccgttcacaaccttgtcgcacgagtctcttattcgtgacgaggatgacatcaacatgtgcggcaagggtaccgtctctgcggtgggcgccacaacgtggctgggtgggttcgtgggtttcagtacgcccagcgaaatgcaggacatcgggaggacatgccgttgtgtgcgctgctgttagcttcagaccatgcattgacattcacaagggaaaagttaaacagattgttggctctactcttcgggatttagcaaatgatagcatggaacttgtgacaaactttgaatcagacaaatctcctgcagaatttgctaaattttataaagcagatgaacttctaggaggacatgttataatgcttggcgcaaatccttcaagccaggctgctgcactggaggcactacgtgcatatcctggtggtttgcaagttggaggtgggataaatttggagaatgcaatgtcttaccttaatgaaggggccagtcatgtgatagtgacctcttatgtgtttagtgatggcaagatgaacactgaaaggttaagaaaacttgtcgagctggttgggaaacagaggctcgtgctggacctcagttgtcgaaaaaaggtggcaaaagttcagtgatgtgtttgtggatgaaccaacattagaatatctcgctgcctttgcagatgagtttttggttcatggtgttgatgtggagggcaaaaggttaggaattgatgaggaacttgtggaactattggggcactattcaccaatcccagtcacttatgctgggggtgtgtcaacaatggacgacctagagaggataaagaaagcaggcaaaagtcgggtagatgtaacaattgggagtgctctagatatatttggaggagatttgccttacaaagatgttgtcctttggcacaggaagcaaagtatggttggtcaagtgtgaagaaacacaagatcctctatctcatctcctatttcaaactattttgcgtcccctattttacactacactggagacagtcttcagtgatgtaattcaaatctgaggagcatgacttgtttgggtttggacaccagggttggcgctaactcaaaaggtggtcaatttgtgagtaatgtactgttcttgacagtttctgacctcgatttgtctattgtaactgaataggctgaattgatgctgatagatacattttgcctgctacaacactgacattctgatttttaagttcctcgtttgagaaaataataatattgatgcaaattttggctct

SEQ ID NO: 59557 - DNA, 1452 bp, Zea Mays
gtccaacgcagccaggatgcgacaatgcgaggcaggctgcttcatgcgtgaaaccaatcgtttcttcggcccggcacatgcaagcagccatgggcgagaaagaataggaccgccgccgccgctttgtccctccgttcacaaccttgtcgcacgagtctcttattcgcaatgttgccaccaccgccatgccattgccgccacagccagtccgtcgctcttgccctatcctgttagccgtcaacgacacctgtggtgtgacgaggatgacatcaacatgtgcggcaagggtaccgtctctgcggtgggcgccacaacgtggctgggtgggttcgtgggtttcagtacgcccagcgaaatgcaggacatcgggaggacatgccgttgtgtgcgctgctgttagcttcagaccatgcattgacattcacaagggaaaagttaaacagattgttggctctactcttcgggatttagcaaatgatagcatggaacttgtgacaaactttgaatcagacaaatctcctgcagaatttgctaaattttataaagcagatgaacttctaggaggacatgttataatgcttggcgcaaatccttcaagccaggctgctgcactggaggcactacgtgcatatcctggtggtttgcaagttggaggtgggataaatttggagaatgcaatgtcttaccttaatgaaggggccagtcatgtgatagtgacctcttatgtgtttagtgatggcaagatgaacactgaaaggttaagaaaacttgtcgagctggttgggaaacagaggctcgtgctggacctcagttgtcgaaaaaaggatggccgatataccattgtaactgacaggtggcaaaagttcagtgatgtgtttgtggatgaaccaacattagaatatctcgctgcctttgcagatgagtttttggttcatggtgttgatgtggagggcaaaaggttaggaattgatgaggaacttgtggaactattggggcactattcaccaatcccagtcacttatgctgggggtgtgtcaacaatggacgacctagagaggataaagaaagcaggcaaaagtcgggtagatgtaacaattgggagtgctctagatatatttggaggagatttgccttacaaagatgttgtcctttggcacaggaagcaaagtatggttggtcaagtgtgaagaaacacaagtcttcagtgatgtaattcaaatctgaggagcatgacttgtttgggtttggacaccagggttggcgctaactcaaaaggtggtcaatttgtgagtaatgtactgttcttgacagtttctgacctcgatttgtctattgtaactgaataggctgaattgatgctgatagatacattttgcctgctacaacactgacattctgatttttaagttcctcgtttgagaaaataataatattgatgcaaattttggctct

SEQ ID NO: 59558 - DNA, 2589 bp, Zea Mays
gtccaacgcagccaggatgcgacaatgcgaggcaggctgcttcatgcgtgaaaccaatcgtttcttcggcccggcacatgcaagcagccatgggcgagaaagaataggaccgccgccgccgctttgtccctccgttcacaaccttgtcgcacgagtctcttattcgcaactggacctgttttgtttaacaaatttaaatatcctgcatggagatagtggaaagggtattatgcagactttggaaagggaaggcgttatcagtgatctattattcagttgttagcttggctctttgggcatgtaagctgaatgtacgggatttttggtacccttgaacaagttgactcctgctgttttttgtcgaacagtggtgcttcttgatctgtaaaccatgttaacttcatctttatgcaatattgtggactaggactagcccctttaactcttcaaataaaaggtctacttgtgatctaatgttgctatactcaagtgatttgttattgccgtgtactcctgtgatttgctgaaagttttagttgtgttcaaactcatgttgtcacttcattcataaaaagatcaaagcagtggtaacttcaccaaaatgagaaatagtgatcaaaccaaagtgagtgcagccttccaaacacagagttcagcactgacatatgcagtccaagccagtggcggacccagaaagtttcaaaagcctgggcaaagattacaaaagctgaggcttgcccaattgttatgtatcctgaaacgtattttactcctaaattatgtatacatgtctataacttacaacacgggagcctgggcagccgcccggggtcgccgggcggtgagtcggccactggtccaagccacaacctagacaaccaatcaccagcacaatgcagcctggctcagcaatactagcaaaccaaacatgattgcctgcattcacacaagctggccacgcttggcctggttctactccccagccacactcaaccaatcaggcccattctgaatgagccagtgctgcttctcttccccacgacacatgaataataaactcgtgaaacatgttttagtcgtccgatccatcttctggtgcatcttgactgttcatattaacaccttaccccatacttcggacttcggagtccccttaggttttggccataactacatcacacatcacaccacatgagccggaaagtcattgaaaccctcttattaaaaaaaactgaagcaatgttgccaccaccgccatgccattgccgccacagccagtccgtcgctcttgccctatcctgttagccgtcaacgacacctgtggtgtgacgaggatgacatcaacatgtgcggcaagggtaccgtctctgcggtgggcgccacaacgtggctgggtgggttcgtgggtttcagtacgcccagcgaaatgcaggacatcgggaggacatgccgttgtgtgcgctgctgttagcttcagaccatgcattgacattcacaagggaaaagttaaacagattgttggctctactcttcgggatttagcaaatgatagcatggaacttgtgacaaactttgaatcagacaaatctcctgcagaatttgctaaattttataaagcagatgaacttctaggaggacatgttataatgcttggcgcaaatccttcaagccaggctgctgcactggaggcactacgtgcatatcctggtggtttgcaagttggaggtgggataaatttggagaatgcaatgtcttaccttaatgaaggggccagtcatgtgatagtgacctcttatgtgtttagtgatggcaagatgaacactgaaaggttaagaaaacttgtcgagctggttgggaaacagaggctcgtgctggacctcagttgtcgaaaaaaggatggccgatataccattgtaactgacaggtggcaaaagttcagtgatgtgtttgtggatgaaccaacattagaatatctcgctgcctttgcagatgagtttttggttcatggtgttgatgtggagggcaaaaggttaggaattgatgaggaacttgtggaactattggggcactattcaccaatcccagtcacttatgctgggggtgtgtcaacaatggacgacctagagaggataaagaaagcaggcaaaagtcgggtagatgtaacaattgggagtgctctagatatatttggaggagatttgccttacaaagatgttgtcctttggcacaggaagcaaagtatggttggtcaagtgtgaagaaacacaagatcctctatctcatctcctatttcaaactattttgcgtcccctattttacactacactggagacagtcttcagtgatgtaattcaaatctgaggagcatgacttgtttgggtttggacaccagggttggcgctaactcaaaaggtggtcaatttgtgagtaatgtactgttcttgacagtttctgacctcgatttgtctattgtaactgaataggctgaattgatgctgatagatacattttgcctgctacaacactgacattctgatttttaagttcctcgtttgagaaaataataatattgatgcaaattttggctct

SEQ ID NO: 59559 - DNA, 2427 bp, Zea Mays
accgttgtttggaaaaaaaaacaaatattccccccaaatccatttccttcactgtgtattattttgcaccaaactgtaaatttgtcatctttctctttgtcaaatatgcattataggcttggatttgatctgttgcagcaactggacctgttttgtttaacaaatttaaatatcctgcatggagatagtggaaagggtattatgcagactttggaaagggaaggcgttatcagtgatctattattcagttgttagcttggctctttgggcatgtaagctgaatgtacgggatttttggtacccttgaacaagttgactcctgctgttttttgtcgaacagtggtgcttcttgatctgtaaaccatgttaacttcatctttatgcaatattgtggactaggactagcccctttaactcttcaaataaaaggtctacttgtgatctaatgttgctatactcaagtgatttgttattgccgtgtactcctgtgatttgctgaaagttttagttgtgttcaaactcatgttgtcacttcattcataaaaagatcaaagcagtggtaacttcaccaaaatgagaaatagtgatcaaaccaaagtgagtgcagccttccaaacacagagttcagcactgacatatgcagtccaagccagtggcggacccagaaagtttcaaaagcctgggcaaagattacaaaagctgaggcttgcccaattgttatgtatcctgaaacgtattttactcctaaattatgtatacatgtctataacttacaacacgggagcctgggcagccgcccggggtcgccgggcggtgagtcggccactggtccaagccacaacctagacaaccaatcaccagcacaatgcagcctggctcagcaatactagcaaaccaaacatgattgcctgcattcacacaagctggccacgcttggcctggttctactccccagccacactcaaccaatcaggcccattctgaatgagccagtgctgcttctcttccccacgacacatgaataataaactcgtgaaacatgttttagtcgtccgatccatcttctggtgcatcttgactgttcatattaacaccttaccccatacttcggacttcggagtccccttaggttttggccataactacatcacacatcacaccacatgagccggaaagtcattgaaaccctcttattaaaaaaaactgaagcaatgttgccaccaccgccatgccattgccgccacagccagtccgtcgctcttgccctatcctgttagccgtcaacgacacctgtggtgtgacgaggatgacatcaacatgtgcggcaagggtaccgtctctgcggtgggcgccacaacgtggctgggtgggttcgtgggtttcagtacgcccagcgaaatgcaggacatcgggaggacatgccgttgtgtgcgctgctgttagcttcagaccatgcattgacattcacaagggaaaagttaaacagattgttggctctactcttcgggatttagcaaatgatagcatggaacttgtgacaaactttgaatcagacaaatctcctgcagaatttgctaaattttataaagcagatgaacttctaggaggacatgttataatgcttggcgcaaatccttcaagccaggctgctgcactggaggcactacgtgcatatcctggtggtttgcaagttggaggtgggataaatttggagaatgcaatgtcttaccttaatgaaggggccagtcatgtgatagtgacctcttatgtgtttagtgatggcaagatgaacactgaaaggttaagaaaacttgtcgagctggttgggaaacagaggctcgtgctggacctcagttgtcgaaaaaaggttaggaattgatgaggaacttgtggaactattggggcactattcaccaatcccagtcacttatgctgggggtgtgtcaacaatggacgacctagagaggataaagaaagcaggcaaaagtcgggtagatgtaacaattgggagtgctctagatatatttggaggagatttgccttacaaagatgttgtcctttggcacaggaagcaaagtatggttggtcaagtgtgaagaaacacaagatcctctatctcatctcctatttcaaactattttgcgtcccctattttacactacactggagacagtcttcagtgatgtaattcaaatctgaggagcatgacttgtttgggtttggacaccagggttggcgctaactcaaaaggtggtcaatttgtgagtaatgtactgttcttgacagtttctgacctcgatttgtctattgtaactgaataggctgaattgatgctgatagatacattttgcctgctacaacactgacattctgatttttaagttcctcgtttgagaaaataataatattgatgcaaattttggctct

SEQ ID NO: 59560 - DNA, 461 bp, Zea Mays
tgcagctatgttccttgttatcaagttaggaattgatgaggaacttgtggaactattggggcactattcaccaatcccagtcacttatgctgggggtgtgtcaacaatggacgacctagagaggataaagaaagcaggcaaaagtcgggtagatgtaacaattgggagtgctctagatatatttggaggagatttgccttacaaagatgttgtcctttggcacaggaagcaaagtatggttggtcaagtgtgaagaaacacaagggttggcgctaactcaaaaggtggtcaatttgtgagtaatgtactgttcttgacagtttctgacctcgatttgtctattgtaactgaataggctgaattgatgctgatagatacattttgcctgctacaacactgacattctgatttttaagttcctcgtttgagaaaataataatattgatgcaaattttggctct

SEQ ID NO: 59561 - DNA, 1822 bp, Zea Mays
aaagctcaaaagttaccaacaaaaggaggcacccattttaatcattaatggcctccccctccgacaccccagactcaaatcaaatctgccttgtctctgctgccccagccccaactctgctccaaagcttcaagcatcagcaaccccctccaccacctcttcctcctcggtcctcacctggagttgtagcaagcagcaccacatcatatcacagcagagcagagagtggggtgaagcagggagctgggcaggagagccccaacggcctgtcctgccgcggccatgcgtttctctgcgctgctcctcatcgtggcgctgctctgcctcggcggcggcggtggcggccgcgtgacggcgtccaccgaattcaacttcccggcggtgttcaacttcggggactccaactccgacaccggcgggcgcgtggccgccggcttcgagtccatcttcccgccctacggctccagcttcttcggcgggcccgccggccgcttctgcgacggccgcctcgtcatcgacttcctcatggaggcaatggatatgccactcctcaacgcgtacctggattctctaggcacgccaagctttcggaccggcgttaattttgctcaagctggatgttcgatcacaccagcaaagccgacatcagtcagcccattctcatttggtctccagatcaagcagttcttcgccttcaagaacaaagtcactaagctcctgtctgaaggagatatgcacagccgatacattcctcagcaagattacttctcagagggactctacacgttcgatattgggcagaatgaccttgctgagcttcctatgcctctttccccaaagctgactaattggtgtacagggatcctactctgatgtaaataaactgtatgaccaaggtgctaggaagttctggattcacaacacgggccccctcggttgcttgcctcaaaacattgccctcttcggcaaagacccatcccaactggacgagctccactgtgtggcgaagcacaaccgtgccgcaaagcttttcaacttacagctgcacgcactttgcacgaagctgagggcagaattcgatggagccagcatcacttacgtggacatccacacgatcaaatacagcctgatcgccaactactctcgatacgggttcgagcacgccactcaggcgtgctgtggatacggaggcccacccctgaactacgatggtaacgtaccatgtggacacacggtgtctctggatggtaagatggtcaccgcaaaagggtgcagcgacactactgaattcgtcaactgggatgggatacattacacggaagctgcgaatttccatatcgcctcgcagatcctgaccgggaagtattctgatcctccgttcgtggataagatgccgttcgtcataaaacctagattctgattggcatacaattttccctctttactcacccactttacagcaccggttgcagatacgatgtatacttattacttgccaataaccatatatagcttgagtaaaaaaatcatatatacggcttggtttcagttgtccaaaaggttcagcttttttttttctaacggtcttttctaagaatctgattatgtagagaatttggttgtaagtgagtatataggatttagaatctgaaagtaaagtgtggatttctcttattgcggcaactcaattggttgtgggttcacattgattttaaacattttcaccaaatcgatttttatataaaatggctgaaaagttggacgtttgacagcctgtggtagcttatggtggctaaaatcagtaaaaaaaagatgaaacaaa

SEQ ID NO: 59562 - DNA, 1420 bp, Zea Mays
ctccgacaccccagactcaaatcaaatctgccttgtctctgctgccccagccccaactctgctccaaagcttcaagcatcagcaaccccctccaccacctcttcctcctcggtcctcacctggagttgtagcaagcagcaccacatcatatcacagcagagcagagagtggggtgaagcagggagctgggcaggagagccccaacggcctgtcctgccgcggccatgcgtttctctgcgctgctcctcatcgtggcgctgctctgcctcggcggcggcggtggcggccgcgtgacggcgtccaccgaattcaacttcccggcggtgttcaacttcggggactccaactccgacaccggcgggcgcgtggccgccggcttcgagtccatcttcccgccctacggctccagcttcttcggcgggcccgccggccgcttctgcgacggccgcctcgtcatcgacttcctcatggaggcaatggatatgccactcctcaacgcgtacctggattctctaggcacgccaagctttcggaccggcgttaattttgctcaagctggatgttcgatcacaccagcaaagccgacatcagtcagcccattctcatttggtctccagatcaagcagttcttcgccttcaagaacaaagtcactaagctcctgtctgaaggagatatgcacagccgatacattcctcagcaagattacttctcagagggactctacacgttcgatattgggcagaatgaccttgctggtgagttctattcaagaacagaggaccaggtcatcgcatccattccaactattttgctggaatttgagaatggtctcaagaaactgtatgaccaaggtgctaggaagttctggattcacaacacgggccccctcggttgcttgcctcaaaacattacacggaagctgcgaatttccatatcgcctcgcagatcctgaccgggaagtattctgatcctccgttcgtggataagatgccgttcgtcataaaacctagattctgattggcatacaattttccctctttactcacccactttacagcaccggttgcagatacgatgtatacttattacttgccaataaccatatatagcttgagtaaaaaaatcatatatacggcttggtttcagttgtccaaaaggttcagcttttttttttctaacggtcttttctaagaatctgattatgtagagaatttggttgtaagtgagtatataggatttagaatctgaaagtaaagtgtggatttctcttattgcggcaactcaattggttgtgggttcacattgattttaaacattttcaccaaatcgatttttatataaaatggctgaaaagttggacgtttgacagcctgtggtagcttatggtggctaaaatcagtaaaaaaaagatgaaacaaa

SEQ ID NO: 59563 - DNA, 1162 bp, Zea Mays
cagactcaaatcaaatctgccttgtctctgctgccccagccccaactctgctccaaagcttcaagcatcagcaaccccctccaccacctcttcctcctcggtcctcacctggagttgtagcaagcagcaccacatcatatcacagcagagcagagagtggggtgaagcagggagctgggcaggagagccccaacggcctgtcctgccgcggccatgcgtttctctgcgctgctcctcatcgtggcgctgctctgcctcggcggcggcggtggcggccgcgtgacggcgtccaccgaattcaacttcccggcggtgttcaacttcggggactccaactccgacaccggcgggcgcgtggccgccggcttcgagtccatcttcccgccctacggctccagcttcttcggcgggcccgccggccgcttctgcgacggccgcctcgtcatcgacttcctcatggaggcaatggatatgccactcctcaacgcgtacctggattctctaggcacgccaagctttcggaccggcgttaattttgctcaagctggatgttcgatcacaccagcaaagccgacatcagtcagcccattctcatttggtctccagatcaagcagttcttcgccttcaagaacaaagtcactaagctcctgtctgaaggagatatgcacagccgatacattcctcagcaagattacttctcagagggactctacacgttcgatattgggcagaatgaccttgctggtgagttctattcaagaacagaggaccaggtcatcgcatccattccaactattttgctggaatttgagaatggtctcaagaaactgtatgaccaaggtgctaggaagttctggattcacaacacgggccccctcggttgcttgcctcaaaacattgccctcttcggcaaagacccatcccaactggacgagctccactgtgtggcgaagcacaaccgtgccgcaaagcttttcaacttacagctgcacgcactttgcacgaagctgagggcagaattcgatggagccagcatcacttacgtggacatccacacgatcaaatacagcctgatcgccaactactctcgatacgcgcattataatgaagcagcactatcaatccagaacaagtgcttgcaataataaacatgaaccccca

SEQ ID NO: 59564 - DNA, 1719 bp, Zea Mays
cagactcaaatcaaatctgccttgtctctgctgccccagccccaactctgctccaaagcttcaagcatcagcaaccccctccaccacctcttcctcctcggtcctcacctggagttgtagcaagcagcaccacatcatatcacagcagagcagagagtggggtgaagcagggagctgggcaggagagccccaacggcctgtcctgccgcggccatgcgtttctctgcgctgctcctcatcgtggcgctgctctgcctcggcggcggcggtggcggccgcgtgacggcgtccaccgaattcaacttcccggcggtgttcaacttcggggactccaactccgacaccggcgggcgcgtggccgccggcttcgagtccatcttcccgccctacggctccagcttcttcggcgggcccgccggccgcttctgcgacggccgcctcgtcatcgacttcctcagcacgccaagctttcggaccggcgttaattttgctcaagctggatgttcgatcacaccagcaaagccgacatcagtcagcccattctcatttggtctccagatcaagcagttcttcgccttcaagaacaaagtcactaagctcctgtctgaaggagatatgcacagccgatacattcctcagcaagattacttctcagagggactctacacgttcgatattgggcagaatgaccttgctggtgagttctattcaagaacagaggaccaggtcatcgcatccattccaactattttgctggaatttgagaatggtctcaagaaactgtatgaccaaggtgctaggaagttctggattcacaacacgggccccctcggttgcttgcctcaaaacattgccctcttcggcaaagacccatcccaactggacgagctccactgtgtggcgaagcacaaccgtgccgcaaagcttttcaacttacagctgcacgcactttgcacgaagctgagggcagaattcgatggagccagcatcacttacgtggacatccacacgatcaaatacagcctgatcgccaactactctcgatacgggttcgagcacgccactcaggcgtgctgtggatacggaggcccacccctgaactacgatggtaacgtaccatgtggacacacggtgtctctggatggtaagatggtcaccgcaaaagggtgcagcgacactactgaattcgtcaactgggatgggatacattacacggaagctgcgaatttccatatcgcctcgcagatcctgaccgggaagtattctgatcctccgttcgtggataagatgccgttcgtcataaaacctagattctgattggcatacaattttccctctttactcacccactttacagcaccggttgcagatacgatgtatacttattacttgccaataaccatatatagcttgagtaaaaaaatcatatatacggcttggtttcagttgtccaaaaggttcagcttttttttttctaacggtcttttctaagaatctgattatgtagagaatttggttgtaagtgagtatataggatttagaatctgaaagtaaagtgtggatttctcttattgcggcaactcaattggttgtgggttcacattgattttaaacattttcaccaaatcgatttttatataaaatggctgaaaagttggacgtttgacagcctgtggtagcttatggtggctaaaatcagtaaaaaaaagatgaaacaaa

SEQ ID NO: 59565 - DNA, 928 bp, Zea Mays
tttcgatcaagcacacaaatacaagcgggctacgccaaagctcctcgagcaaaaagacgccatagaaggagcaaaaagtccctgaaccggcacagcaggcgcctagcttggcgcgactccacatcaactcgatcgcatgcaaacgagcgagactgaattggagctcgcgcgctttcgctgcattgaagagccctcctcgtctgatcgggggaacaggcactcgatggagtacccctacggacagtggccggccggccgggcaccggaatccgatgccttctctttccatctgggccgcccgtgcaaagagctccttcgcccacgtaccagctagcaatggtgtgatggctgatgagccagcgcgcgcgagcacgtacacgggacgggactgctactagcaggtatagcagccgggtgctggtatcgcattcgcatcattcagctcatcatcatcatcatgcgtccagttgttgatgcatgactgccacgacgatgcgcagtaagggattggatagatgcaaaagcgaccgagagctccatatatgagtctggcgtagaaatgtcccagggaaaacgacgacatggaacagtccgagtgaccgcggccggcagatgaattctcgcttcccctgtacgacgtctcctggcgacacagctgggtggcaccggccggccattgcttcgctttcttcgtccttcatgtttttacttaccagtcagtaactgtattggtattagtcataggagacattgagattgttattgtcctcgacgatggatccatcgttattgaacagtacgtatgtagtaatgtagcgcatctctgctgcaggtcactctccatgtgtttggttgctgtagaagtcgaactaggccagcataagcctagccagtattggtagaaccagagtgagttcatgcaagcgtt

SEQ ID NO: 59566 - DNA, 4203 bp, Zea Mays
atgaccacaattgtttgcagtgttgacacgagtgggctcacacaatacatatgtcgcacgtcgatcccgtcctctaacaaccagagcacaggaccgcatttaccatgggggtataccgtgttcgatcaagaggctagttgtcggattgcatgctcctgagcatgttcaggatggagaggaacaggttcaggatgtcgaggtacagcccaaccgacgcccagatgtactcgtcgtaggtgtggcgcttgatcaggttctcggtgtcgtacaggatgaagcctgagaagaccagagcccctagcccaccgaacaagcccaccgacacgggtcccagtgggaagaaaacctgcagcgcagaattccacacagagccaaataaaggtttattgttgcaagcagtggatttgctcgtctggtaacaaagcagcatttgcggatgggcattacctgaagaaagctagttaggacgaggatagtaagcgcggaagacaggataggccccaggtacccgaattccttgcccttctttgacgcccagaaagcatacgcagtcagagaaaccaccacgccagccgtcagcactaaagcctccagaacgattttccctgcgataattaagtaaatggttgtcaagaccaaaaaaaaacaaattacaaggtatctagaagagaaacaaatcaaactatttgagaaaaaagaaagaccttgggtgttagcacaagccacaccgatgctgaagctcaagcacaacgtgaacagacccaggaaaacgaaattgtgtgggtgcttgtgctgataatgatacaatgggatcatcactgcagaaaatattagaaaagaagttagtgaacacaaaaaaaacagcctactaatactagaaaataacaagaacgggagtccctccgctcagattttaagcaaaagagaagggtatattttggtgtattacaacctaagaggatacaatgacactggacagcttcttattaacacaggaagataaatctattgctttcatagtttcattaataactgagactgtttcctccataatccacaggaagataaatctattgctttcattaacaaaacattctcctacgcctgtatacctggcaaacagcacaccaaaaattcaaaccccaaaaattggtcaacccatattactaaagtgcctacatttttcatttacttgacatcattgtcttttaactgttaattcttgattaactgccagagaaactaatatatttaaacacagattggtagcaaagtattttttattacatgtctactatgccacttctttgctacataaataaatactccaaacaattatcactggacacaaaaccaagatcagtgatcagtcaaagtcaaacgaacaatatcaagcaaacgaaaatggatgggagcatgtatacaactgattctcaagagctgtcccccctacctccctatcctaactccacaatcaacttctactctttatgtatgaacgacaaagagggtaagataatagggatagctccttgaaattgaaaaatgagacctaggtttcatgcctccttagcaagataccattattttctcgtattctcaaatgattcctcaacacaaatctcactatcagaaatgctgaatcagccttctttctaagccttcattgtgcaattatctcttatgatgtacatggattcttgtgtgggaaagtaactaaactcaggccaattacaacttaggagcgactcctattgctaattccaattcgacagagaagcaggtttcactgtcgataaataaaacagtataacaataacaaaacgttgagataaagcacagtactacatcacatatctcctgtccaagtttgacattagtatttcttcatcagcaacatgatcataatacaccagattatcagcaaaataacacacaactaaacttcctgttaacatgatacaacatgtgttaaatcacggcaacttgctgtcataatcatgtgaggccattatcatgttactaatgtgctgcaacatcattaatgggcagttgaaaatcaatcactcaatcacatagaatcaaactagaacaagagagaaaggaattaaggaactagtctgcaagtggcatcatcttaatactgtaatatgtttttcccgggtgaacagtttagctaaactaaggcccattagaggcaaccagctacaaactgctgcttctatcggaaagggaacctctgaatctccttataatattcagagtaacccttatactgggggacagggatctcgtcaacatgcaatatcaagagcataaataaagttgagataaagcttgggacaacgatgcttctctctcatttcaatttatattttcattgaatcatcagcaacatgaccatgatatcacaacacgttatcagcacgataacggcctcacatcgacttaccagtaagtggtaggtcaaacatgttagatggaggcagccactaggacgcctatgtgagaccattttcactttgtaacatgttgcaacgttagggctgggttgaaaaatggtcaagaaaaatattaaattggaacaagagaaatcggtaccaatccaacctcaattttgttgtgcaatttgcccattttaatgttgtgccacgggtttaactaaacaaaaactcatagggatgcaattggttccatatactgcttattcatgtacccactgaagttctccaacacctgacatcaaagagcctcattatacttctagtatcaaattcacaatatagctgagagacattttaggactaaaacacatttctcttctcccaatttaatatccattttatcattggtaatacaaccgcgagtccaacaacatgtcttcagcacaatagtgctcatgtaagcttgttggtaacatgatgcagaacatgttagaccaaggcaagttaccatgtagcctgaacgagatcatctactcataacgtgttgcaataccatgatagaattgccaaatatcagttgtacgcaatcatataaacattattaaactgacacaagagacaagtgcaaaataacatcctttagtgtccataaatacagtggcggacgcaggaccaaaattcatagagggccaagaagactgcatgacaaaatcaaataagaccgtaaaaaaactacttttgcattaaattcaggtttcatatcaatacaagatagaagtttaaagaagaaaactatatgaacaatcctttcatatttgatctattatcatattgttggctcatactatctattttaaggctaacagtttattttataaaatatcaaacaatccttatcctattgtattatttatattcagaaaactaaaaaatttggggccaaaaatttggatgccctgtgctattgcccatttatgctgcacagtagacgagcttgcaagtgccgtactgtcgtgacgacgataagcagggcggggcgccaggaagggggcatccgaacggactggcttgagaagcgtcagaatgaatgaggacggctggatacatgcaaggactaggttggggaggaggacgagatcggatggactagatagattcgacgataaggtcaagaacaggactgttttaactcacgcaaaactttttttttctatacttaacagtagatgtacattaggtataagagattatagataattgaggggggggggggggggcatggcctactttgcccccctacacctatggatcctcccctgcataaataatatgtgactaaattaaagtactagacctaggaagccaattgccccatacggaaccttagtttaggcaatatctatccagtagcaaagcaaaaacaatctgagcagatttcaggttcaacttggatcggctatatccaagatctatatggcaaagtcctgatccaaacagctattcatcataaataacgagaaaacctagtaggagcactgcatcgaccactctagaatctggatccaaccaactcacctaacttatcgacaatttgagtagtttcagcaacacatctccataatcaattgatgatgaccagaaaagagtagatttgcccacccagcacatcaaaccccgacaccggatggagaacacgggcgcttacggatgaagggcaggacggcgagcacgagcgcgaggcccggggagtcggagagcg

SEQ ID NO: 59567 - DNA, 405 bp, Zea Mays
ataactatgttcaaaaatttgttaaacaaacaatgattgcaactgttgtctggtgtaattgcaactgctggtctggtgtgattgcaacttctatataactatgtccaaaaatctgttaaacaaacaatgattgcaactgttgtgtggtgtgattgcaactgctttctagtgtaattgcaactgctggtctggtgtgattccaacttctatataactatgtccaaaaatctgttaaacaaaacaatgattgcaactattgtctggtgtaattgcaactgctggtctgatgtgattgcaacttatgtgaagaggttgagtcgttcgtggagaaagaggggcgtgggcgggaaagtgaaaaggttctgtcgggagcgggcgggagcgacgaagacgtgcgggagggac

SEQ ID NO: 59568 - DNA, 2156 bp, Zea Mays
ccaatggaaggactggaggaggggagtagcgtgatagtgatgccgtagtggtcgagctcgcggcggagtagagaccagagagtgagagcgagcagagcaaccaaagcgtaggcgacctcaacgcgaagcggaattgattgcgcccaccaccacgtcttctccccctccgtccgacccgtcctcaagtcaccaggccaccatcattgccgccatcgcgccgcccggccgcgggagcccagctacgcattcataactgtttctctcttggcttctcggcgaagtgttgcggttgcgggtactggagtgcggagagcagcgcggcgcgagggaggaagccaccacccaccaccacctccattaaaggcgctcacgcgccgcctccgcctccgcctccgcctccacgagagagctaggcgagaggggcgtacgagacctcagctgactcctgtcgtcaaggccatcgatctctcccctcacgggggcagccacgtacaaagctgcagaggtgacagagtgccgagccgtcgcgcgcgcgaaagcagaggagcggcaatggcagtggccgcgcggctcggcgccgtcgtggcgtgcgtcatcttagcggccgtggcggtggcgccgcggccggtggcggggatcctcgacccggtcgacttcctcgcgctgcaggcggtgcggcggtcgctggacgacatgcccgggtccgcgttcttcgacgggtgggacttcaccgccgacccgtgcgggttccccggtgtgttctgcgacggggaccgggtggtggcgctcgcgcttggcgacccgcgggcggggtctccggggctgacggggaggctggacccagcgctgggccggctgtccgcgctcaccgagctctcgctcgtgcccgggcgcgtcgagggggagctcccggcgtcgctggcgtcgtgctcgaacctccgcttcctggccgtcagcaagaacctcctctccggccagataccggacggcttcagcgcgctgtccaacctgcggacgctcgacgccagcttcaaccagatctccggcaccatcccgccgtccatcgccgcgctgccgtcgatcaccaacctcatcctctgccacaaccagcttaccggcggcgtcccatcgttcccggactcgtccccgctcctgcggctggatctcaagcacaacgcgctctccggcggcgtgcccaccctgccggccgggctgcagtacctgtcgctgtccgcgaacaagctcaccggtacggtcgaccaggtgctgcccgggctgcacgggctcaacttcctcgacctcagcatgaaccagctggagggcccgatcccggcgtcggtgctctcgctgccgctgtccgtactgcagttgcagcgcaacttcttctctgggccggtgcagccgtcgagcgacgtgacgatcccggtggtggacctgagctacaacaggttctggggccagctctcgccgctgctggcgggcgtcgggcagctgtacctgaacaacaaccggttcaccggcgaggtccccgcgcggctggtgcaggagctggtgggctccggcggcctgcaggtgctgtacctgcagcacaacttcctgacgggcatcgcgatatcgccgtcatcgtcgctcccctccaccgtctcgctctgcctgatgtacaactgcatggtgccgccggtgtacgcgccgtgcccgatcaaggccgggtcgcagaacacgcggccggcggaccagtgcccggagtggaggggctgagcctgatgtcggggtgagcttgatcgtgtctcagcaacgccagtgccaatgccggatcgcctccgatcaccggttgggaatagcgggaaagcagaactgaaggtcactgattctttgattgatttgggtatagttacaggcaagtaagtgccttaataatccggatttacaggtgtgtgtttttgtttagttggtgtatgtgcgtttgtgtatctctgtgctgtatagtgagcagtactccctcccggagcttctatcgcactgccgcatgatgacgctgtttgcatctgatgatggatggtgttagtaagaggcagtgaagttattatttatcgaatcatgtcgctgatcaattcaatatatgaccaagcatgcactgtgcttgattttgttcgcaa

SEQ ID NO: 59569 - DNA, 543 bp, Zea Mays
cgcatcagtctactacggctcttcggagtacaaattattgcaatattgtttttccccgcgcagaaggttccggaagcaagggacgtttctggatacagggcgttccgttctctccagctgcaggcttcctctcgagtccgcagtctctcttccctacgaagttcagaagttgtcacaatgactcgcggcgaccagagggaacgcgaccggcagagggcgcaggcgcggcggcccgcggccaaggggcgcgacgacgggctcaccccggagcagcggcgggagcgggacgccaaggcgctgcaggagaaggctgccaggaaggcggcgcaggccgcgggaggcgcctgcgccaagggcggcaagaacaccggcaagaagtagccggggtctttactctttagttcgcaggatctgctcgtgttggaagatctgtatttgcctagatctggaatgcaatgcgatttcgtgggcgttgtctcgagcagtgctgaaacaacggttcacagtaaaatttgtagcaaagatttaaaaagaacgagggcg

SEQ ID NO: 59570 - DNA, 2067 bp, Zea Mays
cccctcccctccttcctgttgccctccatctctccctcgccccctgtgcccccgcctcacacaccacagcctacagcgcttctgctccagcgcccgcctcgcctcgcctcttctcctcgttctgccgcccgcgcgcgccagcctggtgctcgttccccttcttggctcgtcgagcccagaggttggtggcgtcagggatttgtattggagcggaggagaagggggctttgccccgaggagatcggggacgcgggagggcgcggcgctcgagccgagctcggttcagcgggatcacttggcgtggccggtcctccggggcccatgccgtgagcaaagccaggctttgttgcccgggggagagatcttgcgcttgcaagcggcgcccgcccaccgccatggccggcagcgacgaggtcaaccgcaacgagtgcaagggtgcggtgccgatccacacatgggtgctcatctccaacttcaagttggcgtacaacatgctccggcgggccgacggcaccttcgaccgcgacctcgccgagttcctcgaccgccgggtgccgcccgacgcacgggcccaggagggggtctcctcgtccgaccacgtcatcgacacgtccactggcctggaggtccgcatctaccgcgccgccactaacaacggcggcgcgggcgcggccgcggtcaccctgcccatccttgacttcctcggcggcgggccgtctccggacccgttcccggtgatcctcttcttccacggcggcagcttcgcccactcgtcctccggcacggccatctacgacaacctgtgccggcggttcgtgaagctgagcaagggcgtggtggtgtccgtgaactaccggcgcgcccccgagcaccggtacccgtgcgcctacgacgacggctgggccgcgctgaagtgggccacgtcgcagcccttcctccgcagcggcggggacgggcggccccgcgtgttcctgtcgggcgacagctcgggcggcaacatcgcccaccacgtggccgtccgcgccgccgacgccgggatcaacatatgcggcaacatcctgctgaacgccatgttcggcggcaccgagcgcaccgagtcggagcggcggctggacggcaagtacttcgtcacgctccaggacagggactggtactggaaggcgtacctgcccgaggacgccgaccgggaccatccggcgtgcaacccgttcgggccgaacgggcggcggctcagggggctccccttcaccaagagcctcatcatcgtgtcgggcctggacctcacctgcgatcggcagctggcgtacgccgagggcctccagcaagacggccaccatgtgaaggtcgtgtaccgtgagaaggccaccgtgggtttctacctgctgtccaacacggaccactaccacgaggtcatggaggagatcggcgacttcctcgcggctaacctctagcagcacatgcacacaaacttcacatgttatagcaagaagatgggtgctgcttgatgatctgcgtcgtggttgatggagggaagcctataatttcgccgtcaatcatctaacattctgtgtacagtggtggactgatggaccaacaaggaggtggacggccttttttttgttgctgtgtctgatgtagtagtatttctcatctttttatggatcggatgggatggtgcctgcctttcattctatgatgaatcgtactgtctgtctatctatctatctacccaatgccgtcgtggaacatgtttccaatctagtactactactactaggctagatgcagaggcataagaaaatgtgctactacacctctactgctggtgtgtggcttttgtctcttttcttgtccatctctgtatacaatgctgaactgctgctaaatatattgttgtaaccttgaatgcctctggttggatgtcggtgaaatgtgatgagaaccattgatgaagaggggatggcactgccactcgacccccaggcccgcctgatctcggtgctctggtgactgtgtgtccttgcgcccattccattgccatgtgtcattccatatcgcctgtacttg

SEQ ID NO: 59571 - DNA, 2074 bp, Zea Mays
tgagggctggaggctggagctggttgatcatcgtatactgaaggctatcgcagttgagcaccgtaaagatgttgattccgcggtggttactgtccttgatgaagtcatgccgtccatgactggttcagctggaactttgtttacccataaagaagtgttgccatctatggatgattctgttgggaatttgtttgctaatcgcagcacacatgaagtgggtagttcatcatgtgcaggacatgagatacatatcgatgagattgatgtaagtgttcaccctgcacaacacacttcttctggggaggctaaaactggcaagcaagaaaacataaacaatgaatgtgtgggaagacttgcatcagtcgaaggggtcagtgagcaactaaatctacattctgatcctataccaaatggcagtcagcatgatttgattcccaaccttgatgtgctatcatcaaataccaatccagagaaaatgttggctaacatatataatgaagttggatatagtggattatcaagtgaatgtttttctcaacaactgactgggaaacatggtggtgatatcatagctccacaatcccatgatcaagatcctaataagatgcttccagttggggattacttttcccagaacagttcaatggagttcttcagtggctatgaggacatgcattttgatggtgaccttttgcctcctggttctaatgataaagtatcttctggaattttgggtactgaaaaagattcttctgtgcctgtgctggatgttcctggtcgaaataaagaagaatcccccgctgggacttctggatttatagaacagaaggacaccagcaatgttacgaatatgcttcctgatcttaatttgtatcatttggcttctacggcttcaactcactcaagccattctgttagtattgagtctcttgaggattctgttgctgatgccagaagcaataagaatgatctgttaccttctttggagttggttacaaaaatgatagaggatgttgagcttcttgaagaaaaggctaaagtagccaaacgtgaatcatctgttgctgggacaggcattctaaccaaagttgaggagctcagagaaatgttaactcatgcgaaggaagcaaatgatatgcatgctggcgaggtttttggcgagaaagctattttaaccacagaggcacgtgagcttcaatctcgacttcagaggctttcagatgagaggaataaatatctggtgataattgaagagatacgacaaactcttgatcaaagattggttgctgcacagcaagaaattgcagcagccgagaaagaaaagcttgaaaaggaggttgctgctcagacactactcaatgaacaggaaaatatgatgaattctattgttgaagaatcgagaaaactgcagaaagaagctgaggagaacctgaagttgaaggaattcctggttgagcggagccaaattgttgatatgctgcaaggcgagatgactgggatctgtgaggatgtttcgttgctcaagcgagtggtggatgagcgcctatcattgagcaagttgcagccctcagctatgtcaagcctctcttcttcactgcattcttctcatcacaagagctggacttcctctgataggaccaccgaagccaatgggtctctagataagcacacccttgctgaacctgcaagcccagcgcgcaaagatctgaatggcgacgagtgcactgtgcaggtgtcagatggcaacgacactggtaaaggcgttttgaagcgtgtggattccaaggacggcgatggatgggagctttgctgaaggtgttcaggaatagcgcggttgcgagtggatgctgaagcatagaaattactataaactagtaataatggtgaataaacgtttactagtgcgttgctaatctagtcgtaatgtgggaactgtgtcgtggaactgactcactagctcaccgcagtagtatgtgggatgggtccaactgcagcttgacgtggtatatataaatgtgaagaattcagctgcccctgctcctgtctaaattttatgttgtttttaattttgttc

SEQ ID NO: 59572 - DNA, 2217 bp, Zea Mays
ctggtacaagcccgtcctcccccgcggttttgatcgcctcctcgctttccttcaatccttcttcacctggtctctcacgcaatccgcggggaaccccaaaccctaatcctctccatccgaaccgctggagacagccgtgtgggagctcagttctcggggttctgcatcgatctctgttatctggggttctcagatgggcgatctcaaggaggttttccgctccctcaaagaactcttccctgaggttgatcatcgtatactgaaggctatcgcagttgagcaccgtaaagatgttgattccgcggtggttactgtccttgatgaagtcatgccgtccatgactggttcagctggaactttgtttacccataaagaagtgttgccatctatggatgattctgttgggaatttgtttgctaatcgcagcacacatgaagtgggtagttcatcatgtgcaggacatgagatacatatcgatgagattgatgtaagtgttcaccctgcacaacacacttcttctggggaggctaaaactggcaagcaagaaaacataaacaatgaatgtgtgggaagacttgcatcagtcgaaggggtcagtgagcaactaaatctacattctgatcctataccaaatggcagtcagcatgatttgattcccaaccttgatgtgctatcatcaaataccaatccagagaaaatgttggctaacatatataatgaagttggatatagtggattatcaagtgaatgtttttctcaacaactgactgggaaacatggtggtgatatcatagctccacaatcccatgatcaagatcctaataagatgcttccagttggggattacttttcccagaacagttcaatggagttcttcagtggctatgaggacatgcattttgatggtgaccttttgcctcctggttctaatgataaagtatcttctggaattttgggtactgaaaaagattcttctgtgcctgtgctggatgttcctggtcgaaataaagaagaatcccccgctgggacttctggatttatagaacagaaggacaccagcaatgttacgaatatgcttcctgatcttaatttgtatcatttggcttctacggcttcaactcactcaagccattctgttagtattgagtctcttgaggattctgttgctgatgccagaagcaataagaatgatctgttaccttctttggagttggttacaaaaatgatagaggatgttgagcttcttgaagaaaaggctaaagtagccaaacgtgaatcatctgttgctgggacaggcattctaaccaaagttgaggagctcagagaaatgttaactcatgcgaaggaagcaaatgatatgcatgctggcgaggtttttggcgagaaagctattttaaccacagaggcacgtgagcttcaatctcgacttcagaggctttcagatgagaggaataaatatctggtgataattgaagagatacgacaaactcttgatcaaagattggttgctgcacagcaagaaattgcagcagccgagaaagaaaagcttgaaaaggaggttgctgctcagacactactcaatgaacaggaaaatatgatgaattctattgttgaagaatcgagaaaactgcagaaagaagctgaggagaacctgaagttgaaggaattcctggttgagcggagccaaattgttgatatgctgcaaggcgagatgactgggatctgtgaggatgtttcgttgctcaagcgagtggtggatgagcgcctatcattgagcaagttgcagccctcagctatgtcaagcctctcttcttcactgcattcttctcatcacaagagctggacttcctctgataggaccaccgaagccaatgggtgtcagatggcaacgacactggtaaaggcgttttgaagcgtgtggattccaaggacggcgatggatgggagctttgctgaaggtgttcaggaatagcgcggttgcgagtggatgctgaagcatagaaattactataaactagtaataatggtgaataaacgtttactagtgcgttgctaatctagtcgtaatgtgggaactgtgtcgtggaactgactcactagctcaccgcagtagtatgtgggatgggtccaactgcagcttgacgtggtatatataaatgtgaagaattcagctgcccctgctcctgtctaaattttatgttgtttttaattttgttc

SEQ ID NO: 59573 - DNA, 964 bp, Zea Mays
agtccccacccgccccactgtgacactgacaccgttcgaagcaaaaagagcgaacacgagcacgaacacaagcgcagagcagccaagcgccacacacacgccgacgcgaaccaaccaaccagctggtagtaggttcgccgcgctgacgatgatgcctcgccgcgcccttctcttcgccgcggtgctcctcgcggcctccgccgccgcggtctccgggttccacctgggaggggacgagagcggtctcgtgaggggtgtgctcgccgcgctccgcgagcgagccgaggccgaggacgccgctcgcttcgccgtcgcccactacaacaagaaccagggcgccgctttggagtttactagggtgctcaaatccaagcggcaggtggtgaccgggaccctgcatgacctgatactggaggcagctgatgctggaaaaaagagtgtgtacagagcaaaggtttgggtgaagccgtgggaagatttcaagtctgtcgttgagtttcgccttgttggagactctgaatctgaacccgagccttctgttgcttctgatgttagctctgggcaagatattgtacaagaagaggctcgcctgcacaccattgagaatgatgggctttccggcgatttcacatcatcatcttaggcaaggatggaaagcgtaaaggtttaaaatgaagatttaggtatttagagtatgtcaagctgaaatgctttgccttgtttattggaatatgtatgtttcgtttcaaacgtgggagcatagaactgtatatttcggtatttcacactgttcatttccatgtctgtatataaggaggttcttctggctatatatatattttgatcctcaagtactttttctctgtcttctgtgtactttagagaatcagtcctgccgcgtctttggttagtgcgtaatatggaatagacgatgacaatatttaaagatctaattgaagaaatt

SEQ ID NO: 59574 - DNA, 2021 bp, Zea Mays
agtccccacccgccccactgtgacactgacaccgttcgaagcaaaaagagcgaacacgagcacgaacacaagcgcagagcagccaagcgccacacacacgccgacgcgaaccaaccaaccagctggtagtaggttcgccgcgctgacgatgatgcctcgccgcgcccttctcttcgccgcggtgctcctcgcggcctccgccgccgcggtctccgggttccacctgggaggggacgagagcggtctcgtgaggggtgtgctcgccgcgctccgcgagcgagccgaggccgaggacgccgctcgcttcgccgtcgcccactacaacaagaaccagggcgccgctttggagtttactagggtgctcaaatccaagcggcaggtggtgaccgggaccctgcatgacctgatactggaggcagctgatgctggaaaaaagagtgtgtacagagcaaaggtttgggtgaagccgtgggaagatttcaagtctgtcgttgagtttcgccttgttggagactctgaatctgaacccgagccttctgttgcttctgatgttagctctgggcaagcaattgccaaactctctcttgaagcagatattgtacaagaagaggctcgcctgcacaccattgagaatgatgggctttccggcgatttcacatcatcatcttaggtatgatttcatctctttttatcttcttgtgcaacgggtgccacttctggtctcttgctatttggttaaccgacctatgatcacacgagccaaggacaggctgccagtgatcccaatgactgtaaccatgatttgtttttatcttgcattggtatcttgtatagtaatggttcagtgcatgatgcaaactaaacaatgtctatatagttgcttttatctttgccatggctattgtgggaactgggaagtatctagtcctgatgtgggaccttatatgttggcatctggaagatggtttttactggatggatactgttagttgaattcgttgggattgctatttgtttttttatggaaaaccaagagtgatactcttcatgtaatcatgtgatgcattcgcactggtgctttgggcccatcaaaccgtgtactatcagtagacagcttgctgttcggattcttaacagaactttgtatgcaggcatacgaagttttgttaagaaactaaatagcaggaagcacacacctatgccagacactcctcgttccacaagacagcatttgcatcatgcagtgcttaacatagccatatctcattcgcagtgtttgtttatcttgtaatactatgtggaaaaacagtggcatagctcaggaatctaggccacaatcaaatccttttcaggaaccaggtgatatccaatgctttgatgaacaatagatgtttatgtgtggtgtgctgcggttgtatcagtcctcagaaaagaacttcccttttttaggaccaactggactcttatctctgtctgtttatttgctttctgatgcatacatcataaattggtatttttaacttgcaacccaagttacttgatattagataactgtcttgtttggtgtattaatgttaatagtctagcaaagaaaaaaaccatctttacttttctcatatgcaacattctgcaaagacaatgtgatataagttttggctcatccctcacttcaaacatacttggtgtgactaggattccaggcaaggatggaaagcgtaaaggtttaaaatgaagatttaggtatttagagtatgtcaagctgaaatgctttgccttgtttattggaatatgtatgtttcgtttcaaacgtgggagcatagaactgtatatttcggtatttcacactgttcatttccatgtctgtatataaggaggttcttctggctatatatatattttgatcctcaagtactttttctctgtcttctgtgtactttagagaatcagtcctgccgcgtctttggttagtgcgtaatatggaatagacgatgacaatatttaaagatctaattgaagaaatt

SEQ ID NO: 59575 - DNA, 1725 bp, Zea Mays
cttaggtctcaactctttgggggagtgacctactagatttgctagaatcaacgtttcggttaatgggcgccgctttggagtttactagggtgctcaaatccaagcggcaggtggtgaccgggaccctgcatgacctgatactggaggcagctgatgctggaaaaaagagtgtgtacagagcaaaggtttgggtgaagccgtgggaagatttcaagtctgtcgttgagtttcgccttgttggagactctgaatctgaacccgagccttctgttgcttctgatgttagctctgggcaagatattgtacaagaagaggctcgcctgcacaccattgagaatgatgggctttccggcgatttcacatcatcatcttaggtatgatttcatctctttttatcttcttgtgcaacgggtgccacttctggtctcttgctatttggttaaccgacctatgatcacacgagccaaggacaggctgccagtgatcccaatgactgtaaccatgatttgtttttatcttgcattggtatcttgtatagtaatggttcagtgcatgatgcaaactaaacaatgtctatatagttgcttttatctttgccatggctattgtgggaactgggaagtatctagtcctgatgtgggaccttatatgttggcatctggaagatggtttttactggatggatactgttagttgaattcgttgggattgctatttgtttttttatggaaaaccaagagtgatactcttcatgtaatcatgtgatgcattcgcactggtgctttgggcccatcaaaccgtgtactatcagtagacagcttgctgttcggattcttaacagaactttgtatgcaggcatacgaagttttgttaagaaactaaatagcaggaagcacacacctatgccagacactcctcgttccacaagacagcatttgcatcatgcagtgcttaacatagccatatctcattcgcagtgtttgtttatcttgtaatactatgtggaaaaacagtggcatagctcaggaatctaggccacaatcaaatccttttcaggaaccaggtgatatccaatgctttgatgaacaatagatgtttatgtgtggtgtgctgcggttgtatcagtcctcagaaaagaacttcccttttttaggaccaactggactcttatctctgtctgtttatttgctttctgatgcatacatcataaattggtatttttaacttgcaacccaagttacttgatattagataactgtcttgtttggtgtattaatgttaatagtctagcaaagaaaaaaaccatctttacttttctcatatgcaacattctgcaaagacaatgtgatataagttttggctcatccctcacttcaaacatacttggtgtgactaggattccaggcaaggatggaaagcgtaaaggtttaaaatgaagatttaggtatttagagtatgtcaagctgaaatgctttgccttgtttattggaatatgtatgtttcgtttcaaacgtgggagcatagaactgtatatttcggtatttcacactgttcatttccatgtctgtatataaggaggttcttctggctatatatatattttgatcctcaagtactttttctctgtcttctgtgtactttagagaatcagtcctgccgcgtctttggttagtgcgtaatatggaatagacgatgacaatatttaaagatctaattgaagaaatt

SEQ ID NO: 59576 - DNA, 2183 bp, Zea Mays
ctcgccgctcgccccaccgaaccgtttccaatcacggctgacggcccagcaaagatggcgagaacagcgcgttcgttttcaaaccctttcaaattcctctcttcgcaagccgcaataataccgttcattcgatagttccatcctcctccctcccccttcgccggcctcgcttcgtccctcccgctctcccccttttaaatcaaaccctctctcggctcctttataaatcctagtcgaagcaagggtgcgcgcacttcactacccaacctgaccccgaagatcgcgtccgcagagacagtagccgcgtcatggcgaccccgccgccgccgctcccgcccatgccgccgaggaactatggggagaaattggtcaggatgaaatgaaaagagataggatgatactgcaactggaggaggattgtctcaatgtttacaagcaaaaagtgaatcagactaggaaacagaaggcagacctgcttcaagagctgtcccttggcgaagctgatatagacaagatcctttctgctcttggagagagagaaacatttcctaggtcagagaagcttgggggcacattaatggaacaactcgctaagatagagccagtgctagaagatttgaggcgtaggagggatgagagagtaaatgagttcaaggctattcagtcaaagattgtatgtctacaagcagaaatttcaggagccattgatcatggggatcctgctgctcctgtggtagatgagaatgatttatccttgaaaagatcaggggaattgaaggagcatcttaatgatcttcagacagaaaagaatggaaggctgcaaaaaattgacatccagactaacagtattcatgaaatgtgcaacataatgtctattgatctcaaaatggcactaaaggatgttcatcccagttacgctgagctggggagaagcaaacccatgagtattagcaacagttcgcttgatagactatctgaaaaagtacatgcgttaaatcatgaaaagaaacaaaggcttcggaagcttcaagatcttggcagcacactcattgagttatggaacctcatggatacaccaactgatgaacagagattttttgaccatgtgacttctcttattaaagtctcaccaactacagcgatgccccaagggtgccttgcacacgaaataattgaaaaggtagagactgaggttaagagactgactaagttgaaagctagcaaaatgaaagagctagtcttcaagaaattgactgatcttgaggaaatctacagaagtgttcacatggatattgatagtgattctgagcggcaaaccctcaatgatctcattgattctggtagagcagatctttcagagttgctggcaagaatggatattcgaattgcggaggcaaaagaacatgcattaagtagaaaggatattttagaaaaggtggagaagtggacattggcatcagaagaggagacttggcttgatgaatacgaaagggatcaaaaccgatataatgctgtccgaggagctcacataaatctcaagcgtgcggagaaagctaggatattggtcagcaaacttccatctcttttggagaacttgactgctaaaattaaagcctgggaaaaggaaatgggtattccatttatatttaacaaggtgaggctgttggactgtttagatgaatacacctgtacaagacagcaaaaagaagaggaaaagcgccgatcaagggaattgaagaaactgcaagaacagtttgctacagagcaaggtgccaagttcggaacgaaaccaagccctatccgtcctctttcttcaaggaagcctcttgggcagagctctaatgccaatattattggtggaactccgaccagccgccgtgtttctacccccatgtcacggaagggtaggccatcttctggaagggtgcaggaagctgtcaagactgctgtggcaccagcaaactatgttgcccttcccaaggactgctcagacatttctaccctttgaagtgtaatcacctactctgaccatcgattgacttctcacttgatcgacctacatactatatagtcttgactccagtgtctatgcgtgtttccagactttgctaccctaattttcttttcattagtcgcaaaaaattacggactgtttctttcccagcacgaggcagggatttaag

SEQ ID NO: 59577 - DNA, 1920 bp, Zea Mays
atttcttggtgttgaattgcgtcatgatggttggatcttgggcaggaaattcctcgtttcctggttctcttgtggcaccaattctggaactatggggagaaattggtcaggatgaaatgaaaagagataggatgatactgcaactggaggaggattgtctcaatgtttacaagcaaaaagtgaatcagactaggaaacagaaggcagacctgcttcaagagctgtcccttggcgaagctgatatagacaagatcctttctgctcttggagagagagaaacatttcctaggtcagagaagcttgggggcacattaatggaacaactcgctaagatagagccagtgctagaagatttgaggcgtaggagggatgagagagtaaatgagttcaaggctattcagtcaaagattgtatgtctacaagcagaaatttcaggagccattgatcatggggatcctgctgctcctgtggtagatgagaatgatttatccttgaaaagatcaggggaattgaaggagcatcttaatgatcttcagacagaaaagaatggaaggctgcaaaaaattgacatccagactaacagtattcatgaaatgtgcaacataatgtctattgatctcaaaatggcactaaaggatgttcatcccagttacgctgagctggggagaagcaaacccatgagtattagcaacagttcgcttgatagactatctgaaaaagtacatgcgttaaatcatgaaaagaaacaaaggcttcggaagcttcaagatcttggcagcacactcattgagttatggaacctcatggatacaccaactgatgaacagagattttttgaccatgtgacttctcttattaaagtctcaccaactacagcgatgccccaagggtgccttgcacacgaaataattgaaaaggtagagactgaggttaagagactgactaagttgaaagctagcaaaatgaaagagctagtcttcaagaaattgactgatcttgaggaaatctacagaagtgttcacatggatattgatagtgattctgagcggcaaaccctcaatgatctcattgattctggtagagcagatctttcagagttgctggcaagaatggatattcgaattgcggaggcaaaagaacatgcattaagtagaaaggatattttagaaaaggtggagaagtggacattggcatcagaagaggagacttggcttgatgaatacgaaagggatcaaaaccgatataatgctgtccgaggagctcacataaatctcaagcgtgcggagaaagctaggatattggtcagcaaacttccatctcttttggagaacttgactgctaaaattaaagcctgggaaaaggaaatgggtattccatttatatttaacaaggtgaggctgttggactgtttagatgaatacacctgtacaagacagcaaaaagaagaggaaaagcgccgatcaagggaattgaagaaactgcaagaacagtttgctacagagcaaggtgccaagttcggaacgaaaccaagccctatccgtcctctttcttcaaggaagcctcttgggcagagctctaatgccaatattattggtggaactccgaccagccgccgtgtttctacccccatgtcacggaagggtaggccatcttctggaagggtgcaggaagctgtcaagactgctgtggcaccagcaaactatgttgcccttcccaaggactgctcagacatttctaccctttgaagtgtaatcacctactctgaccatcgattgacttctcacttgatcgacctacatactatatagtcttgactccagtgtctatgcgtgtttccagactttgctaccctaattttcttttcattagtcgcaaaaaattacggactgtttctttcccagcacgaggcagggatttaag

SEQ ID NO: 59578 - DNA, 1892 bp, Zea Mays
tggatcttgggcaggaaattcctcgtttcctggttctcttgtggcaccaattctgcaggaactatggggagaaattggtcaggatgaaatgaaaagagataggatgatactgcaactggaggaggattgtctcaatgtttacaagcaaaaagtgaatcagactaggaaacagaaggcagacctgcttcaagagctgtcccttggcgaagctgatatagacaagatcctttctgctcttggagagagagaaacatttcctaggtcagagaagcttgggggcacattaatggaacaactcgctaagatagagccagtgctagaagatttgaggcgtaggagggatgagagagtaaatgagttcaaggctattcagtcaaagattgtatgtctacaagcagaaatttcaggagccattgatcatggggatcctgctgctcctgtggtagatgagaatgatttatccttgaaaagatcaggggaattgaaggagcatcttaatgatcttcagacagaaaagaatggaaggctgcaaaaaattgacatccagactaacagtattcatgaaatgtgcaacataatgtctattgatctcaaaatggcactaaaggatgttcatcccagttacgctgagctggggagaagcaaacccatgagtattagcaacagttcgcttgatagactatctgaaaaagtacatgcgttaaatcatgaaaagaaacaaaggcttcggaagcttcaagatcttggcagcacactcattgagttatggaacctcatggatacaccaactgatgaacagagattttttgaccatgtgacttctcttattaaagtctcaccaactacagcgatgccccaagggtgccttgcacacgaaataattgaaaaggtagagactgaggttaagagactgactaagttgaaagctagcaaaatgaaagagctagtcttcaagaaattgactgatcttgaggaaatctacagaagtgttcacatggatattgatagtgattctgagcggcaaaccctcaatgatctcattgattctggtagagcagatctttcagagttgctggcaagaatggatattcgaattgcggaggcaaaagaacatgcattaagtagaaaggatattttagaaaaggtggagaagtggacattggcatcagaagaggagacttggcttgatgaatacgaaagggatcaaaaccgatataatgctgtccgaggagctcacataaatctcaagcgtgcggagaaagctaggatattggtcagcaaacttccatctcttttggagaacttgactgctaaaattaaagcctgggaaaaggaaatgggtattccatttatatttaacaaggtgaggctgttggactgtttagatgaatacacctgtacaagacagcaaaaagaagaggaaaagcgccgatcaagggaattgaagaaactgcaagaacagtttgctacagagcaaggtgccaagttcggaacgaaaccaagccctatccgtcctctttcttcaaggaagcctcttgggcagagctctaatgccaatattattggtggaactccgaccagccgccgtgtttctacccccatgtcacggaagggtaggccatcttctggaagggtgcaggaagctgtcaagactgctgtggcaccagcaaactatgttgcccttcccaaggactgctcagacatttctaccctttgaagtgtaatcacctactctgaccatcgattgacttctcacttgatcgacctacatactatatagtcttgactccagtgtctatgcgtgtttccagactttgctaccctaattttcttttcattagtcgcaaaaaattacggactgtttctttcccagcacgaggcagggatttaag

SEQ ID NO: 59579 - DNA, 1904 bp, Zea Mays
cctggttctcttgtggcaccaattctgttcggctttgcctacgtcactaaataccacaatcttgaagcaggaactatggggagaaattggtcaggatgaaatgaaaagagataggatgatactgcaactggaggaggattgtctcaatgtttacaagcaaaaagtgaatcagactaggaaacagaaggcagacctgcttcaagagctgtcccttggcgaagctgatatagacaagatcctttctgctcttggagagagagaaacatttcctaggtcagagaagcttgggggcacattaatggaacaactcgctaagatagagccagtgctagaagatttgaggcgtaggagggatgagagagtaaatgagttcaaggctattcagtcaaagattgtatgtctacaagcagaaatttcaggagccattgatcatggggatcctgctgctcctgtggtagatgagaatgatttatccttgaaaagatcaggggaattgaaggagcatcttaatgatcttcagacagaaaagaatggaaggctgcaaaaaattgacatccagactaacagtattcatgaaatgtgcaacataatgtctattgatctcaaaatggcactaaaggatgttcatcccagttacgctgagctggggagaagcaaacccatgagtattagcaacagttcgcttgatagactatctgaaaaagtacatgcgttaaatcatgaaaagaaacaaaggcttcggaagcttcaagatcttggcagcacactcattgagttatggaacctcatggatacaccaactgatgaacagagattttttgaccatgtgacttctcttattaaagtctcaccaactacagcgatgccccaagggtgccttgcacacgaaataattgaaaaggtagagactgaggttaagagactgactaagttgaaagctagcaaaatgaaagagctagtcttcaagaaattgactgatcttgaggaaatctacagaagtgttcacatggatattgatagtgattctgagcggcaaaccctcaatgatctcattgattctggtagagcagatctttcagagttgctggcaagaatggatattcgaattgcggaggcaaaagaacatgcattaagtagaaaggatattttagaaaaggtggagaagtggacattggcatcagaagaggagacttggcttgatgaatacgaaagggatcaaaaccgatataatgctgtccgaggagctcacataaatctcaagcgtgcggagaaagctaggatattggtcagcaaacttccatctcttttggagaacttgactgctaaaattaaagcctgggaaaaggaaatgggtattccatttatatttaacaaggtgaggctgttggactgtttagatgaatacacctgtacaagacagcaaaaagaagaggaaaagcgccgatcaagggaattgaagaaactgcaagaacagtttgctacagagcaaggtgccaagttcggaacgaaaccaagccctatccgtcctctttcttcaaggaagcctcttgggcagagctctaatgccaatattattggtggaactccgaccagccgccgtgtttctacccccatgtcacggaagggtaggccatcttctggaagggtgcaggaagctgtcaagactgctgtggcaccagcaaactatgttgcccttcccaaggactgctcagacatttctaccctttgaagtgtaatcacctactctgaccatcgattgacttctcacttgatcgacctacatactatatagtcttgactccagtgtctatgcgtgtttccagactttgctaccctaattttcttttcattagtcgcaaaaaattacggactgtttctttcccagcacgaggcagggatttaag

SEQ ID NO: 59580 - DNA, 1011 bp, Zea Mays
aagctctgctcctcccgccatcccacatccatctccacctccctcatacaacgccgcgcgtgccctagtggtagcaccaattgcgggcctgtggcaacagtgatggccaatgccactgtccccgagttgcagccgcaggttcaagcggcgggtggccgcaaggtggtggacgaggtgtccggctggctgcgcgttctggacgacggcagcgtcgaccgcacgtggaccggcccacccgaggtcctcccgatgatgcagcccgtggcgccgtacgacgtgccccgcgacgggcacacgctgcacgacctcccaggggagcccaatttccggatctacctccccgaggtcgacgacgaccgcaagggcgggcgcctgcccgtcatcgtgcacttccacggcggcggcttctgcttctcccacccgtcctggctcatgtaccaccagttctactcgcgtctcgcgtgcgccgtccctgccgtggtcgtctctgtcgagctcccgctcgcgcccgagcgacgcctgccagcgcacatcgacacggccgtcgccgcggtccgccggctccgctgcatcgcgctgtcggaggacggagctcttggtgacaaggcaggacggcgctggcgtctgggcgcccctgcgcgtcgccggctgcgttctgatccaaccgggattcgtgcgcgcaacaaggagccggtcggagctggaggtgggagagtcggtgttcttcacgctggacatgctggacaagtgccaggccatggcgctgcctgttggcgccaccaaggagcacccgttctcgtgccccatgggtccgcaggcgccgcccctggagtccgtgccgctcccgccgatgatggtggccgtcggcgagaaggacctcgtccgcgacacaaaggagcacccttgcaagcatttagggggtgtttggtttgaagaattaattcattttagatgatgcgatgcatcatgagtttattccacaaattatataagtttggtttgaagaatcaa

SEQ ID NO: 59581 - DNA, 2162 bp, Zea Mays
catcctcgcatgcatgtgagggccatagctcactgtcgcatgccctgctctgcttcagcaccacacacacacaacaatcagtgtggccataacaagcagctagcgagagctccccgcgtccagccatggcaaccacgacgacggctggtaggaacaatggagaaggagaacagaagaggtggagggagaaaggaggcttcaagaccatgccattcatacttgggaacgacatctgcgaccggttcgccacggccggcttcggcgccaacatgatcacgtacctgacgcagcagctgcacctgccgctggtggaggcgtccaacctgctgaccaacttcggcggcacgtccagcctcacgcccatcctgggcgcgctcgccgccgactccttcgcgggccgcttcgggaccatcgtcgccggctccgtcttctaccagctcggcatgctcggcctcgtcgtgtccgcgctcctcccttcgctccgccccgcgccgtgccccggcgccccggccgcgtgccagcgcgcctccgggtggcagctcgccgcgctgtacctctccctcctctgcacgtccgtcggctccggcgggctgcggccctgcgtcgtggcgttcggcaccgaccagttcgaccgcgagcccggggagcagcaggtcaccgcggaggcggccggggaggtggcggagcgcaagcggcgctacttcaacctctacttcttcacgatgggggtggcggcgctgctggcgctgacggtggtggtgtacatccaggacaacgtgggctggggctgggggttcgggatccccgccgtcgccatgttcgtctccatcgtcgtgttcgtggtcgggtacccgctgtacgtccgcctcaagcccgggggcagcccgttcacgcgtctcgcgcaggtcgccgccgccgcctttaagaagcgccacgtcgccgtgccggaggacgcagggatgctgtaccaggacaaggagctcgacgccttcatctccaccaacggcaggctgctgcacaccgatcagctcacgttcttggaccgggcagcgattgtgacgccgggtgacatctccgcttccgggcagccggacctgtggcgtttgtcaacggtgcaccgcgtggaggagctcaagtccattgtccgcatgctgcccatctggtcagcagggatcatgctggccaccgctggctcgcacaacggcaccttcaccatcttgcaggcgcgcaccatggaccggcacatcacccggcacttcgagataccaccagcgaccatgtcgatcttcgggaccgcggccatgctcgtcagcctggctctctacgaccgcgcgttcgtgccgctggcacgccgcgtcacgggcctgcagtccgggatcacctacttccagcgcatgggcatcgggctcgccatctccatcctcggcgtcgcctccgccgctctcgtagagaccaagcgccgcgatgccgcggccgacaatggattcctggacaatccggacgccgtcgtcccgatcagcgtgttctggcttgtgccgcagttcgccatccatggcgtcgccagcgccttctcgtcggtggggcacatggagttcctgtacgaccaggcgcccgagagcatgcgcagtactgccgctgcgctcttctggctcgccagctccatcggccactacctcggcacggtgctggtcacggtggtgcagcgcaccacccgcggtcgtggcgactggctccaggacaacatcaaccgtggaaggatcgacaactactactggctcgtcacctgcctcatggtgctcgaccttggctactacatcgtctgcttccatttctacaccatgaagccactagagatggcagacgaacaagatgatcatgacgaagagtgtgagctctccactgtcccgaaaaacggcatcggtgccggtgtggtgtaacgttgatttgcgggtaattaattaggatggacgttagatgttaatatatgggttagatactactacatggttaataccaccctccgcattacgacacaaaattcggtgcaacggatagggattattgatacctgtaacctgttcacacttaaaattgtccaatattagtcctcaaagtttgggttgtgcccaatgggccggcccgagcacggatcgagaaaaaag

SEQ ID NO: 59582 - DNA, 4405 bp, Zea Mays
ctcctcaccgctcaccatctccaatggcttaaaggtgtagtacttaacgcagatgaagaagtagacgaggttgaccacctccagagccacgactagccagtagtagttgtctagcttccctcggttaaggttgtccgggagccattgcccggttcgcttcgtcttgtcgtgcacgatggtcaccagcagcgtgccgaggtagctcccgatcgagaaggtcagccagtagagcgccgtcgctgagctccgcatgctctcgggtgcctggtcgtacaggaactccatgcggccgacgtccatgaaggcgttggcgatgccatggatggcgtactgcggcaccagccagaagacgctcatcggcagggtggccttgggagcgtcgagcagcccactcgcagcggcaacggacttgcgtctccgctcgacgaccgcggccaccacgttggacagcatggcgatcgtcagtcccacgcccgtgcgctggaggtgagtgatgccgttcgggcggccagtgaagcggcgcagcacgcggacgagcacgcgatcgtagaaggccagggtcagcagcataccgaagttggtgaagatgagcatggaggccggcgggatcttgaagtgtggcgtgatgtcacggtccatggtacgagcctgctggatggcgaagctgtgattgtgcgacgccgatgtcaccaggatgatgccggcagcacagatcggcagcatacgtatgatcgacttgagctcctcgatgcggtgcaccgtcgacagccgccatagcttcggctgacccgacggcagcacgtcgccgtccgtcacaatagccgccttgtctaagcacctaaggatcgggaagacgaatcagcacgtgcagatcaaatgtccgactcttatttctcatttaatcttaacttactttagctggtcggtgtgaagaaggcgtccggtggtggagatgccagcgtcgagctccttgtcctcgtacaggaggctcgggtccggcacgacggctttccgcttcttgtatgctgcggtagcgacctgcgccaaccggaccagggggctgcccccgggtggcatcctgatgtagagcgagtacccggacacgaaggcgatcaccgcggcgaccatggcgacggtaggcacgcctattccccaactccacccgacgttgtcctggatgtacaccacggcggtgacggccgcgagcttcgcgagctcgacggcgaagaagtagaggttaaagaaactccacttgggcttggcgccccggtgcctgtgcgcgttcagctcaagctggtcggcgccaaacgccatggtgcaggggcgcgtgcccccggtgccgatcgacgtgcagagcagagacaggtacagcacggaaatctggtaggaggacgcgcgctggcagtctgcagcgtgcttggcgcaggatggcgggtgcagcgaggggagcgcggcggagagggtaaggcagaccatgccgagctggtagatgatggagccgaatgtgatggtccagaagcggccggcaaaggagtcggcgatgagaccgccgatgagcggagtgaggttagcagtgccattgtagttggtgatgatgttggaggcctccacgagcggcaggtgcagctgcagggtgaggtacgagatcaggttcgtcgtgaaccccaccgaagcaagccggtcgcagaagtcattcgctgccgtacgtcgtgcacatccatgccaagaaatattagcttcgacgaagacagtaaaattttacaattgctaggtggaggcgcgttcttttttacaagaaatgttaaaactaaataataaaaattctaacagtaatgaaaaatatgttacccttaagttcttaacttggttgacgttagtcaccatcgtcaacaataatcattacatctattcaaatttctaataacaataattagaaacatatgtccattaagctcactaactttaagcaatataagctacatcctaaatctagatctaaattaccaatctcagtaatacaaaaagacaaaaaaaaaagaataacccttaaattaccccccacatcttctattaataaataacctctttaatttgtttaaacagcccaaatttatcatcacaaaacatgtataaattaaatatccatcaaatctatgtactttacggttcatcataaatcaactcttttctgaagtattttgtaatgctcctccagcagttagaactagagccacaccaaatagactttaaggggtgtttgagactgcttcaaattctagctatagtttataatataaatttaaataatattaaatattttaaatttaataaaaaaataaaatgatgcatctaaatgttttctaaaagatttataattctagcttcacagttttttgaagcttctaatgacttgctactaacttcaccaaactttttagagctggagtaatcctaaatataatcttatcaaatgaattttgatggatataaagtaactagaatgcaaataaatttggatccaaatccactatcatctctagtggtggtcaacgtcgtcgtggcagtggtggcactgccgcaccggtgattgtgatgacggtggtagcatgaccgcatcccttgaaacaagccgcgtaccacccactagtatcttttatgactgaaaaatcctcgattccgagataacggtgtatctctagtgagtagtgactttcagcgcctttggagtatgcccacattttctaagccgattttagagcaccttatctaactgaatatatatatatatatatatatatatagcatatacctccagggctctcactctttcgtagttaatgtattttcacactttcgaaatcgttcatgcatacaagggcctttggaggtagcaaaagtaacatgcatgtacaaatcaaagaattcttgggcaccagacagaaatgttcagcttttgcattattaaataggagccactaagctatccttcctagaagtttaaggattgtttgaatacactagagttaatagttcattagtttaaaaaatgcttgtaaaatttgctggctaataaacatatagcaactattagcttagactgtttagatatttttaactaattttagcagctaactattagagctctagtgtatttaaacatgaccataattctgaactcggataaagtcattttgttttcatgagaacagatagccacaacgtgtgtgggcgtgtgggtacatgtaaacaaagcaacacctctgagaaataatatgtcgctaatggtttcattggttggtgtcttgacatcaaaagcttggcagtatagaatctgcagtactcacaaagcagatggtacgttgatactgttctacaggttgaattgttcgatgtaatcatatccaaaaacgttcctgtttttagtagtttaattgccccgtgacgtgccaatcaaaatagacaggtttgaccacgagggaaaacaacaaaaactgctacgaaaagcaggctgccagatgggcatggattgacgtgctatgtggtatcgtccatcaattcgtgttagcagatgcagcgtccgctcccgtagcaacaccaaaaggtggcgtgcatgcagggaccagaattgaaaactggaaggtgtgcatgcagggatcggaattgaaaattcgaaggagacaaaagaaaaacacttaaacatttacaataacgggccgtttgaatctatttattttggaggaatcagaattaattaataaaatagactatttggcttggattttgatatttcatcacttttcaaagcttacgtataagtctatctcaaatttatgagatagagtttggaaaatgattttatgtatcaatggaatatgtttctatactgcaacttataatacgcgacttacttctctatagtaaaatatgtagcacataaatattactcgcatatctaataatagtatataaatatatcttgcataaaattatattagcttaattgatctttatctaaattattattagtagaatgaaatttaattcgaagatcaaaaccgggcatagtgagatttttggtgctgctcttagcctcttataggtggacccgccccatgacctgctgctagctatcttttagtgaacaagctgcatgaaaaaaaaattggaggtggtaattttttttcggaaggttaggatttataaaattcgtgaagtaaaatggagagttggaggctgaatgcagagggggcagctcaagatatctaagcaattccagcaggaatctaagcaaaacagatcgagcatatggagtactgatagtagcaggacggagtggatacgatactcacctaggatgaagggcatgctcctgaaccctccccgttgcttcgccggcaacttggac

SEQ ID NO: 59583 - DNA, 1234 bp, Zea Mays
aaaatccggaatcgtgcagacgggcaccgcttatcctccgcgcaggcaagagcagccagccgcttcgggatcgggacgcggagaggggaaaggcgagtcgtcgactcgtcgtccgggcagcttccctccctctcctctccgcccccgcttacctaggccggccccgcctacgcccccctcccgccgccgcacgatgagcacttctcccgccgccgccgacgtttcgcctttgccgcctactgctgccgccgacgaggccgcgcgggcgacagagacggtggtggtcgatgagagggtcgcctcacacgtggacccgttcctcgtcgaggcgctcgacaaccctcgccaccgtctcatggttctacggatggaactggatatacaaaactttatgcagaaccctcagctgcaggagtttgaattccagaactttccgacttcttacctccgctgtgctgctcatcgtgttgcacaacattatggcttagagactatagtagcagatagtttagtagaaggctcagttagcaggattgttgcaagaaaaacagcagaaagcaggtatcctgcaatttttttatcagaagttcctagcaatcaagcaagaaatgatcatgaaacagctgagaagcttaagtttgtcatttatcaaaggcccaaagcattccaaaatggaagcgctgattctagaaacaagagtggtgtaccaaaaactgttgatgagagaatagaggaatataataaagcacgagcacgcatcttcaatggttccatttctgcagattctgatgctgcaagtattatgggaactctttctactggcaaagatgaaccagtaaatgttgacccttctgttgatgaaaccaaagtcagcacaatgaacagtcgttccagagttgctgtttttaaggatactgaaaaggatcgtagtgacccagactacgatcgaaactacaaaaggtatgttaggagctcagtgcctggcttcaacttgagcccaggtgtttttaactttgttgtgcctcagtttatgcagtatgacattggttatgtgcaatctcctggcatgtccacaaaccagcatactatgtactttggccagcctgatctaacaatagggtcttctggagctgctgtttatcgacattggccaaccccaacaatgatgtatccccattgctatgataatgttagtccaatgatgtctcagacgaaatgagtgggatagtttgtt

SEQ ID NO: 59584 - DNA, 2084 bp, Zea Mays
ccggaatcgtgcagacgggcaccgcttatcctccgcgcaggcaagagcagccagccgcttcgggatcgggacgcggagaggggaaaggcgagtcgtcgactcgtcgtccgggcagcttccctccctctcctctccgcccccgcttacctaggccggccccgcctacgcccccctcccgccgccgcacgatgagcacttctcccgccgccgccgacgtttcgcctttgccgcctactgctgccgccgacgaggccgcgcgggcgacagagacggtggtggtcgatgagagggtcgcctcacacgtggacccgttcctcgtcgaggcgctcgacaaccctcgccaccgtctcatgggtgggacttgatgaagagtacaaccgatggtctctgctctggtggcccatgttgagcaggccactgtagctgaagccacatcctagctttatatttgacaccaggatggatctacttcatataggccatcaagcctctgctaatgctgctggtcgagggtgcagaaacaaccgtggccatggttgaggcatagggcatggtggctaccaaggtccattatcatcttcatttgatggacgtccacaagcttagcaccactgacatgatctgtcaagtctgaggctaggtaggacgtattgcctccattggtggtattgctacgatgagagctacacctccaacacgaagactgcagctgtggccacctaccaggctatggtatcgatatcaactagtacatctacatgacgtcaacagatcatattacaagtaatctggacaagctagcagttcagaacaaggggacaaattggacctcacagccagcagggcagttctacggatggaactggatatacaaaactttatgcagaaccctcagctgcaggagtttgaattccagaactttccgacttcttacctccgctgtgctgctcatcgtgttgcacaacattatggcttagagactatagtagcagatagtttagtagaaggctcagttagcaggattgttgcaagaaaaacagcagaaagcaggtatcctgcaatttttttatcagaagttcctagcaatcaagcaagaaatgatcatgaaacagctgagaagcttaagtttgtcatttatcaaaggcccaaagcattccaaaatggaagcgctgattctagaaacaagagtggtgtaccaaaaactgttgatgagagaatagaggaatataataaagcacgagcacgcatcttcaatggttccatttctgcagattctgatgctgcaagtattatgggaactctttctactggcaaagatgaaccagtaaatgttgacccttctgttgatgaaaccaaagtcagcacaatgaacagtcgttccagagttgctgtttttaaggatactgaaaaggatcgtagtgacccagactacgatcgaaactacaaaagtttatgcagtatgacattggttatgtgcaatctcctggcatgtccacaaaccagcatactatgtactttggccagcctgatctaacaatagggtcttctggagctgctgtttatcgacattggccaaccccaacaatgatgtatccccattgctatgataatgttagtccaatgatgtctcaggttcctctgtaccagtctttcaaccatgattaggagattctgcttgctggaaagttgggaacaattctctgttgaacttgctatgttgtgttgtcctatgttaagtggagttcctttagattcgagccgtttttattacaaaaaattgtataaggagtcctaattcgttgaaactatttcgtgaactagtctggaactgtgatgcttgtctaatgtctagttctcgtttgcaatttgctcccggtttatagttagtagtgtgctgcgactggtcttgaaccgtgtcgcgtggtcgtactggtagaaccaggttgctacttgccagcagtcattgctttgattccgattttttatttaacttctttttaatcaagtatttcaaataatctaccctagaagttacttttacatctagttgtgccagaccacaaggacgacaaaataagattgtt

SEQ ID NO: 59585 - DNA, 2318 bp, Zea Mays
ccggaatcgtgcagacgggcaccgcttatcctccgcgcaggcaagagcagccagccgcttcgggatcgggacgcggagaggggaaaggcgagtcgtcgactcgtcgtccgggcagcttccctccctctcctctccgcccccgcttacctaggccggccccgcctacgcccccctcccgccgccgcacgatgagcacttctcccgccgccgccgacgtttcgcctttgccgcctactgctgccgccgacgaggccgcgcgggcgacagagacggtggtggtcgatgagagggtcgcctcacacgtggacccgttcctcgtcgaggcgctcgacaaccctcgccaccgtctcatgggtgggacttgatgaagagtacaaccgatggtctctgctctggtggcccatgttgagcaggccactgtagctgaagccacatcctagctttatatttgacaccaggatggatctacttcatataggccatcaagcctctgctaatgctgctggtcgagggtgcagaaacaaccgtggccatggttgaggcatagggcatggtggctaccaaggtccattatcatcttcatttgatggacgtccacaagcttagcaccactgacatgatctgtcaagtctgaggctaggtaggacgtattgcctccattggtggtattgctacgatgagagctacacctccaacacgaagactgcagctgtggccacctaccaggctatggtatcgatatcaactagtacatctacatgacgtcaacagatcatattacaagtaatctggacaagctagcagttcagaacaaggggacaaattggacctcacagccagcagggcaggatgctattgatgctatgctccaagatttgagttcagagattgcatcgaaggacctaagacaactccattacttccttggaattgaggcctactttgactttgccagtacttcagaaaagttaagaactggtgaaggtgaactactagagttagaggatgcaacgagttctacggatggaactggatatacaaaactttatgcagaaccctcagctgcaggagtttgaattccagaactttccgacttcttacctccgctgtgctgctcatcgtgttgcacaacattatggcttagagactatagtagcagatagtttagtagaaggctcagttagcaggattgttgcaagaaaaacagcagaaagcaggtatcctgcaatttttttatcagaagttcctagcaatcaagcaagaaatgatcatgaaacagctgagaagcttaagtttgtcatttatcaaaggcccaaagcattccaaaatggaagcgctgattctagaaacaagagtggtgtaccaaaaactgttgatgagagaatagaggaatataataaagcacgagcacgcatcttcaatggttccatttctgcagattctgatgctgcaagtattatgggaactctttctactggcaaagatgaaccagtaaatgttgacccttctgttgatgaaaccaaagtcagcacaatgaacagtcgttccagagttgctgtttttaaggatactgaaaaggatcgtagtgacccagactacgatcgaaactacaaaaggtatgttaggagctcagtgcctggcttcaacttgagcccaggtgtttttaactttgttgtgcctcagtttatgcagtatgacattggttatgtgcaatctcctggcatgtccacaaaccagcatactatgtactttggccagcctgatctaacaatagggtcttctggagctgctgtttatcgacattggccaaccccaacaatgatgtatccccattgctatgataatgttagtccaatgatgtctcaggttcctctgtaccagtctttcaaccatgattaggagattctgcttgctggaaagttgggaacaattctctgttgaacttgctatgttgtgttgtcctatgttaagtggagttcctttagattcgagccgtttttattacaaaaaattgtataaggagtcctaattcgttgaaactatttcgtgaactagtctggaactgtgatgcttgtctaatgtctagttctcgtttgcaatttgctcccggtttatagttagtagtgtgctgcgactggtcttgaaccgtgtcgcgtggtcgtactggtagaaccaggttgctacttgccagcagtcattgctttgattccgattttttatttaacttctttttaatcaagtatttcaaataatctaccctagaagttacttttacatctagttgtgccagaccacaaggacgacaaaataagattgtt

SEQ ID NO: 59586 - DNA, 1167 bp, Zea Mays
ccggaatcgtgcagacgggcaccgcttatcctccgcgcaggcaagagcagccagccgcttcgggatcgggacgcggagaggggaaaggcgagtcgtcgactcgtcgtccgggcagcttccctccctctcctctccgcccccgcttacctaggccggccccgcctacgcccccctcccgccgccgcacgatgagcacttctcccgccgccgccgacgtttcgcctttgccgcctactgctgccgccgacgaggccgcgcgggcgacagagacggtggtggtcgatgagagggtcgcctcacacgtggacccgttcctcgtcgaggcgctcgacaaccctcgccaccgtctcatggattctgatgctgcaagtattatgggaactctttctactggcaaagatgaaccagtaaatgttgacccttctgttgatgaaaccaaagtcagcacaatgaacagtcgttccagagttgctgtttttaaggatactgaaaaggatcgtagtgacccagactacgatcgaaactacaaaagtttatgcagtatgacattggttatgtgcaatctcctggcatgtccacaaaccagcatactatgtactttggccagcctgatctaacaatagggtcttctggagctgctgtttatcgacattggccaaccccaacaatgatgtatccccattgctatgataatgttagtccaatgatgtctcaggttcctctgtaccagtctttcaaccatgattaggagattctgcttgctggaaagttgggaacaattctctgttgaacttgctatgttgtgttgtcctatgttaagtggagttcctttagattcgagccgtttttattacaaaaaattgtataaggagtcctaattcgttgaaactatttcgtgaactagtctggaactgtgatgcttgtctaatgtctagttctcgtttgcaatttgctcccggtttatagttagtagtgtgctgcgactggtcttgaaccgtgtcgcgtggtcgtactggtagaaccaggttgctacttgccagcagtcattgctttgattccgattttttatttaacttctttttaatcaagtatttcaaataatctaccctagaagttacttttacatctagttgtgccagaccacaaggacgacaaaataagattgtt

SEQ ID NO: 59587 - DNA, 1934 bp, Zea Mays
ccggaatcgtgcagacgggcaccgcttatcctccgcgcaggcaagagcagccagccgcttcgggatcgggacgcggagaggggaaaggcgagtcgtcgactcgtcgtccgggcagcttccctccctctcctctccgcccccgcttacctaggccggccccgcctacgcccccctcccgccgccgcacgatgagcacttctcccgccgccgccgacgtttcgcctttgccgcctactgctgccgccgacgaggccgcgcgggcgacagagacggtggtggtcgatgagagggtcgcctcacacgtggacccgttcctcgtcgaggcgctcgacaaccctcgccaccgtctcatgggccatcaagcctctgctaatgctgctggtcgagggtgcagaaacaaccgtggccatggttgaggcatagggcatggtggctaccaaggtccattatcatcttcatttgatggacgtccacaagcttagcaccactgacatgatctgtcaagtctgaggctaggtaggacgtattgcctccattggtggtattgctacgatgagagctacacctccaacacgaagactgcagctgtggccacctaccaggctatggtatcgatatcaactagtacatctacatgacgtcaacagatcatattacaagtaatctggacaagctagcagttcagaacaaggggacaaattggacctcacagccagcagggcagttctacggatggaactggatatacaaaactttatgcagaaccctcagctgcaggagtttgaattccagaactttccgacttcttacctccgctgtgctgctcatcgtgttgcacaacattatggcttagagactatagtagcagatagtttagtagaaggctcagttagcaggattgttgcaagaaaaacagcagaaagcaggcccaaagcattccaaaatggaagcgctgattctagaaacaagagtggtgtaccaaaaactgttgatgagagaatagaggaatataataaagcacgagcacgcatcttcaatggttccatttctgcagattctgatgctgcaagtattatgggaactctttctactggcaaagatgaaccagtaaatgttgacccttctgttgatgaaaccaaagtcagcacaatgaacagtcgttccagagttgctgtttttaaggatactgaaaaggatcgtagtgacccagactacgatcgaaactacaaaaggtatgttaggagctcagtgcctggcttcaacttgagcccaggtgtttttaactttgttgtgcctcagtttatgcagtatgacattggttatgtgcaatctcctggcatgtccacaaaccagcatactatgtactttggccagcctgatctaacaatagggtcttctggagctgctgtttatcgacattggccaaccccaacaatgatgtatccccattgctatgataatgttagtccaatgatgtctcaggttcctctgtaccagtctttcaaccatgattaggagattctgcttgctggaaagttgggaacaattctctgttgaacttgctatgttgtgttgtcctatgttaagtggagttcctttagattcgagccgtttttattacaaaaaattgtataaggagtcctaattcgttgaaactatttcgtgaactagtctggaactgtgatgcttgtctaatgtctagttctcgtttgcaatttgctcccggtttatagttagtagtgtgctgcgactggtcttgaaccgtgtcgcgtggtcgtactggtagaaccaggttgctacttgccagcagtcattgctttgattccgattttttatttaacttctttttaatcaagtatttcaaataatctaccctagaagttacttttacatctagttgtgccagaccacaaggacgacaaaataagattgtt

SEQ ID NO: 59588 - DNA, 1564 bp, Zea Mays
ccggaatcgtgcagacgggcaccgcttatcctccgcgcaggcaagagcagccagccgcttcgggatcgggacgcggagaggggaaaggcgagtcgtcgactcgtcgtccgggcagcttccctccctctcctctccgcccccgcttacctaggccggccccgcctacgcccccctcccgccgccgcacgatgagcacttctcccgccgccgccgacgtttcgcctttgccgcctactgctgccgccgacgaggccgcgcgggcgacagagacggtggtggtcgatgagagggtcgcctcacacgtggacccgttcctcgtcgaggcgctcgacaaccctcgccaccgtctcatggttctacggatggaactggatatacaaaactttatgcagaaccctcagctgcaggagtttgaattccagaactttccgacttcttacctccgctgtgctgctcatcgtgttgcacaacattatggcttagagactatagtagcagatagtttagtagaaggctcagttagcaggattgttgcaagaaaaacagcagaaagcaggcccaaagcattccaaaatggaagcgctgattctagaaacaagagtggtgtaccaaaaactgttgatgagagaatagaggaatataataaagcacgagcacgcatcttcaatggttccatttctgcagattctgatgctgcaagtattatgggaactctttctactggcaaagatgaaccagtaaatgttgacccttctgttgatgaaaccaaagtcagcacaatgaacagtcgttccagagttgctgtttttaaggatactgaaaaggatcgtagtgacccagactacgatcgaaactacaaaaggtatgttaggagctcagtgcctggcttcaacttgagcccaggtgtttttaactttgttgtgcctcagtttatgcagtatgacattggttatgtgcaatctcctggcatgtccacaaaccagcatactatgtactttggccagcctgatctaacaatagggtcttctggagctgctgtttatcgacattggccaaccccaacaatgatgtatccccattgctatgataatgttagtccaatgatgtctcaggttcctctgtaccagtctttcaaccatgattaggagattctgcttgctggaaagttgggaacaattctctgttgaacttgctatgttgtgttgtcctatgttaagtggagttcctttagattcgagccgtttttattacaaaaaattgtataaggagtcctaattcgttgaaactatttcgtgaactagtctggaactgtgatgcttgtctaatgtctagttctcgtttgcaatttgctcccggtttatagttagtagtgtgctgcgactggtcttgaaccgtgtcgcgtggtcgtactggtagaaccaggttgctacttgccagcagtcattgctttgattccgattttttatttaacttctttttaatcaagtatttcaaataatctaccctagaagttacttttacatctagttgtgccagaccacaaggacgacaaaataagattgtt

SEQ ID NO: 59589 - DNA, 1688 bp, Zea Mays
ccgtggccatggttgaggcatagggcatggtggctaccaaggtccattatcatcttcatttgatggacgtccacaagcttagcaccactgacatgatctgtcaagtctgaggctaggtaggacgtattgcctccattggtggtattgctacgatgagagctacacctccaacacgaagactgcagctgtggccacctaccaggctatggtatcgatatcaactagtacatctacatgacgtcaacagatcatattacaagtaatctggacaagctagcagttcagaacaaggggacaaattggacctcacagccagcagggcaggttttgggtgtgctggctggcctaacttgcgtctttagaacacttgcaagctgtcatttagttctacggatggaactggatatacaaaactttatgcagaaccctcagctgcaggagtttgaattccagaactttccgacttcttacctccgctgtgctgctcatcgtgttgcacaacattatggcttagagactatagtagcagatagtttagtagaaggctcagttagcaggattgttgcaagaaaaacagcagaaagcaggtatcctgcaatttttttatcagaagttcctagcaatcaagcaagaaatgatcatgaaacagctgagaagcttaagtttgtcatttatcaaaggcccaaagcattccaaaatggaagcgctgattctagaaacaagagtggtgtaccaaaaactgttgatgagagaatagaggaatataataaagcacgagcacgcatcttcaatggttccatttctgcagattctgatgctgcaagtattatgggaactctttctactggcaaagatgaaccagtaaatgttgacccttctgttgatgaaaccaaagtcagcacaatgaacagtcgttccagagttgctgtttttaaggatactgaaaaggatcgtagtgacccagactacgatcgaaactacaaaaggtatgttaggagctcagtgcctggcttcaacttgagcccaggtgtttttaactttgttgtgcctcagtttatgcagtatgacattggttatgtgcaatctcctggcatgtccacaaaccagcatactatgtactttggccagcctgatctaacaatagggtcttctggagctgctgtttatcgacattggccaaccccaacaatgatgtatccccattgctatgataatgttagtccaatgatgtctcaggttcctctgtaccagtctttcaaccatgattaggagattctgcttgctggaaagttgggaacaattctctgttgaacttgctatgttgtgttgtcctatgttaagtggagttcctttagattcgagccgtttttattacaaaaaattgtataaggagtcctaattcgttgaaactatttcgtgaactagtctggaactgtgatgcttgtctaatgtctagttctcgtttgcaatttgctcccggtttatagttagtagtgtgctgcgactggtcttgaaccgtgtcgcgtggtcgtactggtagaaccaggttgctacttgccagcagtcattgctttgattccgattttttatttaacttctttttaatcaagtatttcaaataatctaccctagaagttacttttacatctagttgtgccagaccacaaggacgacaaaataagattgtt

SEQ ID NO: 59590 - DNA, 1452 bp, Zea Mays
ttcatttgatggacgtccacaagcttagcaccactgacatgatctgtcaagtctgaggctaggtaggacgtattgcctccattggtggtattgctacgatgagagctacacctccaacacgaagactgcagctgtggccacctaccaggctatggtatcgatatcaactagtacatctacatgacgtcaacagatcatattacaagtaatctggacaagctagcagttcagaacaaggggacaaattggacctcacagccagcagggcagttctacggatggaactggatatacaaaactttatgcagaaccctcagctgcaggagtttgaattccagaactttccgacttcttacctccgctgtgctgctcatcgtgttgcacaacattatggcttagagactatagtagcagatagtttagtagaaggctcagttagcaggattgttgcaagaaaaacagcagaaagcaggtatcctgcaatttttttatcagaagttcctagcaatcaagcaagaaatgatcatgaaacagctgagaagcttaagtttgtcatttatcaaaggcccaaagcattccaaaatggaagcgctgattctagaaacaagagtggtgtaccaaaaactgttgatgagagaatagaggaatataataaagcacgagcacgcatcttcaatggttccatttctgcagattctgatgctgcaagtattatgggaactctttctactggcaaagatgaaccagtaaatgttgacccttctgttgatgaaaccaaagtcagcacaatgaacagtcgttccagagttgctgtttttaaggatactgaaaaggatcgtagtgacccagactacgatcgaaactacaaaagcatactatgtactttggccagcctgatctaacaatagggtcttctggagctgctgtttatcgacattggccaaccccaacaatgatgtatccccattgctatgataatgttagtccaatgatgtctcaggttcctctgtaccagtctttcaaccatgattaggagattctgcttgctggaaagttgggaacaattctctgttgaacttgctatgttgtgttgtcctatgttaagtggagttcctttagattcgagccgtttttattacaaaaaattgtataaggagtcctaattcgttgaaactatttcgtgaactagtctggaactgtgatgcttgtctaatgtctagttctcgtttgcaatttgctcccggtttatagttagtagtgtgctgcgactggtcttgaaccgtgtcgcgtggtcgtactggtagaaccaggttgctacttgccagcagtcattgctttgattccgattttttatttaacttctttttaatcaagtatttcaaataatctaccctagaagttacttttacatctagttgtgccagaccacaaggacgacaaaataagattgtt

SEQ ID NO: 59591 - DNA, 1345 bp, Zea Mays
ccatgctcatcaacaaaatggccctgctttcacatagtagagttctacggatggaactggatatacaaaactttatgcagaaccctcagctgcaggagtttgaattccagaactttccgacttcttacctccgctgtgctgctcatcgtgttgcacaacattatggcttagagactatagtagcagatagtttagtagaaggctcagttagcaggattgttgcaagaaaaacagcagaaagcaggtatcctgcaatttttttatcagaagttcctagcaatcaagcaagaaatgatcatgaaacagctgagaagcttaagtttgtcatttatcaaaggcccaaagcattccaaaatggaagcgctgattctagaaacaagagtggtgtaccaaaaactgttgatgagagaatagaggaatataataaagcacgagcacgcatcttcaatggttccatttctgcagattctgatgctgcaagtattatgggaactctttctactggcaaagatgaaccagtaaatgttgacccttctgttgatgaaaccaaagtcagcacaatgaacagtcgttccagagttgctgtttttaaggatactgaaaaggatcgtagtgacccagactacgatcgaaactacaaaaggtatgttaggagctcagtgcctggcttcaacttgagcccaggtgtttttaactttgttgtgcctcagtttatgcagtatgacattggttatgtgcaatctcctggcatgtccacaaaccagcatactatgtactttggccagcctgatctaacaatagggtcttctggagctgctgtttatcgacattggccaaccccaacaatgatgtatccccattgctatgataatgttagtccaatgatgtctcaggttcctctgtaccagtctttcaaccatgattaggagattctgcttgctggaaagttgggaacaattctctgttgaacttgctatgttgtgttgtcctatgttaagtggagttcctttagattcgagccgtttttattacaaaaaattgtataaggagtcctaattcgttgaaactatttcgtgaactagtctggaactgtgatgcttgtctaatgtctagttctcgtttgcaatttgctcccggtttatagttagtagtgtgctgcgactggtcttgaaccgtgtcgcgtggtcgtactggtagaaccaggttgctacttgccagcagtcattgctttgattccgattttttatttaacttctttttaatcaagtatttcaaataatctaccctagaagttacttttacatctagttgtgccagaccacaaggacgacaaaataagattgtt

SEQ ID NO: 59592 - DNA, 1391 bp, Zea Mays
aaatggccctgctttcacatagtagaggttttgggtgtgctggctggcctaacttgcgtctttagaacacttgcaagctgtcatttagttctacggatggaactggatatacaaaactttatgcagaaccctcagctgcaggagtttgaattccagaactttccgacttcttacctccgctgtgctgctcatcgtgttgcacaacattatggcttagagactatagtagcagatagtttagtagaaggctcagttagcaggattgttgcaagaaaaacagcagaaagcaggtatcctgcaatttttttatcagaagttcctagcaatcaagcaagaaatgatcatgaaacagctgagaagcttaagtttgtcatttatcaaaggcccaaagcattccaaaatggaagcgctgattctagaaacaagagtggtgtaccaaaaactgttgatgagagaatagaggaatataataaagcacgagcacgcatcttcaatggttccatttctgcagattctgatgctgcaagtattatgggaactctttctactggcaaagatgaaccagtaaatgttgacccttctgttgatgaaaccaaagtcagcacaatgaacagtcgttccagagttgctgtttttaaggatactgaaaaggatcgtagtgacccagactacgatcgaaactacaaaaggtatgttaggagctcagtgcctggcttcaacttgagcccaggtgtttttaactttgttgtgcctcagtttatgcagtatgacattggttatgtgcaatctcctggcatgtccacaaaccagcatactatgtactttggccagcctgatctaacaatagggtcttctggagctgctgtttatcgacattggccaaccccaacaatgatgtatccccattgctatgataatgttagtccaatgatgtctcaggttcctctgtaccagtctttcaaccatgattaggagattctgcttgctggaaagttgggaacaattctctgttgaacttgctatgttgtgttgtcctatgttaagtggagttcctttagattcgagccgtttttattacaaaaaattgtataaggagtcctaattcgttgaaactatttcgtgaactagtctggaactgtgatgcttgtctaatgtctagttctcgtttgcaatttgctcccggtttatagttagtagtgtgctgcgactggtcttgaaccgtgtcgcgtggtcgtactggtagaaccaggttgctacttgccagcagtcattgctttgattccgattttttatttaacttctttttaatcaagtatttcaaataatctaccctagaagttacttttacatctagttgtgccagaccacaaggacgacaaaataagattgtt

SEQ ID NO: 59593 - DNA, 1424 bp, Zea Mays
ccactgtttacacatatcagttccgttggacaagatcacaagatgaaaaattacttgtataaaaaatggttttgaccatcactactcactagtgaacctcgagacctgtttgaagctctagttctacggatggaactggatatacaaaactttatgcagaaccctcagctgcaggagtttgaattccagaactttccgacttcttacctccgctgtgctgctcatcgtgttgcacaacattatggcttagagactatagtagcagatagtttagtagaaggctcagttagcaggattgttgcaagaaaaacagcagaaagcaggtatcctgcaatttttttatcagaagttcctagcaatcaagcaagaaatgatcatgaaacagctgagaagcttaagtttgtcatttatcaaaggcccaaagcattccaaaatggaagcgctgattctagaaacaagagtggtgtaccaaaaactgttgatgagagaatagaggaatataataaagcacgagcacgcatcttcaatggttccatttctgcagattctgatgctgcaagtattatgggaactctttctactggcaaagatgaaccagtaaatgttgacccttctgttgatgaaaccaaagtcagcacaatgaacagtcgttccagagttgctgtttttaaggatactgaaaaggatcgtagtgacccagactacgatcgaaactacaaaaggtatgttaggagctcagtgcctggcttcaacttgagcccaggtgtttttaactttgttgtgcctcagtttatgcagtatgacattggttatgtgcaatctcctggcatgtccacaaaccagcatactatgtactttggccagcctgatctaacaatagggtcttctggagctgctgtttatcgacattggccaaccccaacaatgatgtatccccattgctatgataatgttagtccaatgatgtctcaggttcctctgtaccagtctttcaaccatgattaggagattctgcttgctggaaagttgggaacaattctctgttgaacttgctatgttgtgttgtcctatgttaagtggagttcctttagattcgagccgtttttattacaaaaaattgtataaggagtcctaattcgttgaaactatttcgtgaactagtctggaactgtgatgcttgtctaatgtctagttctcgtttgcaatttgctcccggtttatagttagtagtgtgctgcgactggtcttgaaccgtgtcgcgtggtcgtactggtagaaccaggttgctacttgccagcagtcattgctttgattccgattttttatttaacttctttttaatcaagtatttcaaataatctaccctagaagttacttttacatctagttgtgccagaccacaaggacgacaaaataagattgtt

SEQ ID NO: 59594 - DNA, 1310 bp, Zea Mays
ctatgctccaagatttgagttcagagattgcatcgaaggacctaagacaactccattacttccttggaattgagttctacggatggaactggatatacaaaactttatgcagaaccctcagctgcaggagtttgaattccagaactttccgacttcttacctccgctgtgctgctcatcgtgttgcacaacattatggcttagagactatagtagcagatagtttagtagaaggctcagttagcaggattgttgcaagaaaaacagcagaaagcaggtatcctgcaatttttttatcagaagttcctagcaatcaagcaagaaatgatcatgaaacagctgagaagcttaagtttgtcatttatcaaaggcccaaagcattccaaaatggaagcgctgattctagaaacaagagtggtgtaccaaaaactgttgatgagagaatagaggaatataataaagcacgagcacgcatcttcaatggttccatttctgcagattctgatgctgcaagtattatgggaactctttctactggcaaagatgaaccagtaaatgttgacccttctgttgatgaaaccaaagtcagcacaatgaacagtcgttccagagttgctgtttttaaggatactgaaaaggatcgtagtgacccagactacgatcgaaactacaaaagtttatgcagtatgacattggttatgtgcaatctcctggcatgtccacaaaccagcatactatgtactttggccagcctgatctaacaatagggtcttctggagctgctgtttatcgacattggccaaccccaacaatgatgtatccccattgctatgataatgttagtccaatgatgtctcaggttcctctgtaccagtctttcaaccatgattaggagattctgcttgctggaaagttgggaacaattctctgttgaacttgctatgttgtgttgtcctatgttaagtggagttcctttagattcgagccgtttttattacaaaaaattgtataaggagtcctaattcgttgaaactatttcgtgaactagtctggaactgtgatgcttgtctaatgtctagttctcgtttgcaatttgctcccggtttatagttagtagtgtgctgcgactggtcttgaaccgtgtcgcgtggtcgtactggtagaaccaggttgctacttgccagcagtcattgctttgattccgattttttatttaacttctttttaatcaagtatttcaaataatctaccctagaagttacttttacatctagttgtgccagaccacaaggacgacaaaataagattgtt

SEQ ID NO: 59595 - DNA, 1429 bp, Zea Mays
caagatttgagttcagagattgcatcgaaggacctaagacaactccattacttccttggaattgagtacttcagaaaagttaagaactggtgaaggtgaactactagagttagaggatgcaacgagttctacggatggaactggatatacaaaactttatgcagaaccctcagctgcaggagtttgaattccagaactttccgacttcttacctccgctgtgctgctcatcgtgttgcacaacattatggcttagagactatagtagcagatagtttagtagaaggctcagttagcaggattgttgcaagaaaaacagcagaaagcaggtatcctgcaatttttttatcagaagttcctagcaatcaagcaagaaatgatcatgaaacagctgagaagcttaagtttgtcatttatcaaaggcccaaagcattccaaaatggaagcgctgattctagaaacaagagtggtgtaccaaaaactgttgatgagagaatagaggaatataataaagcacgagcacgcatcttcaatggttccatttctgcagattctgatgctgcaagtattatgggaactctttctactggcaaagatgaaccagtaaatgttgacccttctgttgatgaaaccaaagtcagcacaatgaacagtcgttccagagttgctgtttttaaggatactgaaaaggatcgtagtgacccagactacgatcgaaactacaaaaggtatgttaggagctcagtgcctggcttcaacttgagcccaggtgtttttaactttgttgtgcctcagtttatgcagtatgacattggttatgtgcaatctcctggcatgtccacaaaccagcatactatgtactttggccagcctgatctaacaatagggtcttctggagctgctgtttatcgacattggccaaccccaacaatgatgtatccccattgctatgataatgttagtccaatgatgtctcaggttcctctgtaccagtctttcaaccatgattaggagattctgcttgctggaaagttgggaacaattctctgttgaacttgctatgttgtgttgtcctatgttaagtggagttcctttagattcgagccgtttttattacaaaaaattgtataaggagtcctaattcgttgaaactatttcgtgaactagtctggaactgtgatgcttgtctaatgtctagttctcgtttgcaatttgctcccggtttatagttagtagtgtgctgcgactggtcttgaaccgtgtcgcgtggtcgtactggtagaaccaggttgctacttgccagcagtcattgctttgattccgattttttatttaacttctttttaatcaagtatttcaaataatctaccctagaagttacttttacatctagttgtgccagaccacaaggacgacaaaataagattgtt

SEQ ID NO: 59596 - DNA, 1354 bp, Zea Mays
cttgcatgcacccactactgataattggactaaagcgaagatgattcttagttctacggatggaactggatatacaaaactttatgcagaaccctcagctgcaggagtttgaattccagaactttccgacttcttacctccgctgtgctgctcatcgtgttgcacaacattatggcttagagactatagtagcagatagtttagtagaaggctcagttagcaggattgttgcaagaaaaacagcagaaagcaggtatcctgcaatttttttatcagaagttcctagcaatcaagcaagaaatgatcatgaaacagctgagaagcttaagtttgtcatttatcaaaggcccaaagcattccaaaatggaagcgctgattctagaaacaagagtggtgtaccaaaaactgttgatgagagaatagaggaatataataaagcacgagcacgcatcttcaatggttccatttctgcagattctgatgctgcaagtattatgggaactctttctactggcaaagatgaaccagtaaatgttgacccttctgttgatgaaaccaaagtcagcacaatgaacagtcgttccagagttgctgtttttaaggatactgaaaaggatcgtagtgacccagactacgatcgaaactacaaaaggtatgttaggagctcagtgcctggcttcaacttgagcccaggtgtttttaactttgttgtgcctcagtttatgcagtatgacattggttatgtgcaatctcctggcatgtccacaaaccagcatactatgtactttggccagcctgatctaacaatagggtcttctggagctgctgtttatcgacattggccaaccccaacaatgatgtatccccattgctatgataatgttagtccaatgatgtctcaggttcctctgtaccagtctttcaaccatgattaggagattctgcttgctggaaagttgggaacaattctctgttgaacttgctatgttgtgttgtcctatgttaagtggagttcctttagattcgagccgtttttattacaaaaaattgtataaggagtcctaattcgttgaaactatttcgtgaactagtctggaactgtgatgcttgtctaatgtctagttctcgtttgcaatttgctcccggtttatagttagtagtgtgctgcgactggtcttgaaccgtgtcgcgtggtcgtactggtagaaccaggttgctacttgccagcagtcattgctttgattccgattttttatttaacttctttttaatcaagtatttcaaataatctaccctagaagttacttttacatctagttgtgccagaccacaaggacgacaaaataagattgtt

SEQ ID NO: 59597 - DNA, 1258 bp, Zea Mays
ctaaagcgaagatgattcttagttctacggatggaactggatatacaaaactttatgcagaaccctcagctgcaggagtttgaattccagaactttccgacttcttacctccgctgtgctgctcatcgtgttgcacaacattatggcttagagactatagtagcagatagtttagtagaaggctcagttagcaggattgttgcaagaaaaacagcagaaagcaggtatcctgcaatttttttatcagaagttcctagcaatcaagcaagaaatgatcatgaaacagctgagaagcttaagtttgtcatttatcaaaggcccaaagcattccaaaatggaagcgctgattctagaaacaagagtggtgtaccaaaaactgttgatgagagaatagaggaatataataaagcacgagcacgcatcttcaatggttccatttctgcagattctgatgctgcaagtattatgggaactctttctactggcaaagatgaaccagtaaatgttgacccttctgttgatgaaaccaaagtcagcacaatgaacagtcgttccagagttgctgtttttaaggatactgaaaaggatcgtagtgacccagactacgatcgaaactacaaaagtttatgcagtatgacattggttatgtgcaatctcctggcatgtccacaaaccagcatactatgtactttggccagcctgatctaacaatagggtcttctggagctgctgtttatcgacattggccaaccccaacaatgatgtatccccattgctatgataatgttagtccaatgatgtctcaggttcctctgtaccagtctttcaaccatgattaggagattctgcttgctggaaagttgggaacaattctctgttgaacttgctatgttgtgttgtcctatgttaagtggagttcctttagattcgagccgtttttattacaaaaaattgtataaggagtcctaattcgttgaaactatttcgtgaactagtctggaactgtgatgcttgtctaatgtctagttctcgtttgcaatttgctcccggtttatagttagtagtgtgctgcgactggtcttgaaccgtgtcgcgtggtcgtactggtagaaccaggttgctacttgccagcagtcattgctttgattccgattttttatttaacttctttttaatcaagtatttcaaataatctaccctagaagttacttttacatctagttgtgccagaccacaaggacgacaaaataagattgtt

SEQ ID NO: 59598 - DNA, 1396 bp, Zea Mays
gtcacttttacaggaactaaaggacctgtgatctgctgctgcaaggatctggtgtgataacattggggatatccatcttacaggaaatccaagttctacggatggaactggatatacaaaactttatgcagaaccctcagctgcaggagtttgaattccagaactttccgacttcttacctccgctgtgctgctcatcgtgttgcacaacattatggcttagagactatagtagcagatagtttagtagaaggctcagttagcaggattgttgcaagaaaaacagcagaaagcaggtatcctgcaatttttttatcagaagttcctagcaatcaagcaagaaatgatcatgaaacagctgagaagcttaagtttgtcatttatcaaaggcccaaagcattccaaaatggaagcgctgattctagaaacaagagtggtgtaccaaaaactgttgatgagagaatagaggaatataataaagcacgagcacgcatcttcaatggttccatttctgcagattctgatgctgcaagtattatgggaactctttctactggcaaagatgaaccagtaaatgttgacccttctgttgatgaaaccaaagtcagcacaatgaacagtcgttccagagttgctgtttttaaggatactgaaaaggatcgtagtgacccagactacgatcgaaactacaaaaggtatgttaggagctcagtgcctggcttcaacttgagcccaggtgtttttaactttgttgtgcctcagtttatgcagtatgacattggttatgtgcaatctcctggcatgtccacaaaccagcatactatgtactttggccagcctgatctaacaatagggtcttctggagctgctgtttatcgacattggccaaccccaacaatgatgtatccccattgctatgataatgttagtccaatgatgtctcaggttcctctgtaccagtctttcaaccatgattaggagattctgcttgctggaaagttgggaacaattctctgttgaacttgctatgttgtgttgtcctatgttaagtggagttcctttagattcgagccgtttttattacaaaaaattgtataaggagtcctaattcgttgaaactatttcgtgaactagtctggaactgtgatgcttgtctaatgtctagttctcgtttgcaatttgctcccggtttatagttagtagtgtgctgcgactggtcttgaaccgtgtcgcgtggtcgtactggtagaaccaggttgctacttgccagcagtcattgctttgattccgattttttatttaacttctttttaatcaagtatttcaaataatctaccctagaagttacttttacatctagttgtgccagaccacaaggacgacaaaataagattgtt

SEQ ID NO: 59599 - DNA, 1261 bp, Zea Mays
atatccatcttacaggaaatccaagttctacggatggaactggatatacaaaactttatgcagaaccctcagctgcaggagtttgaattccagaactttccgacttcttacctccgctgtgctgctcatcgtgttgcacaacattatggcttagagactatagtagcagatagtttagtagaaggctcagttagcaggattgttgcaagaaaaacagcagaaagcaggtatcctgcaatttttttatcagaagttcctagcaatcaagcaagaaatgatcatgaaacagctgagaagcttaagtttgtcatttatcaaaggcccaaagcattccaaaatggaagcgctgattctagaaacaagagtggtgtaccaaaaactgttgatgagagaatagaggaatataataaagcacgagcacgcatcttcaatggttccatttctgcagattctgatgctgcaagtattatgggaactctttctactggcaaagatgaaccagtaaatgttgacccttctgttgatgaaaccaaagtcagcacaatgaacagtcgttccagagttgctgtttttaaggatactgaaaaggatcgtagtgacccagactacgatcgaaactacaaaagtttatgcagtatgacattggttatgtgcaatctcctggcatgtccacaaaccagcatactatgtactttggccagcctgatctaacaatagggtcttctggagctgctgtttatcgacattggccaaccccaacaatgatgtatccccattgctatgataatgttagtccaatgatgtctcaggttcctctgtaccagtctttcaaccatgattaggagattctgcttgctggaaagttgggaacaattctctgttgaacttgctatgttgtgttgtcctatgttaagtggagttcctttagattcgagccgtttttattacaaaaaattgtataaggagtcctaattcgttgaaactatttcgtgaactagtctggaactgtgatgcttgtctaatgtctagttctcgtttgcaatttgctcccggtttatagttagtagtgtgctgcgactggtcttgaaccgtgtcgcgtggtcgtactggtagaaccaggttgctacttgccagcagtcattgctttgattccgattttttatttaacttctttttaatcaagtatttcaaataatctaccctagaagttacttttacatctagttgtgccagaccacaaggacgacaaaataagattgtt

SEQ ID NO: 59600 - DNA, 767 bp, Zea Mays
cctacgcctcgcatggtcggtcgcaccgaacagcacgaccagaccagttgcccggctcaccaaatccaggcgtggccgtgcgaccatccctcccctcatggcgtcatcggcggcgcgatccctcgcgctcgtcgcgtctgcctcggcatcgctcggcgtcgggcagcggtcgtgggctcgcttggctgtctcttcctcttcggctgggtcggccctccccaagctccgcgggctccgctcgttcgccgcctccgcagggggcgccgtgatggggaagccaggccccggggtcgttgacgccgacgccgggatggacgccgtccagcggcggctcatgtttgaggacgagtgcattttagtggatgaacaagacaatgtcatcggccacgagtccaagtataactgtacgtgattccgtgtgaatttgtccattccattcagttatgcacggttttgatattcaaaacaagaccgttattgatgctgactgttctttctagccgtgctcagtatgataagtatcccaatagcttgggccacagttctagtggagacagtatgcttaccaactctagaaacatcatgagcaaagtctttgatgcagccgccatctaaccatctgtctgaccagaataaaatcctgtttccatttccaaccaaccgaagattgaaagaacttccttacttgcactggcacaggcagctttaaaccatgccaaggtttgttagtatctgttttctccagccacaaccatttagcttgcagt

SEQ ID NO: 59601 - DNA, 1155 bp, Zea Mays
cctacgcctcgcatggtcggtcgcaccgaacagcacgaccagaccagttgcccggctcaccaaatccaggcgtggccgtgcgaccatccctcccctcatggcgtcatcggcggcgcgatccctcgcgctcgtcgcgtctgcgccgggatggacgccgtccagcggcggctcatgtttgaggacgagtgcattttagtggatgaacaagacaatgtcatcggccacgagtccaagtataactgccatctcatggagaagatagaagctggaaatgccctgcacagagctttcagtgttttccttttcaactccaaatatgagttgctactgcagcaaaggtctgcaacaaaagtgacatttccacttgtctggacaaacacctgctgtagccatcctctctaccgcgagtcagagttgattgaggaaaattgtgcaggggtgagaaatgcagcccagcgcaaactatttgatgagctgggaatagtggctgacgaattacctgtcgaccagttcattccgcttgggaggatgctttacaaggctccttcagatggaaaatggggcgaacacgagttggattacctcttgttcatggttcgtgacgtgaagctcgacccgaatcctgaagaggtggccgatgtcaagtacatgaaccggcatcagctgaaggagctgctcaggaaagccgatgccggggaagatggcgttaagctctccccttggttcaggctggtggtggacaactttctcatgggctggtgggatcatgtcgagcaagggactctgcagggggcagcagacatgaaaaccatccataaattgtaaatcttctagatcgcttaagcacgagtcttgccctgttgaggaataagcgcttgtcctgctgtttggtgctggaggaataatcgataaaattataacagagtgatcttaattctggaacgtaactattaacattgaaccccatctgtgatgtgtaaatttctacctaagtatcgagacatacaaagaaaaagggggcacgccaagtcaattaggttaggcaaattgatacatactatacattcaaaggcaaaggccaaaggatgtttggaagtgaagtttcactgtcttgaaagaatactgcatgtttggaagtgaagtttcactgtcttg

SEQ ID NO: 59602 - DNA, 1161 bp, Zea Mays
cctacgcctcgcatggtcggtcgcaccgaacagcacgaccagaccagttgcccggctcaccaaatccaggcgtggccgtgcgaccatccctcccctcatggcgtcatcggcggcgcgatccctcgcgctcgtcgcgtctgcctcggcgccgggatggacgccgtccagcggcggctcatgtttgaggacgagtgcattttagtggatgaacaagacaatgtcatcggccacgagtccaagtataactgccatctcatggagaagatagaagctggaaatgccctgcacagagctttcagtgttttccttttcaactccaaatatgagttgctactgcagcaaaggtctgcaacaaaagtgacatttccacttgtctggacaaacacctgctgtagccatcctctctaccgcgagtcagagttgattgaggaaaattgtgcaggggtgagaaatgcagcccagcgcaaactatttgatgagctgggaatagtggctgacgaattacctgtcgaccagttcattccgcttgggaggatgctttacaaggctccttcagatggaaaatggggcgaacacgagttggattacctcttgttcatggttcgtgacgtgaagctcgacccgaatcctgaagaggtggccgatgtcaagtacatgaaccggcatcagctgaaggagctgctcaggaaagccgatgccggggaagatggcgttaagctctccccttggttcaggctggtggtggacaactttctcatgggctggtgggatcatgtcgagcaagggactctgcagggggcagcagacatgaaaaccatccataaattgtaaatcttctagatcgcttaagcacgagtcttgccctgttgaggaataagcgcttgtcctgctgtttggtgctggaggaataatcgataaaattataacagagtgatcttaattctggaacgtaactattaacattgaaccccatctgtgatgtgtaaatttctacctaagtatcgagacatacaaagaaaaagggggcacgccaagtcaattaggttaggcaaattgatacatactatacattcaaaggcaaaggccaaaggatgtttggaagtgaagtttcactgtcttgaaagaatactgcatgtttggaagtgaagtttcactgtcttg

SEQ ID NO: 59603 - DNA, 2151 bp, Zea Mays
ctgcgactgcgagcatccgtgcagctggtctgcctgccatatgcacgcttttgtcacaggccataaacaaaaaggtgcgcgatctccgtcaacctccttgcctccactccacagcccacgcatccccctgccgctgcctgcgcctacatatctgacaaacgacctccgctctgcaccgtgccgagactgccgactaccgacagacacggtggtctgccactgccagtctgccactgccaggcgccgtcctgcagagatggcagcggcgctgaggccgaggctgctcgtgctgctcgcggtggcggccgcggcgaccgggccgtcgtgcgccggcgccggccgcgtcgacctgtggccaatgccggcgtcggtcgcccgcggcgcgcagacgctcctcgtcagcaaggacctcaggctgtccacggccgggagcagctaccccgacggcaagggcatcctcacggaggcgttccggcggatggtggccgtcgtggagctggaccacgccatcaacgggacctactcccggggcgcgcccgtgctcgccggcgtccacgtcgccgtccgctcgcccaacgacgagctcaacttcggggtggatgaatcgtacaggttgtctgtgcctgccactggggatccgctgtatgcccagatcgaggctcaaacagtttacggagcgcttcatgccttggagacatttagtcaactgtgcagctttgacttcaatgcaaacctgatcgaacttcattcagctccatggactatcctggacgctcccagattcccttaccgagggctcctcatcgatacttcaaggcactatcttcctgtcccagtgataaaaggtgtgatcgactcaatgaccttcagcaagctgaacgttcttcattggcatatcgtggacgagcaatcgtttccgctcgaaatatcttcctacccaaagttgtggaacggcgcttactcttattcagagagatatacagttgatgatgcactcgacatcgtacagtatgctgaaaaaagaggcgtgaatgtcttggctgagattgatgtacctggccatgctctttcatggggtgtcggatatccatcattgtggccatcagctacatgcaaagaaccgcttgatgtcagcaatgaatttacatttcaactgatcaatggaattctttcagatttcagcaagatttttaagttcaagtttgtccatttgggcggagatgaagtaaacacaagttgctggagtaccacaccacacattaagtcgtggttgatgcaacatagcatgaatgaatctgatgcctacagatattttgtactgagagctcaaaagatagcgatatcacatggttatgacatcattaactgggaagagacatttaacaactttggagacaagctggatcgcaaaacagtggtgcataactggcttggaagtggagttgcagagaaagtggttgctgctggtttgagatgcatcgtaagcaaccaggataagtggtacctagatcacttggatgctacatgggaaggattttacacgaatgaaccactgacaaatatctacaacccggagcagcagaaattggtacttggtggtgaggtatgcatgtggggcgaacacattgatgcatcagacattcagcagacaatttggccacgtgctgcagcagctgcagagcggctatggacaccaattgagaagctggcgaaggacacaagatcggtcactgcaagattggcacgcttcaggtgcttgctgaatcaaagaggggttgctgctgcaccactagctggttatggccgctcggcaccatcagaaccaggttcctgcttaaggcagtagatatttttcatagagtagattaataaacataattccaggcatccaatttacttctctgagcgattaaaaatagctcggatcgatgtaaggcgaacccgcagaatgttcctatttttctgatgcgctctattcatttggagatgtctggtcatgttttactttcagtgtaaggtcatgaatatcaagatttagtttcatacaccaatgaaacaaaaaaaataattagcatgtgttctaaagaaaggtgcttcaaaccttgcaagaaccaacattttagttcggatgttttaatggaaattgcatcc

SEQ ID NO: 59604 - DNA, 2200 bp, Zea Mays
cacggcaccacgtgcgtccggtggcgtttcgacggacccgcgcggcggcataaaaggaaacgaaggaaacggcagaagcgccgagcgcgcgctcctggagtggcagcgaatcttggaaggaaagcagggtcgagaacaggtgtacggacaatggcggaggccgacgagacggcggcgctgcagtacacaccgacgtggatcgtggcggcggtctgctccatcatcgtgctcatctccctcgccgccgagcggggcctccatcacctcggcaagacgctcaagaagaaccatcagaggccgctctacgaggcgctcctcaaggtcaaagaaggggacgatccagaggacatgcattcctcccagctggacagactacatgctgccgtgccaaagaccggggcacgacgaggctcctgctgcggccgcctccatggcggcgcgttttgtcgccgccgacatcctcggtgggatcagttgggcacgcgtgctcagcgagggcgagggtgcggcggcccaagccgggctgtgcgagaaggaggggaaagttccactgctgtcccttgaagccctgcatcagctgcacatcttcatatttgttctggctgtctcgcacgtatttttctgtgcttcaactatgttgccaggatgtgcaaagatacgcaaatggaagaagtgggaggaggaaattcagaaaatcgctgcagaaaatggacccaagaaggtgttacctatgcatcaagtttcatttatcagagaacgttacaagggtattggcacagattccaagacgttgtgttggctgcattcatttcgtaagcagttttatggttcggtagctaaatcagactacgccgcaatgcgtcttggttttatcatgactcactgtcgcgggaacctgaaatttgatttccacagatacatggtgagggttttagagtctgattttaagaaaatagttggtacaagctggcacttgtggatcttcgtggtgatatttctgctgctcaatgtcaacgcctcaacggtttgcacgcatacttttggatagctttccttcccctggttgtaagtgcagactctgaagtcctttatcgtctgaagttctgaacaaatccaattcagttctttcctcaaaatgcgggacactatatatgttactctcaacactggaaatcaaagatatgtgcttgagcgctgtgtaagcattgaggattactaggcgcttaagggcgtttaattacttgtttgcagcttctgctagccgttggcacaaagctggagcacgtaatagcacagctagcctacgacgtagccgagaagcagacggcgatcgagggcgatctggtcgtgacgccatcggaccagcacttctggttcgggcggccgcgtatcatcctgcacctcatccacttcatcctcttccagaacgcgttcgagctcgccttcttcttctggatactgatgacctatggattggagtcctgcttcatggaccatatcggtttcctggtgcccaggctcgttctcggggtcgtcattcagcttctctgcagctacagcacgctgccgctttatgcaattgttacccagatggggagctactacaagaaggagatcttcaacgagcatgtgcagcagggcgtgctgggctgggcacagaaggccaagaagagatcgggggtgaaggaggtcagctcgccgtccgaacccatgcacggcgaagatgcggcctaggattgggatgccgagggtaacgggtagctggcgaggacaatgatgcagcagttgtaaagcacagactagctgtaatttttttgcagatagaaccgtaaaacactgctcgtaatctttactattataaatcacaccagttttgacagtactcaataacaagtagcagcgagtttccatctaagtagaatgaaatattaaagaagatcggcaagagctttgagaggatatttcaaactaaattattcgaagacacgaaaagatctcataaactaggcttcaaaaagttgacaaaacaaattaaattagagtaggaagaagcaacaaaaaatgtggaagagaaagatgagaaagagaagtagtggtttattagttatatttcttaatcatgtaatttttaattttacatttaagttatgtgtttttagcttttttataaattatattatttatttaattaattatgtaa

SEQ ID NO: 59605 - DNA, 2103 bp, Zea Mays
aaggaaacgaaggaaacggcagaagcgccgagcgcgcgctcctggagtggcagcgaatcttggaaggaaagcagggtcgagaacaggtgtacggacaatggcggaggccgacgagacggcggcgctgcagtacacaccgacgtggatcgtggcggcggtctgctccatcatcgtgctcatctccctcgccgccgagcggggcctccatcacctcggcaagacgctcaagaagaaccatcagaggccgctctacgaggcgctcctcaaggtcaaagaaggggacgatccagaggacatgcattcctcccagctggacagactacatgctgccgtgccaaagaccggggcacgacgaggctcctgctgcggccgcctccatggcggcgcgttttgtcgccgccgacatcctcggtgggatcagttgggcacgcgtgctcagcgagggcgagggtgcggcggcccaagccgggctgtgcgagaaggaggggaaagttccactgctgtcccttgaagccctgcatcagctgcacatcttcatatttgttctggctgtctcgcacgtatttttctgtgcttcaactatgttgccaggatgtgcaaagatacgcaaatggaagaagtgggaggaggaaattcagaaaatcgctgcagaaaatggacccaagaaggtgttacctatgcatcaagtttcatttatcagagaacgttacaagggtattggcacagattccaagacgttgtgttggctgcattcatttcgtaagcagttttatggttcggtagctaaatcagactacgccgcaatgcgtcttggttttatcatgactcactgtcgcgggaacctgaaatttgatttccacagatacatgctggcacttgtggatcttcgtggtgatatttctgctgctcaatgtcaacgcctcaacggtttgcacgcatacttttggatagctttccttcccctggttgtaagtgcagactctgaagtcctttatcgtctgaagttctgaacaaatccaattcagttctttcctcaaaatgcgggacactatatatgttactctcaacactggaaatcaaagatatgtgcttgagcgctgtgtaagcattgaggattactaggcgcttaagggcgtttaattacttgtttgcagcttctgctagccgttggcacaaagctggagcacgtaatagcacagctagcctacgacgtagccgagaagcagacggcgatcgagggcgatctggtcgtgacgccatcggaccagcacttctggttcgggcggccgcgtatcatcctgcacctcatccacttcatcctcttccagaacgcgttcgagctcgccttcttcttctggatactgatgacctatggattggagtcctgcttcatggaccatatcggtttcctggtgcccaggctcgttctcggggtcgtcattcagcttctctgcagctacagcacgctgccgctttatgcaattgttacccagatggggagctactacaagaaggagatcttcaacgagcatgtgcagcagggcgtgctgggctgggcacagaaggccaagaagagatcgggggtgaaggaggtcagctcgccgtccgaacccatgcacggcgaagatgcggcctaggattgggatgccgagggtaacgggtagctggcgaggacaatgatgcagcagttgtaaagcacagactagctgtaatttttttgcagatagaaccgtaaaacactgctcgtaatctttactattataaatcacaccagttttgacagtactcaataacaagtagcagcgagtttccatctaagtagaatgaaatattaaagaagatcggcaagagctttgagaggatatttcaaactaaattattcgaagacacgaaaagatctcataaactaggcttcaaaaagttgacaaaacaaattaaattagagtaggaagaagcaacaaaaaatgtggaagagaaagatgagaaagagaagtagtggtttattagttatatttcttaatcatgtaatttttaattttacatttaagttatgtgtttttagcttttttataaattatattatttatttaattaattatgtaa

SEQ ID NO: 59606 - DNA, 2053 bp, Zea Mays
gagcgcgcgctcctggagtggcagcgaatcttggaaggaaagcagggtcgagaacaggtgtacggacaatggcggaggccgacgagacggcggcgctgcagtacacaccgacgtggatcgtggcggcggtctgctccatcatcgtgctcatctccctcgccgccgagcggggcctccatcacctcggcaagacgctcaagaagaaccatcagaggccgctctacgaggcgctcctcaaggtcaaagaagagctgatgcttctggggttcatctccctgctgctcacggtgttgcaggggacgatccagaggacatgcattcctcccagctggacagactacatgctgccgtgccaaagaccggggcacgacgaggctcctgctgcggccgcctccatggcggcgcgttttgtcgccgccgacatcctcggtgggatcagttgggcacgcgtgctcagcgagggcgagggtgcggcggcccaagccgggctgtgcgagaaggaggggaaagttccactgctgtcccttgaagccctgcatcagctgcacatcttcatatttgttctggctgtctcgcacgtatttttctgtgcttcaactatgttgccaggatgtgcaaagatacgcaaatggaagaagtgggaggaggaaattcagaaaatcgctgcagaaaatggacccaagaaggtgttacctatgcatcaagtttcatttatcagagaacgttacaagggtattggcacagattccaagacgttgtgttggctgcattcatttcgtaagcagttttatggttcggtagctaaatcagactacgccgcaatgcgtcttggttttatcatgactcactgtcgcgggaacctgaaatttgatttccacagatacatggtgagggttttagagtctgattttaagaaaatagttggtacaagctggcacttgtggatcttcgtggtgatatttctgctgctcaatgtcaacgcctcaacgcttctgctagccgttggcacaaagctggagcacgtaatagcacagctagcctacgacgtagccgagaagcagacggcgatcgagggcgatctggtcgtgacgccatcggaccagcacttctggttcgggcggccgcgtatcatcctgcacctcatccacttcatcctcttccagaacgcgttcgagctcgccttcttcttctggatactgatgacctatggattggagtcctgcttcatggaccatatcggtttcctggtgcccaggctcgttctcgggtaattcattcgcatgcatggccatggcggcctgcacagaaactcaaatgccagccacgagcatgttcttcatcctgtctcatgcgcccgtgtccttgtacgtacgtacctgcagggtcgtcattcagcttctctgcagctacagcacgctgccgctttatgcaattgttacccagatggggagctactacaagaaggagatcttcaacgagcatgtgcagcagggcgtgctgggctgggcacagaaggccaagaagagatcgggggtgaaggaggtcagctcgccgtccgaacccatgcacggcgaagatgcggcctaggattgggatgccgagggtaacgggtagctggcgaggacaatgatgcagcagttgtaaagcacagactagctgtaatttttttgcagatagaaccgtaaaacactgctcgtaatctttactattataaatcacaccagttttgacagtactcaataacaagtagcagcgagtttccatctaagtagaatgaaatattaaagaagatcggcaagagctttgagaggatatttcaaactaaattattcgaagacacgaaaagatctcataaactaggcttcaaaaagttgacaaaacaaattaaattagagtaggaagaagcaacaaaaaatgtggaagagaaagatgagaaagagaagtagtggtttattagttatatttcttaatcatgtaatttttaattttacatttaagttatgtgtttttagcttttttataaattatattatttatttaattaattatgtaa

SEQ ID NO: 59607 - DNA, 577 bp, Zea Mays
actagctcattttctctcccccacgtattcttctccctggttcgattcaccaaaaccgctcgtctctcagcctgtctcgccgcgccgtccatctgccggagctcaccgctaccgtacgtgctgattcaagacccaccgtccgtcgtcgcgagggcgagatcgcggttcgtttcagagcttcgaggaatcgacggtcaagcttcggcgaccaaatgatccagttctttgagttctacgagatcgaagaccctgagcatctgtttggtgaaggcaagtgtcctctgatctattatgtcccatttactttataattcatcaacccgcataccatgatcaacctaaggattgactagctttgtatttaccttgtccttgattaccttttgggttactatggttagcattctgctattgcctcaacttaatcaatgaacatgatgtgactatttatgatactgttatcctgatgatgttgatgatcttgtgatactctagggggctcaggttgtttcctgagtacctctccgtaaggacctgttcgttgagagaccacccgggataacagtgcaaccatgag

SEQ ID NO: 59608 - DNA, 4410 bp, Zea Mays
cgttgatgtgtactcatccttgctttaccacaaaacaccaggttgtccgcattgtaatcactgctccggagaagacgaagtcgtggaaggagacttccaggagttccaagactacgacgaattctaggtgtggattggcggcaacccccagtcagctgcctgtgaaggccttatctttactgcgtttcgctagcactttgatttacttgttaagacaatgactatgtggatgtctatgactctatgatgtaataagtactcttttatgttattattcgagcattgtgtgatgatgttcatttatgtaaccgctgtgtacgtgagttctgatcctggcacgtacatggttcgcattcggtttaccttcaaaaccgggtgtgacgtaagtggtatcaaagtcgtgctgactgtaggaccgctagcctagagtagcattggccgttttaaggacttattgattattacttcacctcatccttgattttgattcaaaatattagtcacctcgactaattctatgttgtgctcctatatgcccccttgccaaaaagtattctattctagtatggtctatacttctctcaatctattagacctgatctcactcttgtgcttgcgacatctttgtagatgccccctgaccataaccttcttgtctttttgggattcttttgtctttcgtcattaaattgctaccatatggcaaactctagttctttggtattgacatgcttgtatccctttaatactcttgtttcgaatacttgcctataaatttctactacctacatagacatttcagtttatatgtccatgatcttcctgtcttttgagaccctttcctcttctgttgttaagtcgctatctttcggcaatttcttgtcccttggtattggtatgctcatctccttgaaatctctcatactctcatcttttttatgcttagctttatatccaaaggtctgtttaagatatttcattctacatgatcttgaccactcttgtttcttaatgacccattagcagtcattttattttgcacattcttggagatctcgttaattccttgtcacttcctttggtaatgaatttttactccaactcttttgttggaaccctacctatcttacccttgattgttttccccacttcgccacttcgtgagtcatgtctcaactctatcctttgttatgcttttcgttattatcactgtcacctttgacatctctatatcttacattgaggtttatcttatacttgccctttaaagtctcctctctcccatctcaatctgagagttgtatgttttacctatttttctttgggacgaatcatcttctttgtcacttgcgagtttttaacttcgtcctttgcctacttttgtttgttattatcattacctttctcatcccttgatcttaccttggtgattacattatgtctgttattgaaaatctccaatctcctatcccaatctgagagcggtgttttacttatcttacccttggcaatattctcttctttaccgcgtgtaagccttgacataactccattctttgttgtaattatgccactggctctccaatgccctcatcttttctctcatacccttgtctattatccctttgacccttgagttatagatgtcttctacctaaatgcttaccttgaacttatcctttaaaagccttccctttctttcgaccaagtttgagagttgtgagctacctatctcttccttgatttcttttcacttcatgtcaccttacaagttgtcttaattccatcttttgttgtgtttttatttgctatcgtcatcaccttatcatccatcgatcttgccttgatactcatctttattaatacccttcaaaaatctcctctcttccacctcaatttgagagcgacaattcacctatctggcccttggacgtaccctctccttttccatttgatggtctggtcttaactccattatttatggtacttgtatccttcgtcttatgcctatttatctcctctcatacatccttgtccgttattacctttaaaaccctcgtgatatctatgcccttgccttcctgcttaccttgaacctaccctttgaagccctctcttttccatcactgttcaaggataatgcctaatctatttcaccattgactgctcccccttctttgacaccttgcaagtcttgtctaaaatatatcttttattgtgtgtttgttcattataaccttaacccttgtcatccctcgatcgttaccttgatgcttatcttgtacctgcattttaaggccgcctctccaatttcatttcaagagtgatgtcttacccatcccgctctttttctttcccttttcctctgtcgcgttgcaagtcttagcttttgctcgatatcacccttacctttgtaatatctagatcttcccatgatgcttatattatgcctaccatttgactcatcatctttcccatctcgatttgagaattgtgttttacctatcctgaccttggttgcattctctccctttcggttccaatccttgctttagctccaccctttattatgcccatgcccctatcctacatttcttattattccccttgcctttcgatggccttagaatagtttccccttggtaaggaaagaccaccatttaattaaaagttacatatagcaacgagatatttgttgttgtatgcttgtgctgtttgtctttgtgttatgactgatttgcttcttcgggatgagtgttggtgtgttgtggcccttggtccacaatggaatctgtttactaggtgaatgccatagagttaagtatttgggttctccccctgctctctctaatccgtctatacctaccttttctcgctattctttcctcttgcacctgtccatttggcaacctccaactcctccaaatcaatcaagatcagagtcggcagcatcttcaccaagtgcatatcaacactcctattaagggggttagccgctaaccccaatgaagacaatgcgatcaacatcagcaaccaagatcaaagtggcgcagcggaagcgtgtgtggggtcctaacccacaggtctaagagatcctcaagaattgcatcgatcggtctcaagcatctgaaagtcaaagcaaaccagtccccaggttaagcttgcagagtcaaagtcaactcaagaaagtcgtggacaaccgatgaaccagacttgtttttcttgctagcttcttcttgaatctcgggggcgagattctgttaagggggttagatttgtaacaccctgaatttgggggtataaaatttcttttcaataatacaccaaattcaggtgttaccctcttctttcattgcctttctttctcttttcaaaatagtgaatgaatattttgcttttatgtaagtattagatgtattaatgaaactcaaaaggggtttttgattgttgcatcacatgctggagcattaatttttgttgttgttgattgagttgaaggagttttactattaaatttattctctttttttaagcctaatttaattaatatgagaaatttacctaaacatatttattgaatattatttggaaatattattattattatatttttttaatatttaaaaaaacatacatttatttatatattttgaataacttacatgaagaaaaaaagaaagaaaaaaagaatttcgaaataaaaaaaaagaaataaaaaaaatcaaccgttggccaacccagcccacgatccccctccccacgtgcaccaactcccaccccatccttttttctttttcttcatgcctatgacggtgggccctactagctcattttctctcccccacgtattcttctccctggttcgattcaccaaaaccgctcgtctctcagcctgtctcgccgcgccgtccatctgccggagctcaccgctaccgtacgtgctgattcaagacccaccgtccgtcgtcgcgagggcgagatcgcggttcgtttcagagctccgaggaatcgacggtcaagcttcggcgaccaaatgatccagttctttgagttctacgagatcgaagaccctgagcatctgtttggtgaaggcaagtgtcctctgacctattatgtcccatttactttataattcatcaacccgcataccatgatcaacctaaggattgactagctttgtatttaccttgtccttgattaccttttgggttactatggttagcattctgctattgcctcaacttaatcaatgaacatgatgtgactatttatgatactgttatcctgatgatgttgatgatcttgtgatactctagggggctcaggttgtttcctgagtacctctccgtaaggacctgttcgttgagagaccacccgggataacagtgcaaccatgagggtggaatgggg

SEQ ID NO: 59609 - DNA, 1402 bp, Zea Mays
attgccatctctaaacctcacccctccctagtatgcgaccctgtttcctgtctcctaccctcttgcggtcttgccagcgccccttcctcccttcgtctccgccgccgcggactcctcgccggaaccctaaatggaccccggcgccggtgcacactactccgcccgtaccgcggaggaagtcttccgcgatttccgcggccgccgcgcgggcatgatcaaggccctcaccaacgatgtggagaagttctaccagctgtgcgaccccggtgagtctgctcgacctcctcggggccgccgacagtcactttgctagggttcgggcgttcggtcgccctgcttggtgtccccaagctaaattttccactcgctgtctggaaatgagaacctagtactggtccactgtggtttcagttgatgatgtaatggtttggagtgtggtgactgaaaaggaaaacttgtgcctttatggctaccccaacgaaacatgggaagtaactttgccagcagaggaagttcctccagagatccctgaaccagctttgggtataaactttgctagggatggcatgaacgagaaggattggttggcgttagttgctgtccacagcgatgcctggttactagctgttgcattctactttgcagcccggtttgggtttgacaaagaggccaggcggcgactcttcaacatgataaataacttgcccacaatatttgaagtagcgactggggttgccaagaaacaaaacaaggagaaggaacccaataataccagcaaaagcaacaaaccaagttcgaaaatgacaacaagacccgagtctcatttgaaggcgacaaaagtggcgccccctaaggatgaagatgatgagagcggtgaagagtatgaagaagaggaagagcgtgataacaccttatgtggatcctgtggaacaaatgacggcaaggacgaattctggatctgttgtgatagttgcgagcggtggtaccatgggaagtgtgtcaagatcacgcctgcacgagctgagcacatcaagcactacaaatgcccagattgcagcaacaagagggcaagagcctagcaccaagccctgctgtgactctggagtgaagtaagcgccaaatcattgatgtctgcagatatatgcctagctgtctagcttgtagacttgctttccatttggaatgaacgctgttgattcactcggttgccctcagcagctcatgttgctcaggcttaattgtgtttaatgttttactagcgaaacaaaatgtgccagtgtgttgcatcggagcgtatattttattatccggtaatcgtacccatagcaaacttgtctatacgttgcaacaggacgtattattgtgcggttatttaaggctagccatttttgtttgactaaaa

SEQ ID NO: 59610 - DNA, 991 bp, Zea Mays
atttgacttgccttcgatactacactggaaaataaaaggaaaacttgtgcctttatggctaccccaacgaaacatgggaagtaactttgccagcagaggaagttcctccagagatccctgaaccagctttgggtataaactttgctagggatggcatgaacgagaaggattggttggcgttagttgctgtccacagcgatgcctggttactagctgttgcattctactttgcagcccggtttgggtttgacaaagaggccaggcggcgactcttcaacatgataaataacttgcccacaatatttgaagtagcgactggggttgccaagaaacaaaacaaggagaaggaacccaataataccagcaaaagcaacaaaccaagttcgaaaatgacaacaagacccgagtctcatttgaaggcgacaaaagtggcgccccctaaggatgaagatgatgagagcggtgaagagtatgaagaagaggaagagcgtgataacaccttatgtggatcctgtggaacaaatgacggcaaggacgaattctggatctgttgtgatagttgcgagcggtggtaccatgggaagtgtgtcaagatcacgcctgcacgagctgagcacatcaagcactacaaatgcccagattgcagcaacaagagggcaagagcctagcaccaagccctgctgtgactctggagtgaagtaagcgccaaatcattgatgtctgcagatatatgcctagctgtctagcttgtagacttgctttccatttggaatgaacgctgttgattcactcggttgccctcagcagctcatgttgctcaggcttaattgtgtttaatgttttactagcgaaacaaaatgtgccagtgtgttgcatcggagcgtatattttattatccggtaatcgtacccatagcaaacttgtctatacgttgcaacaggacgtattattgtgcggttatttaaggctagccatttttgtttgactaaaa

SEQ ID NO: 59611 - DNA, 2984 bp, Zea Mays
cccaaatacttctcatccccactccccagcgtcctctgctctgccgccgcacccaactaaagcgcagtgcgtggccagtagtgtggacgtgcggtggcttcacgctcgcaccgctcgccagcccggaccctaatccagcgtgcttggcgcgagcacggaaggaatccccgtagcgaggaaggaatcaccggcagcgggtggaaagcttcacggggcccaagcaggggctgcaggaggccgcgaccgggctgtttcggctcatgcctggatctgggggagagggacgcgcggagccgcgccgcgccggatcccgttcgtcggcgcccggatggtgatcagcggttccagggtttacaagtaacgtttgcacaacaatagtgaactaggtacacactacaagatgacaactgaggtcaatcaaaacttttttgcatggtcacaggaggaaacttcggtgcaagatctttcacagggaacatcacaaatgtttggtcatggttccatatcttttggaagatttgacttggaatcattagaatgggagaaatggtctgtatttaccaatgacaggcgtcatgaagagtttggaaagttcaatggattagttgcgaagaagaaggcatactttgaagaatactttaagaggattagggagcttaaggctttacagcaacaggaccagcaaactgaacttcatctggagtactgtggtgatggcagcgattctagtcaaacaggagaatatgaaccagctgcagcccatggagctcctactgaatctgaaacacttgttgaagattccacaaagcagacagcagctgcaaccacgtttgaacatggaacggaatgctacggttatcatgagaatgggagtttagttaatgaaatttctgcaccaacccatttttcacctgttggtgatttgcagcatataggcaaacaaatgaaaggaagtgttagtggcaaaatggatatattgaagcaagatgctaattccagccaagatgttcctatgatccatgagattatgatcactcctaacaaacgagcaattgagaaagactctcgggttggtcaggcttcaaaaacaatttcgaagactgtcaagggaccctgttcaggcgagcctagtgtgataaaccagatggcgaaaccagaaaatatcctgtcattgcggaggccaagagaagcaaccagtgatttagttggcaccacagcaagaagtggtattacaggtgtaagaagaccttcagcagcattacaacggccctctaccaaagaacggcgacctgtcacaaaagatgcttcaaggaagcatgctgaagttaccaccccatgccgtccatctacttctgaaagacgcacggtgaccggagagtcggcactaaagcctgaaaacaatgctattccatgtcgacctgttaccgctcacagacgccctatcaccaaagaatcagcaacaaggcaatgcagcattgctacaccacgccggccttctactgctgacaggcgccctgccaccaaagatctaacaccaaagctatccaacattgctgccccacatcgaccttctactgctcacaggcgccctatatccaaagagtcggcaccaaagcatttcaatgttgctagcccacatagaccttctactgttgaaaggcacactagtggcagagatatgacatcgaagtatgttggtattgctacctcatatctgccatctgctgtcaaacagcgccctatcactggagagggtgcacataagcatgctgatgttgtcaccctgagctgttctactgctgataggcgccccattagagacgttgcaccaaagtatgccactttagctctgccaaggagaccgtctactgccgagaggcaccccattgctagagatattgcaccaaagaatggtttatcactcagaccttctactgcagagaggcgaaccattgctagaaatgttgaaccaaagcatgcaccggcacagaggccttctactgctgagagacgtcctgttaccagagagactgtactgaagcaagctaatgttgccaactcatgtttacctttgacgccagatagacgcctcaccaaaaaaggtgacatttccacccttgagtgcccttctacaggaggaaggtgccctatcaccagtggtactgcactctggtcaagaacaatgccgtactattcaaagggtgctttggtcacagaagttactccccagaagacaataactcccagggttgttagaaacagcaagctagaaaacctaagctatgcaaaagaaagggtggaacttcaagtggatagaaagcaaaagtcaagtctttttaacctgtcctcgaagaaaacattgacttccaacgttagagatgaccaaggtcttgaaatgttcaaaaagccaaacaaggaggggggagttcgggctcatgcatacaaatcaaataatgcaactacttcatggaccggaaatgtaaagacaaaggctcctgtgcctccgcctctgccaccgcgccgaccgtactgcactgagaagaaaccgaatgtcaacagttcacctgttggtggaagaaagacaaaggcctcagctccacactggcactgaccccattatctaggatcctgcagcataactctgaagccgtgaagcggatgaaatctgatgaaaagttgggattttgctgatgttcggctccagaacaagctgcagccactagactacagtgacatgcctcccatttggcgtcttcaaagtagtgttcatcacttcgttcttcaaccccattcttaatgactcgcggtccaacgtattagctctcacccctaacatattcaacctaacatattcagcagcatgtagagtggctgatgtaagtgcatgtacaactctattcaatagagagtcttttttgaaaggtttttagggctaattaaaaaatataaaagatgtgctcttcatgaaaagattgtctttatac

SEQ ID NO: 59612 - DNA, 3382 bp, Zea Mays
cccaaatacttctcatccccactccccagcgtcctctgctctgccgccgcacccaactaaagcgcagtgcgtggccagtagtgtggacgtgcggtggcttcacgctcgcaccgctcgccagcccggaccctaatccagcgtgcttggcgcgagcacggaaggaatccccgtagcgaggaaggaatcaccggcagcgggtggaaagcttcacggggcccaagcaggggctgcaggaggccgcgaccgggctgtttcggctcatgcctggatctgggggagagggacgcgcggagccgcgccgcgccggatcccgttcgtcggcgcccggatggtgatcagcggttccagggtttacaagtaacgtttgcacaacaatagtgaactaggtacacactacaagatgacaactgaggtcaatcaaaacttttttgcatggtcacaggaggaaacttcggtgcaagatctttcacagggaacatcacaaatgtttggtcatggttccatatcttttggaagatttgacttggaatcattagaatgggagaaatggtctgtatttaccaatgacaggcgtcatgaagagtttggaaagttcaatggattagttgcgaagaagaaggcatactttgaagaatactttaagaggattagggagcttaaggctttacagcaacaggaccagcaaactgaacttcatctggagtactgtggtgatggcagcgattctagtcaaacaggagaatatgaaccagctgcagcccatggagctcctactgaatctgaaacacttgttgaagattccacaaagcagacagcagctgcaaccacgtttgaacatggaacggaatgctacggttatcatgagaatgggagtttagttaatgaaatttctgcaccaacccatttttcacctgttggtgatttgcagcatataggcaaacaaatgaaaggaagtgttagtggcaaaatggatatattgaagcaagatgctaattccagccaagatgttcctatgatccatgagattatgatcactcctaacaaacgagcaattgagaaagactctcgggttggtcaggcttcaaaaacaatttcgaagactgtcaagggaccctgttcaggcgagcctagtgtgataaaccagatggcgaaaccagaaaatatcctgtcattgcggaggccaagagaagcaaccagtgatttagttggcaccacagcaagaagtggtattacaggtgtaagaagaccttcagcagcattacaacggccctctaccaaagaacggcgacctgtcacaaaagatgcttcaaggaagcatgctgaagttaccaccccatgccgtccatctacttctgaaagacgcacggtgaccggagagtcggcactaaagcctgaaaacaatgctattccatgtcgacctgttaccgctcacagacgccctatcaccaaagaatcagcaacaaggcaatgcagcattgctacaccacgccggccttctactgctgacaggcgccctgccaccaaagatctaacaccaaagctatccaacattgctgccccacatcgaccttctactgctcacaggcgccctatatccaaagagtcggcaccaaagcatttcaatgttgctagcccacatagaccttctactgttgaaaggcacactagtggcagagatatgacatcgaagtatgttggtattgctacctcatatctgccatctgctgtcaaacagcgccctatcactggagagggtgcacataagcatgctgatgttgtcaccctgagctgttctactgctgataggcgccccattagagacgttgcaccaaagtatgccactttagctctgccaaggagaccgtctactgccgagaggcaccccattgctagagatattgcaccaaagaatggtttatcactcagaccttctactgcagagaggcgaaccattgctagaaatgttgaaccaaagcatgcaccggcacagaggccttctactgctgagagacgtcctgttaccagagagactgtactgaagcaagctaatgttgccaactcatgtttacctttgacgccagatagacgcctcaccaaaaaaggtgacatttccacccttgagtgcccttctacaggaggaaggtgccctatcaccagtggtactgcactctggtcaagaacaatgccgtactattcaaagggtgctttggtcacagaagttactccccagaagacaataactcccagggttgttagaaacagcaagctagaaaacctaagctatgcaaaagaaagggtggaacttcaagtggatagaaagcaaaagtcaagtctttttaacctgtcctcgaagaaaacattgacttccaacgttagagatgaccaaggtcttgaaatgttcaaaaagccaaacaaggaggggggagttcgggctcatgcatacaaatcaaataatgcaactacttcatggaccggaaatgtaaagacaaaggctcctgtgcctccgcctctgccaccgcgccgaccgtactgcactgagaagaaaccgaatgtcaacagttcacctgttggtggaagaaagacaaaggcctcagctccacactggcactgaccccattatctaggatcctgcagcataactctgaagccgtgaaggtaaaagctatgcgtctgacgtgacctagaaggctgcatccatcaagcaacgattgatgttatctattgtagcttaccagcagtcttgtgacttgtcacctgtgttagaataaccgtagtagttagtgtatgtagcaacgcgtagcatatatatatatatatatccactaatgtctaattgaaccgtagtagaactgccctggatttaactagaacattgtatatacctggaataattggagcttgagtatcgaaccaggagttatccgcacggttttgcaggtcacatcacatgctgctttgaaccgttgagagatgttcatctgtttgctgtccgcgtacctgtcttcgtcctgcacgtctcttctggaactgattgccagccctgtaataaccagcggatgaaatctgatgaaaagttgggattttgctgatgttcggctccagaacaagctgcagccactagactacagtgacatgcctcccatttggcgtcttcaaagtagtgttcatcacttcgttcttcaaccccattcttaatgactcgcggtccaacgtattagctctcacccctaacatattcaacctaacatattcagcagcatgtagagtggctgatgtaagtgcatgtacaactctattcaatagagagtcttttttgaaaggtttttagggctaattaaaaaatataaaagatgtgctcttcatgaaaagattgtctttatac

SEQ ID NO: 59613 - DNA, 3142 bp, Zea Mays
cccaaatacttctcatccccactccccagcgtcctctgctctgccgccgcacccaactaaagcgcagtgcgtggccagtagtgtggacgtgcggtggcttcacgctcgcaccgctcgccagcccggaccctaatccagcgtgcttggcgcgagcacggaaggaatccccgtagcgaggaaggaatcaccggcagcgggtggaaagcttcacggggcccaagcaggggctgcaggaggccgcgaccgggctgtttcggctcatgcctggatctgggggagagggacgcgcggagccgcgccgcgccggatcccgttcgtcggcgcccggatggtgatcagcggttccagggtttacaagtaacgtttgcacaacaatagtgaactaggtacacactacaagatgacaactgaggtcaatcaaaacttttttgcatggtcacaggaggaaacttcggtgcaagatctttcacagggaacatcacaaatgtttggtcatggttccatatcttttggaagatttgacttggaatcattagaatgggagaaatggtctgtatttaccaatgacaggcgtcatgaagagtttggaaagttcaatggattagttgcgaagaagaaggcatactttgaagaatactttaagaggattagggagcttaaggctttacagcaacaggaccagcaaactgaacttcatctggagtactgtggtgatggcagcgattctagtcaaacaggagaatatgaaccagctgcagcccatggagctcctactgaatctgaaacacttgttgaagattccacaaagcagacagcagctgcaaccacgtttgaacatggaacggaatgctacggttatcatgagaatgggagtttagttaatgaaatttctgcaccaacccatttttcacctgttggtgatttgcagcatataggcaaacaaatgaaaggaagtgttagtggcaaaatggatatattgaagcaagatgctaattccagccaagatgttcctatgatccatgagattatgatcactcctaacaaacgagcaattgagaaagactctcgggttggtcaggcttcaaaaacaatttcgaagactgtcaaggtgacttctagtaatgtttctgatcacacatacgtttccaagggaccctgttcaggcgagcctagtgtgataaaccagatggcgaaaccagaaaatatcctgtcattgcggaggccaagagaagcaaccagtgatttagttggcaccacagcaagaagtggtattacaggtgtaagaagaccttcagcagcattacaacggccctctaccaaagaacggcgacctgtcacaaaagatgcttcaaggaagcatgctgaagttaccaccccatgccgtccatctacttctgaaagacgcacggtgaccggagagtcggcactaaagcctgaaaacaatgctattccatgtcgacctgttaccgctcacagacgccctatcaccaaagaatcagcaacaaggcaatgcagcattgctacaccacgccggccttctactgctgacaggcgccctgccaccaaagatctaacaccaaagctatccaacattgctgccccacatcgaccttctactgctcacaggcgccctatatccaaagagtcggcaccaaagcatttcaatgttgctagcccacatagaccttctactgttgaaaggcacactagtggcagagatatgacatcgaagtatgttggtattgctacctcatatctgccatctgctgtcaaacagcgccctatcactggagagggtgcacataagcatgctgatgttgtcaccctgagctgttctactgctgataggcgccccattagagacgttgcaccaaagtatgccactttagctctgccaaggagaccgtctactgccgagaggcaccccattgctagagatattgcaccaaagaatggtttatcactcagaccttctactgcagagaggcgaaccattgctagaaatgttgaaccaaagcatgcaccggcacagaggccttctactgctgagagacgtcctgttaccagagagactgtactgaagcaagctaatgttgccaactcatgtttacctttgacgccagatagacgcctcaccaaaaaaggtgacatttccacccttgagtgcccttctacaggaggaaggtgccctatcaccagtggtactgcactctggtcaagaacaatgccgtactattcaaagggtgctttggtcacagaagttactccccagaagacaataactcccagggttgttagaaacagcaagctagaaaacctaagctatgcaaaagaaagggtggaacttcaagtggatagaaagcaaaagtcaagtctttttaacctgtcctcgaagaaaacattgacttccaacgttagagatgaccaaggtcttgaaatgttcaaaaagccaaacaaggaggggggagttcgggctcatgcatacaaatcaaataatgcaactacttcatggaccggaaatgtaaagacaaaggctcctgtgcctccgcctctgccaccgcgccgaccgtactgcactgagaagaaaccgaatgtcaacagttcacctgttggtggaagaaagacaaaggcctcagctccacactggcactgaccccattatctaggatcctgcagcataactctgaagccgtgaaggtcacatcacatgctgctttgaaccgttgagagatgttcatctgtttgctgtccgcgtacctgtcttcgtcctgcacgtctcttctggaactgattgccagccctgtaataaccagcggatgaaatctgatgaaaagttgggattttgctgatgttcggctccagaacaagctgcagccactagactacagtgacatgcctcccatttggcgtcttcaaagtagtgttcatcacttcgttcttcaaccccattcttaatgactcgcggtccaacgtattagctctcacccctaacatattcaacctaacatattcagcagcatgtagagtggctgatgtaagtgcatgtacaactctattcaatagagagtcttttttgaaaggtttttagggctaattaaaaaatataaaagatgtgctcttcatgaaaagattgtctttatac

SEQ ID NO: 59614 - DNA, 2277 bp, Zea Mays
caaggaccctgttcaggcgagcctagtgtgataaaccagatggcgaaaccagaaaatatcctgtcattgcggaggccaagagaagcaaccagtgatttagttggcaccacagcaagaagtggtattacaggtgtaagaagaccttcagcagcattacaacggccctctaccaaagaacggcgacctgtcacaaaagatgcttcaaggaagcatgctgaagttaccaccccatgccgtccatctacttctgaaagacgcacggtgaccggagagtcggcactaaagcctgaaaacaatgctattccatgtcgacctgttaccgctcacagacgccctatcaccaaagaatcagcaacaaggcaatgcagcattgctacaccacgccggccttctactgctgacaggcgccctgccaccaaagatctaacaccaaagctatccaacattgctgccccacatcgaccttctactgctcacaggcgccctatatccaaagagtcggcaccaaagcatttcaatgttgctagcccacatagaccttctactgttgaaaggcacactagtggcagagatatgacatcgaagtatgttggtattgctacctcatatctgccatctgctgtcaaacagcgccctatcactggagagggtgcacataagcatgctgatgttgtcaccctgagctgttctactgctgataggcgccccattagagacgttgcaccaaagtatgccactttagctctgccaaggagaccgtctactgccgagaggcaccccattgctagagatattgcaccaaagaatggtttatcactcagaccttctactgcagagaggcgaaccattgctagaaatgttgaaccaaagcatgcaccggcacagaggccttctactgctgagagacgtcctgttaccagagagactgtactgaagcaagctaatgttgccaactcatgtttacctttgacgccagatagacgcctcaccaaaaaaggtgacatttccacccttgagtgcccttctacaggaggaaggtgccctatcaccagtggtactgcactctggtcaagaacaatgccgtactattcaaagggtgctttggtcacagaagttactccccagaagacaataactcccagggttgttagaaacagcaagctagaaaacctaagctatgcaaaagaaagggtggaacttcaagtggatagaaagcaaaagtcaagtctttttaacctgtcctcgaagaaaacattgacttccaacgttagagatgaccaaggtcttgaaatgttcaaaaagccaaacaaggaggggggagttcgggctcatgcatacaaatcaaataatgcaactacttcatggaccggaaatgtaaagacaaaggctcctgtgcctccgcctctgccaccgcgccgaccgtactgcactgagaagaaaccgaatgtcaacagttcacctgttggtggaagaaagacaaaggcctcagctccacactggcactgaccccattatctaggatcctgcagcataactctgaagccgtgaaggtaaaagctatgcgtctgacgtgacctagaaggctgcatccatcaagcaacgattgatgttatctattgtagcttaccagcagtcttgtgacttgtcacctgtgttagaataaccgtagtagttagtgtatgtagcaacgcgtagcatatatatatatatatatccactaatgtctaattgaaccgtagtagaactgccctggatttaactagaacattgtatatacctggaataattggagcttgagtatcgaaccaggagttatccgcacggttttgcaggtcacatcacatgctgctttgaaccgttgagagatgttcatctgtttgctgtccgcgtacctgtcttcgtcctgcacgtctcttctggaactgattgccagccctgtaataaccagcggatgaaatctgatgaaaagttgggattttgctgatgttcggctccagaacaagctgcagccactagactacagtgacatgcctcccatttggcgtcttcaaagtagtgttcatcacttcgttcttcaaccccattcttaatgactcgcggtccaacgtattagctctcacccctaacatattcaacctaacatattcagcagcatgtagagtggctgatgtaagtgcatgtacaactctattcaatagagagtcttttttgaaaggtttttagggctaattaaaaaatataaaagatgtgctcttcatgaaaagattgtctttatac

SEQ ID NO: 59615 - DNA, 1499 bp, Zea Mays
tcatgcctttcgcgagagaaagtggtcgaatcggcggctgatttgacccggctcgctattagagctgcgaaagtgatccgagcagtcacggtttcggaagcggcgcgtcggccggaggagaaacgcaaccagctgtcgaggagctatgagcagcggtggcggaggcagagtgccggcggcggcggcggcgcagtcgcaggagctgcagctaccgccggggttccggttccacccgacggatgaggagctggtggtgcactacctctgccggcgctgcgccgggctgcccatctccgtgcccatcatcgccgaggtcgacctatacaagcacgatccctggcagctcccaaggatggcgctgtacggcgagaaggagtggtacttcttctccccgcgggaccgcaagtacccgaacgggtcgcggccgaaccgcgccgccggcgccgggtactggaaggccaccggcgcagacaagccggtgggcacgccgaagccggtggccatcaagaaggctctcgtcttctacgccggcaaggcgcccaagggcgacaagaccaactggatcatgcatgagtaccgcctcgccgacgtcgaccgcaccgcccgcaagaagaacaacagcctcaggatttttttcctctcggttttttttttgctgttgcagttggatgattgggtgctgtgccgaatctacaacaagaaaggcgcgctggagaagccgaccggagccggcggcagggccgaggccagcagccagggcgcgctggggtccatgtccatgggctcgccgccggagcagaagccgtccgtgctgccgtctgccacggcaacggcaacggccgcggccgggacggggtacgcgccgctgccgttctcggagctggcggcgtactacgaggtccggccgtccgactcgatgccccgggcgcacggcgcggactcgagctgctcgggccacgcgctggccgccacgtcgtcgtgcggcggcggcggcggcgagcggcctgaggtacagagccagcccaagatcgccgagtgggagcgcactttcgccgccggcgccggcccgggaatcaacccggccggctcgatgctggggcttggcgggcatcagctcggctccgcggcggtgggggtagggctgcccgccggcgacccgctgctccaggacatcctcacatactggggcaagccgtactgagaaagatgactggtccgagccgccggcgatgaggccatgtcggcttgtgaatgatcatggagctggactacaggattattgctgctacgagttgaattaaactgtttatatgcgattgatttggtactgggatttttgtatacttgaattagtactctctctatatagagagacatacacatactcgagtatatatgttttgcttatatatagagtatggaataatatttatatctgctggtccatcctgcaacccgcacaccagttgccatcggacatttttttaaggacagttgcc

SEQ ID NO: 59616 - DNA, 1395 bp, Zea Mays
tcatgcctttcgcgagagaaagtggtcgaatcggcggctgatttgacccggctcgctattagagctgcgaaagtgatccgagcagtcacggtttcggaagcggcgcgtcggccggaggagaaacgcaaccagctgtcgaggagctatgagcagcggtggcggaggcagagtgccggcggcggcggcggcgcagtcgcaggagctgcagctaccgccggggttccggttccacccgacggatgaggagctggtggtgcactacctctgccggcgctgcgccgggctgcccatctccgtgcccatcatcgccgaggtcgacctatacaagcacgatccctggcagctcccaaggatggcgctgtacggcgagaaggagtggtacttcttctccccgcgggaccgcaagtacccgaacgggtcgcggccgaaccgcgccgccggcgccgggtactggaaggccaccggcgcagacaagccggtgggcacgccgaagccggtggccatcaagaaggctctcgtcttctacgccggcaaggcgcccaagggcgacaagaccaactggatcatgcatgagtaccgcctcgccgacgtcgaccgcaccgcccgcaagaagaacaacagcctcaggttggatgattgggtgctgtgccgaatctacaacaagaaaggcgcgctggagaagccgaccggagccgaagccgtccgtgctgccgtctgccacggcaacggcaacggccgcggccgggacggggtacgcgccgctgccgttctcggagctggcggcgtactacgaggtccggccgtccgactcgatgccccgggcgcacggcgcggactcgagctgctcgggccacgcgctggccgccacgtcgtcgtgcggcggcggcggcggcgagcggcctgaggtacagagccagcccaagatcgccgagtgggagcgcactttcgccgccggcgccggcccgggaatcaacccggccggctcgatgctggggcttggcgggcatcagctcggctccgcggcggtgggggtagggctgcccgccggcgacccgctgctccaggacatcctcacatactggggcaagccgtactgagaaagatgactggtccgagccgccggcgatgaggccatgtcggcttgtgaatgatcatggagctggactacaggattattgctgctacgagttgaattaaactgtttatatgcgattgatttggtactgggatttttgtatacttgaattagtactctctctatatagagagacatacacatactcgagtatatatgttttgcttatatatagagtatggaataatatttatatctgctggtccatcctgcaacccgcacaccagttgccatcggacatttttttaaggacagttgcc

SEQ ID NO: 59617 - DNA, 1862 bp, Zea Mays
tcatgcctttcgcgagagaaagtggtcgaatcggcggctgatttgacccggctcgctattagagctgcgaaagtgatccgagcagtcacggtttcggaagcggcgcgtcggccggaggagaaacgcaaccagctgtcgaggagctatgagcagcggtggcggaggcagagtgccggcggcggcggcggcgcagtcgcaggagctgcagctaccgccggggttccggttccacccgacggatgaggagctggtggtgcactacctctgccggcgctgcgccgggctgcccatctccgtgcccatcatcgccgaggtcgacctatacaagcacgatccctggcagctcccaaggatggcgctgtacggcgagaaggagtggtacttcttctccccgcgggaccgcaagtacccgaacgggtcgcggccgaaccgcgccgccggcgccgggtactggaaggccaccggcgcagacaagccggtgggcacgccgaagccggtggccatcaagaaggctctcgtcttctacgccggcaaggcgcccaagggcgacaagaccaactggatcatgcatgagtaccgcctcgccgacgtcgaccgcaccgcccgcaagaagaacaacagcctcagggtacgttgcgatcgatcgagttccggccggcgcgtccaccagaatatctcattcgtttctgtgcagaaaattatctcttgctcgtatatattattatttgttaataatatatatctcctgtcactgccgtatcaacaaagaaaaagttgagataagaacgtaacgtatggatcacaaagaataattattagcagtcggattttcactagctagctagtcgccgataaaaaggacggcgagacccatttctctccggtgtgaaccctggagatgctgcgccgtgcgtcatctccttcaaccgccaattatctcttgcgcttttgcgagctacgacagcgatccgatacggtcgaaagcgacgcatcaatagtgcctatacatttcatcgccaagaaaatcttggatgattgggtgctgtgccgaatctacaacaagaaaggcgcgctggagaagccgaccggagccggcggcagggccgaggccagcagccagggcgcgctggggtccatgtccatgggctcgccgccggagcagaagccgtccgtgctgccgtctgccacggcaacggcaacggccgcggccgggacggggtacgcgccgctgccgttctcggagctggcggcgtactacgaggtccggccgtccgactcgatgccccgggcgcacggcgcggactcgagctgctcgggccacgcgctggccgccacgtcgtcgtgcggcggcggcggcggcgagcggcctgaggtacagagccagcccaagatcgccgagtgggagcgcactttcgccgccggcgccggcccgggaatcaacccggccggctcgatgctggggcttggcgggcatcagctcggctccgcggcggtgggggtagggctgcccgccggcgacccgctgctccaggacatcctcacatactggggcaagccgtactgagaaagatgactggtccgagccgccggcgatgaggccatgtcggcttgtgaatgatcatggagctggactacaggattattgctgctacgagttgaattaaactgtttatatgcgattgatttggtactgggatttttgtatacttgaattagtactctctctatatagagagacatacacatactcgagtatatatgttttgcttatatatagagtatggaataatatttatatctgctggtccatcctgcaacccgcacaccagttgccatcggacatttttttaaggacagttgcc

SEQ ID NO: 59618 - DNA, 1933 bp, Zea Mays
tagatagacgcgacggccggggccacgcgtccaggcgaggggaggggaggcttcgcgaatcgaatcgcgcgataaaacctgcggcccgccgcccatcccgccatcctgatccgctcgctcccaaatcctactgccgtgcgcgtcccgctcctgcggctgcgccccccgcgaggagaaagccggttagccacagccccacacgcgcgcatcacgccacaaccacaccacacggcaccagcctcctccgtcgtcaccgcctcgggcctcggccgatcgatcgggtctggcggcggccacaagcgtcgctgtttaataaatagccctgagcggcctccccctgcccctcagttcagcctcggctggacatcgagtttgtaccgggaaacagcttggtagtataaccactgaagatggtcagtgggaggccgcatggtgaattggactcatggttcaagagcctcatggtgacctctagcagcgagagggggcaggctgggagtggtggtccagcgccaacattaacaggatggaaggaccttccgatggagctcctggtgcggataatatccacagttggagatgataggatggtcatcgtggcgtctggtgtttgcacaggctggcgtgacgcgctgggatggggggtcactaatctttcacttacatggtgcaaactgagcatgaataatttaatgatatctcttgcccacaagttcacgaagttgcaagttctcactctccggcaaaacaaacctcagcttgaagacagtgccgtagaggctgttgccaactactgccatgacctacgtgagttagacctcagcagaagcttcaggcttagtgaccgctccttgtatgcgctggcccatggatgcccacggcttacaagactgaacattagtggatgttccagtttcagcgacactgcgttgatttaccttacctgccgctgtaaaaacctcaagtgcctgaacttgtgtggatgcgtgaaggctgttactgacagagctttgcagataagggagtgaccagcttagcgtcaggatgccctgatctcagagccgtagacttgtgcggttgtgttcttataacagatgagagtgtggttgctcttgccaacggatgtccgcacctgcgctcgctgggcctctacttctgccagaacatcacggaccgcgccatgtactccctcgcaaacagccgcgtgaagagcaagcgtgggaggtgggatgcagtgaaagacgggctcgcgaacctcaacatcagccagtgcaccgccctgacgcccccggcggtgcaggccgtctgcgactccttcccggcgctgcacacctgccccgagaggcactccctcatcatcagtggctgcctcagcctcacgtcagtccactgcgcctgcgccctccacccacaccgtgccgggagagccctgatggccaaccatgcgtactaataaacatgttggtggctttgcgctgatagttctcgcgaatggggacgcatgcctggggggtgatggcgtcgtccaggtgtagaggaagctccctgtgtacataaactcgaaacttggcggtgtgataaggcactgctgtggtaggactttgtgtgataatcatggagtggcgaatttctagagaatggcatgtactccagtgctacctggacattgaccagaaaaaatgtggtatctagttgccttctgtgtaagggcggacgtgttgggatgttcatgcattttcattaatctgataccttaatctgactaaaatctagattaagttacatatcaaatcattactttaatctcataacttaatctttatttagattcttgaattgagctgaaagatctaatgtgtacttattttatggactgcctaaatgttgatgccaaatgcctggctctgttgaaaattttgcataggagaaaata

SEQ ID NO: 59619 - DNA, 1516 bp, Zea Mays
ctgtagttgtagctagtgttggcctgcgcaaccaatcgccaggaaacagcttggtagtataaccactgaagatggtcagtgggaggccgcatggtgaattggactcatggttcaagagcctcatggtgacctctagcagcgagagggggcaggctgggagtggtggtccagcgccaacattaacaggatggaaggaccttccgatggagctcctggtgcggataatatccacagttggagatgataggatggtcatcgtggcgtctggtgtttgcacaggctggcgtgacgcgctgggatggggggtcactaatctttcacttacatggtgcaaactgagcatgaataatttaatgatatctcttgcccacaagttcacgaagttgcaagttctcactctccggcaaaacaaacctcagcttgaagacagtgccgtagaggctgttgccaactactgccatgacctacgtgagttagacctcagcagaagcttcaggcttagtgaccgctccttgtatgcgctggcccatggatgcccacggcttacaagactgaacattagtggatgttccagtttcagcgacactgcgttgatttaccttacctgccgctgtaaaaacctcaagtgcctgaacttgtgtggatgcgtgaaggctgttactgacagagctttgcagatgagagtgtggttgctcttgccaacggatgtccgcacctgcgctcgctgggcctctacttctgccagaacatcacggaccgcgccatgtactccctcgcaaacagccgcgtgaagagcaagcgtgggaggtgggatgcagtgaaagacgggctcgcgaacctcaacatcagccagtgcaccgccctgacgcccccggcggtgcaggccgtctgcgactccttcccggcgctgcacacctgccccgagaggcactccctcatcatcagtggctgcctcagcctcacgtcagtccactgcgcctgcgccctccacccacaccgtgccgggagagccctgatggccaaccatgcgtactaataaacatgttggtggctttgcgctgatagttctcgcgaatggggacgcatgcctggggggtgatggcgtcgtccaggtgtagaggaagctccctgtgtacataaactcgaaacttggcggtgtgataaggcactgctgtggtaggactttgtgtgataatcatggagtggcgaatttctagagaatggcatgtactccagtgctacctggacattgaccagaaaaaatgtggtatctagttgccttctgtgtaagggcggacgtgttgggatgttcatgcattttcattaatctgataccttaatctgactaaaatctagattaagttacatatcaaatcattactttaatctcataacttaatctttatttagattcttgaattgagctgaaagatctaatgtgtacttattttatggactgcctaaatgttgatgccaaatgcctggctctgttgaaaattttgcataggagaaaata

SEQ ID NO: 59620 - DNA, 1641 bp, Zea Mays
gttggcctgcgcaaccaatcgccaggaaacagcttggtagtataaccactgaagatggtcagtgggaggccgcatggtgaattggactcatggttcaagagcctcatggtgacctctagcagcgagagggggcaggctgggagtggtggtccagcgccaacattaacaggatggaaggaccttccgatggagctcctggtgcggataatatccacagttggagatgataggatggtcatcgtggcgtctggtgtttgcacaggctggcgtgacgcgctgggatggggggtcactaatctttcacttacatggtgcaaactgagcatgaataatttaatgatatctcttgcccacaagttcacgaagttgcaagttctcactctccggcaaaacaaacctcagcttgaagacagtgccgtagaggctgttgccaactactgccatgacctacgtgagttagacctcagcagaagcttcaggcttagtgaccgctccttgtatgcgctggcccatggatgcccacggcttacaagactgaacattagtggatgttccagtttcagcgacactgcgttgatttaccttacctgccgctgtaaaaacctcaagtgcctgaacttgtgtggatgcgtgaaggctgttactgacagagctttgcaggctattgctcagaactgtgggcagctgcagtctttgaacctaggctggtgtgatgatgttacagataagggagtgaccagcttagcgtcaggatgccctgatctcagagccgtagacttgtgcggttgtgttcttataacagatgagagtgtggttgctcttgccaacggatgtccgcacctgcgctcgctgggcctctacttctgccagaacatcacggaccgcgccatgtactccctcgcaaacagccgcgtgaagagcaagcgtgggaggtgggatgcagtgaaagacgggctcgcgaacctcaacatcagccagtgcaccgccctgacgcccccggcggtgcaggccgtctgcgactccttcccggcgctgcacacctgccccgagaggcactccctcatcatcagtggctgcctcagcctcacgtcagtccactgcgcctgcgccctccacccacaccgtgccgggagagccctgatggccaaccatgcgtactaataaacatgttggtggctttgcgctgatagttctcgcgaatggggacgcatgcctggggggtgatggcgtcgtccaggtgtagaggaagctccctgtgtacataaactcgaaacttggcggtgtgataaggcactgctgtggtaggactttgtgtgataatcatggagtggcgaatttctagagaatggcatgtactccagtgctacctggacattgaccagaaaaaatgtggtatctagttgccttctgtgtaagggcggacgtgttgggatgttcatgcattttcattaatctgataccttaatctgactaaaatctagattaagttacatatcaaatcattactttaatctcataacttaatctttatttagattcttgaattgagctgaaagatctaatgtgtacttattttatggactgcctaaatgttgatgccaaatgcctggctctgttgaaaattttgcataggagaaaata

SEQ ID NO: 59621 - DNA, 1656 bp, Zea Mays
ccccgccctcttcgttctaagcgcggcgcttctccgcccggaaacagcttggtagtataaccactgaagatggtcagtgggaggccgcatggtgaattggactcatggttcaagagcctcatggtgacctctagcagcgagagggggcaggctgggagtggtggtccagcgccaacattaacaggatggaaggaccttccgatggagctcctggtgcggataatatccacagttggagatgataggatggtcatcgtggcgtctggtgtttgcacaggctggcgtgacgcgctgggatggggggtcactaatctttcacttacatggtgcaaactgagcatgaataatttaatgatatctcttgcccacaagttcacgaagttgcaagttctcactctccggcaaaacaaacctcagcttgaagacagtgccgtagaggctgttgccaactactgccatgacctacgtgagttagacctcagcagaagcttcaggcttagtgaccgctccttgtatgcgctggcccatggatgcccacggcttacaagactgaacattagtggatgttccagtttcagcgacactgcgttgatttaccttacctgccgctgtaaaaacctcaagtgcctgaacttgtgtggatgcgtgaaggctgttactgacagagctttgcaggctattgctcagaactgtgggcagctgcagtctttgaacctaggctggtgtgatgatgttacagataagggagtgaccagcttagcgtcaggatgccctgatctcagagccgtagacttgtgcggttgtgttcttataacagatgagagtgtggttgctcttgccaacggatgtccgcacctgcgctcgctgggcctctacttctgccagaacatcacggaccgcgccatgtactccctcgcaaacagccgcgtgaagagcaagcgtgggaggtgggatgcagtgaaagacgggctcgcgaacctcaacatcagccagtgcaccgccctgacgcccccggcggtgcaggccgtctgcgactccttcccggcgctgcacacctgccccgagaggcactccctcatcatcagtggctgcctcagcctcacgtcagtccactgcgcctgcgccctccacccacaccgtgccgggagagccctgatggccaaccatgcgtactaataaacatgttggtggctttgcgctgatagttctcgcgaatggggacgcatgcctggggggtgatggcgtcgtccaggtgtagaggaagctccctgtgtacataaactcgaaacttggcggtgtgataaggcactgctgtggtaggactttgtgtgataatcatggagtggcgaatttctagagaatggcatgtactccagtgctacctggacattgaccagaaaaaatgtggtatctagttgccttctgtgtaagggcggacgtgttgggatgttcatgcattttcattaatctgataccttaatctgactaaaatctagattaagttacatatcaaatcattactttaatctcataacttaatctttatttagattcttgaattgagctgaaagatctaatgtgtacttattttatggactgcctaaatgttgatgccaaatgcctggctctgttgaaaattttgcataggagaaaata

SEQ ID NO: 59622 - DNA, 1691 bp, Zea Mays
gtttcccccccaaattttctggcttttctgggcgatgatggccttaccgcccgccgccgcctcttgcgttggctggaaacagcttggtagtataaccactgaagatggtcagtgggaggccgcatggtgaattggactcatggttcaagagcctcatggtgacctctagcagcgagagggggcaggctgggagtggtggtccagcgccaacattaacaggatggaaggaccttccgatggagctcctggtgcggataatatccacagttggagatgataggatggtcatcgtggcgtctggtgtttgcacaggctggcgtgacgcgctgggatggggggtcactaatctttcacttacatggtgcaaactgagcatgaataatttaatgatatctcttgcccacaagttcacgaagttgcaagttctcactctccggcaaaacaaacctcagcttgaagacagtgccgtagaggctgttgccaactactgccatgacctacgtgagttagacctcagcagaagcttcaggcttagtgaccgctccttgtatgcgctggcccatggatgcccacggcttacaagactgaacattagtggatgttccagtttcagcgacactgcgttgatttaccttacctgccgctgtaaaaacctcaagtgcctgaacttgtgtggatgcgtgaaggctgttactgacagagctttgcaggctattgctcagaactgtgggcagctgcagtctttgaacctaggctggtgtgatgatgttacagataagggagtgaccagcttagcgtcaggatgccctgatctcagagccgtagacttgtgcggttgtgttcttataacagatgagagtgtggttgctcttgccaacggatgtccgcacctgcgctcgctgggcctctacttctgccagaacatcacggaccgcgccatgtactccctcgcaaacagccgcgtgaagagcaagcgtgggaggtgggatgcagtgaaagacgggctcgcgaacctcaacatcagccagtgcaccgccctgacgcccccggcggtgcaggccgtctgcgactccttcccggcgctgcacacctgccccgagaggcactccctcatcatcagtggctgcctcagcctcacgtcagtccactgcgcctgcgccctccacccacaccgtgccgggagagccctgatggccaaccatgcgtactaataaacatgttggtggctttgcgctgatagttctcgcgaatggggacgcatgcctggggggtgatggcgtcgtccaggtgtagaggaagctccctgtgtacataaactcgaaacttggcggtgtgataaggcactgctgtggtaggactttgtgtgataatcatggagtggcgaatttctagagaatggcatgtactccagtgctacctggacattgaccagaaaaaatgtggtatctagttgccttctgtgtaagggcggacgtgttgggatgttcatgcattttcattaatctgataccttaatctgactaaaatctagattaagttacatatcaaatcattactttaatctcataacttaatctttatttagattcttgaattgagctgaaagatctaatgtgtacttattttatggactgcctaaatgttgatgccaaatgcctggctctgttgaaaattttgcataggagaaaata

SEQ ID NO: 59623 - DNA, 1660 bp, Zea Mays
cttaccgcccgccgccgcctcttgcgttggctggaaacagcttggtagtataaccactgaagatggtcagtgggaggccgcatggtgaattggactcatggttcaagagcctcatggtgacctctagcagcgagagggggcaggctgggagtggtggtccagcgccaacattaacaggatggaaggaccttccgatggagctcctggtgcggataatatccacagttggagatgataggatggtcatcgtggcgtctggtgtttgcacaggctggcgtgacgcgctgggatggggggtcactaatctttcacttacatggtgcaaactgagcatgaataatttaatgatatctcttgcccacaagttcacgaagttgcaagttctcactctccggcaaaacaaacctcagcttgaagacagtgccgtagaggctgttgccaactactgccatgacctacgtgagttagacctcagcagaagcttcaggcttagtgaccgctccttgtatgcgctggcccatggatgcccacggcttacaagactgaacattagtggatgttccagtttcagcgacactgcgttgatttaccttacctgccgctgtaaaaacctcaagtgcctgaacttgtgtggatgcgtgaaggctgttactgacagagctttgcagttttggtgcaggctattgctcagaactgtgggcagctgcagtctttgaacctaggctggtgtgatgatgttacagataagggagtgaccagcttagcgtcaggatgccctgatctcagagccgtagacttgtgcggttgtgttcttataacagatgagagtgtggttgctcttgccaacggatgtccgcacctgcgctcgctgggcctctacttctgccagaacatcacggaccgcgccatgtactccctcgcaaacagccgcgtgaagagcaagcgtgggaggtgggatgcagtgaaagacgggctcgcgaacctcaacatcagccagtgcaccgccctgacgcccccggcggtgcaggccgtctgcgactccttcccggcgctgcacacctgccccgagaggcactccctcatcatcagtggctgcctcagcctcacgtcagtccactgcgcctgcgccctccacccacaccgtgccgggagagccctgatggccaaccatgcgtactaataaacatgttggtggctttgcgctgatagttctcgcgaatggggacgcatgcctggggggtgatggcgtcgtccaggtgtagaggaagctccctgtgtacataaactcgaaacttggcggtgtgataaggcactgctgtggtaggactttgtgtgataatcatggagtggcgaatttctagagaatggcatgtactccagtgctacctggacattgaccagaaaaaatgtggtatctagttgccttctgtgtaagggcggacgtgttgggatgttcatgcattttcattaatctgataccttaatctgactaaaatctagattaagttacatatcaaatcattactttaatctcataacttaatctttatttagattcttgaattgagctgaaagatctaatgtgtacttattttatggactgcctaaatgttgatgccaaatgcctggctctgttgaaaattttgcataggagaaaata

SEQ ID NO: 59624 - DNA, 1384 bp, Zea Mays
gtcatatgtgaggagtggagaaaaccaagtcaatgaatggcttcatctaccatggtgcaaactgagcatgaataatttaatgatatctcttgcccacaagttcacgaagttgcaagttctcactctccggcaaaacaaacctcagcttgaagacagtgccgtagaggctgttgccaactactgccatgacctacgtgagttagacctcagcagaagcttcaggcttagtgaccgctccttgtatgcgctggcccatggatgcccacggcttacaagactgaacattagtggatgttccagtttcagcgacactgcgttgatttaccttacctgccgctgtaaaaacctcaagtgcctgaacttgtgtggatgcgtgaaggctgttactgacagagctttgcaggctattgctcagaactgtgggcagctgcagtctttgaacctaggctggtgtgatgatgttacagataagggagtgaccagcttagcgtcaggatgccctgatctcagagccgtagacttgtgcggttgtgttcttataacagatgagagtgtggttgctcttgccaacggatgtccgcacctgcgctcgctgggcctctacttctgccagaacatcacggaccgcgccatgtactccctcgcaaacagccgcgtgaagagcaagcgtgggaggtgggatgcagtgaaagacgggctcgcgaacctcaacatcagccagtgcaccgccctgacgcccccggcggtgcaggccgtctgcgactccttcccggcgctgcacacctgccccgagaggcactccctcatcatcagtggctgcctcagcctcacgtcagtccactgcgcctgcgccctccacccacaccgtgccgggagagccctgatggccaaccatgcgtactaataaacatgttggtggctttgcgctgatagttctcgcgaatggggacgcatgcctggggggtgatggcgtcgtccaggtgtagaggaagctccctgtgtacataaactcgaaacttggcggtgtgataaggcactgctgtggtaggactttgtgtgataatcatggagtggcgaatttctagagaatggcatgtactccagtgctacctggacattgaccagaaaaaatgtggtatctagttgccttctgtgtaagggcggacgtgttgggatgttcatgcattttcattaatctgataccttaatctgactaaaatctagattaagttacatatcaaatcattactttaatctcataacttaatctttatttagattcttgaattgagctgaaagatctaatgtgtacttattttatggactgcctaaatgttgatgccaaatgcctggctctgttgaaaattttgcataggagaaaata

SEQ ID NO: 59625 - DNA, 2282 bp, Zea Mays
cgcgcggcgcccaccgtttccgcccgcgtcctcgcctcttctttcttcgcctcttctgcaccgcgctctcgctcgcccctccgccgcttggcctccaccctcccgctgccggctccgccgactggacttccgcccgtcgctggccgtcggcgcgcccgttcctcgcagaatcaaagagataaattgaactgggaggctgggaatcgcgagagaagtgatgtctttcgttaggcaagcagacccatcagcatcctgtgcggagaccacttacatccacaaatttgtgccaccaggatcagttttcccagcacagagatttgtctctggcaccgacttgcttcaccacgggcctcaaccatataatgctgagggctacaagcagtctggtttcaatggcacagcgcctcatgcatttcagagcttttacaatactgatagctatgctgaatctcactttaatgaagcaccatattctcctgcaatcttcgatatatctcagcagaactctcaatctttatcggataaccaggcctctgatcttgtagagttcgatgaggatgagatgagagtaaagcttcaggagcttgagcatgctttactcgacgatggtgatgagatcttttttgacttgtcagggagcattaacgatgagtggaatgataacattaagacaaacaatgaatgggtcaatacaatgaagaatattgtgagccccgactctccaaaagaggcatcacctgagtcaagcatctgctgtcttgacaacaatgttggagaagcacggaacccgaaacagttgctttttgactgcgcagaagcgatatccgaaaatagcatcgatgaagcacagtcaatcatagcagaactacggcagaaggtggcaattcaaggagacccttctcagagacttgcggcctatctcgtggagggccttgctgccacactacagtcttcaggaaagggcatctacagggccctgaggtgcaaggaggcccctactttgtaccagctttcagccatgcagatcctctttgaaatctgcccatgcttcaggctaggcttcatggctgctaactatgctattctcgaagcctgcaaaggcgaagatgtcgtgcacatcattgactttgacatcaaccagggtagccagtacataactcttatccagttcctaaagaataacagtaacaagccacgccttttgaggataactggtgtcgatgatccagagtcagtgcacagagctgttggaggactgaatgttgttgggcagcgactagagaagcttgcagaggactgtgaggtacggtttgagttcagggcagtggctgctaacattgaagatttgactgctggaatgctaggtcgccgtcccggagaggccctcattgttaactttgcattcctgctgcaccaccttcctgatgaaagtgtctcaattatgaaccaaagggatcggcttctccgtatggtgaagggtctccgaccaaaactagtgacgttggtggagcaggacgcaaatactaacactaccccattcccttccaggttccgggaggtctatgactactattcggcactttttgattcactggatgccacccttccaagggaaagcccagatagaatgaacgtggagcgccagtgcctcgcacgggaaatcgtcaacatcttagcttgtgaaggccctgaccgtgtggaaaggtatgaagtggctgggaaatggagagctaggatggcaatggcgggctttgtgccgtccccatttaacagcggcgcggttgatggcataagatctctactgaaatcgtactgcgataagtacaggttcgagaaggtccaggacggcctccactttggctggggcgacaagacgctcgtcttctcttcggcgtggcaatagaagcttgcttgtagtattgccgatctgagcactttccagcgttttaggagcatctggtgcaagggctgtaaagagatttctgtcgccgtattgttgaagtacactcgtagctaaccttagcgtgttgcctgcctgtaggcttgtgaggtctacggtttacctagtttcttagatgaagtatgttgtgcattgtacacctactgaactacatgtagactgtagagtcgcgggtgtatttaattttgcccttcttttggaggggcagaatcacaatatgtcgacattgtttcgtgtataaagtactggatgatgatgatgctcttttgtactggtcatgagatgggataaaataacaaaaaaaatcgccaatccggtgcac

SEQ ID NO: 59626 - DNA, 2549 bp, Zea Mays
accgtttccgcccgcgtcctcgcctcttctttcttcgcctcttctgcaccgcgctctcgctcgcccctccgccgcttggcctccaccctcccgctgccggctccgccgactggacttccgcccgtcgctggccgtcggcgcgcccgttcctcgcaggtgaattgttcaggctgaattgatcggtggaagctgtgcattgactatttttttatctcagaatcaaagagataaattgaactgggaggctgggaatcgcgagagaagtgatgtctttcgttaggcaagcagacccatcagcatcctgtgcggagaccacttacatccacaaatttgtgccaccaggatcagttttcccagcacagagatttgtctctggcaccgacttgcttcaccacgggcctcaaccatataatgctgagggctacaagcagtctggtttcaatggcacagcgcctcatgcatttcagagcttttacaatactgatagctatgctgaatctcactttaatgaagcaccatattctcctgcaatcttcgatatatctcagcagaactctcaatctttatcggataaccaggcctctgatcttgtagagttcgatgaggatgagatgagagtaaagcttcaggagcttgagcatgctttactcgacgatggtgatgagatcttttttgacttgtcagggagcattaacgatgagtggaatgataacattaagacaaacaatgaatgggtcaatacaatgaagaatattgtgagccccgactctccaaaagaggcatcacctgagtcaagcatctgctgtcttgacaacaatgttggagaagcacggaacccgaaacagttgctttttgactgcgcagaagcgatatccgaaaatagcatcgatgaagcacagtcaatcatagcagaactacggcagaaggtggcaattcaaggagacccttctcagagacttgcggcctatctcgtggagggccttgctgccacactacagtcttcaggaaagggcatctacagggccctgaggtgcaaggaggcccctactttgtaccagctttcagccatgcagatcctctttgaaatctgcccatgcttcaggctaggcttcatggctgctaactatgctattctcgaagcctgcaaaggcgaagatgtcgtgcacatcattgactttgacatcaaccagggtagccagtacataactcttatccagttcctaaagaataacagtaacaagccacgccttttgaggataactggtgtcgatgatccagagtcagtgcacagagctgttggaggactgaatgttgttgggcagcgactagagaagcttgcagaggactgtgaggtacggtttgagttcagggcagtggctgctaacattgaagatttgactgctggaatgctaggtcgccgtcccggagaggccctcattgttaactttgcattcctgctgcaccaccttcctgatgaaagtgtctcaattatgaaccaaagggatcggcttctccgtatggtgaagggtctccgaccaaaactagtgacgttggtggagcaggacgcaaatactaacactaccccattcccttccaggttggttctctcgtgaacatttttactgcatctggttggtacacagagttgtctaaaccgatgatatacatgctgtttaactacccattttagcaaacatgtgtgcttcacgatgctgaccttgtgaaagaaatgtggtttttttgaactttgtgccagccttacactatcatatagttatatatctgcggttcctcatgttgccctttggtatgcaggttccgggaggtctatgactactattcggcactttttgattcactggatgccacccttccaagggaaagcccagatagaatgaacgtggagcgccagtgcctcgcacgggaaatcgtcaacatcttagcttgtgaaggccctgaccgtgtggaaaggtatgaagtggctgggaaatggagagctaggatggcaatggcgggctttgtgccgtccccatttaacagcggcgcggttgatggcataagatctctactgaaatcgtactgcgataagtacaggttcgagaaggtccaggacggcctccactttggctggggcgacaagacgctcgtcttctcttcggcgtggcaatagaagcttgcttgtagtattgccgatctgagcactttccagcgttttaggagcatctggtgcaagggctgtaaagagatttctgtcgccgtattgttgaagtacactcgtagctaaccttagcgtgttgcctgcctgtaggcttgtgaggtctacggtttacctagtttcttagatgaagtatgttgtgcattgtacacctactgaactacatgtagactgtagagtcgcgggtgtatttaattttgcccttcttttggaggggcagaatcacaatatgtcgacattgtttcgtgtataaagtactggatgatgatgatgctcttttgtactggtcatgagatgggataaaataacaaaaaaaatcgccaatccggtgcac

SEQ ID NO: 59627 - DNA, 2375 bp, Zea Mays
ctggattccatctgcaatgtaagtctaggtatgcatacacatgctgagcaagaccaagatgtctgcctggcgcctaccttaagcctttaggcatacgttccactcgaatcggtttttggttccaagggcaccgagttagtcaacgttgcaggtctggaggataagaaggttaccaagtcttagaagcaactccaaactgggtgaattgttcaggctgaattgatcggtggaagctgtgcattgactatttttttatctcagaatcaaagagataaattgaactgggaggctgggaatcgcgagagaagtgatgtctttcgttaggcaagcagacccatcagcatcctgtgcggagaccacttacatccacaaatttgtgccaccaggatcagttttcccagcacagagatttgtctctggcaccgacttgcttcaccacgggcctcaaccatataatgctgagggctacaagcagtctggtttcaatggcacagcgcctcatgcatttcagagcttttacaatactgatagctatgctgaatctcactttaatgaagcaccatattctcctgcaatcttcgatatatctcagcagaactctcaatctttatcggataaccaggcctctgatcttgtagagttcgatgaggatgagatgagagtaaagcttcaggagcttgagcatgctttactcgacgatggtgatgagatcttttttgacttgtcagggagcattaacgatgagtggaatgataacattaagacaaacaatgaatgggtcaatacaatgaagaatattgtgagccccgactctccaaaagaggcatcacctgagtcaagcatctgctgtcttgacaacaatgttggagaagcacggaacccgaaacagttgctttttgactgcgcagaagcgatatccgaaaatagcatcgatgaagcacagtcaatcatagcagaactacggcagaaggtggcaattcaaggagacccttctcagagacttgcggcctatctcgtggagggccttgctgccacactacagtcttcaggaaagggcatctacagggccctgaggtgcaaggaggcccctactttgtaccagctttcagccatgcagatcctctttgaaatctgcccatgcttcaggctaggcttcatggctgctaactatgctattctcgaagcctgcaaaggcgaagatgtcgtgcacatcattgactttgacatcaaccagggtagccagtacataactcttatccagttcctaaagaataacagtaacaagccacgccttttgaggataactggtgtcgatgatccagagtcagtgcacagagctgttggaggactgaatgttgttgggcagcgactagagaagcttgcagaggactgtgaggtacggtttgagttcagggcagtggctgctaacattgaagatttgactgctggaatgctaggtcgccgtcccggagaggccctcattgttaactttgcattcctgctgcaccaccttcctgatgaaagtgtctcaattatgaaccaaagggatcggcttctccgtatggtgaagggtctccgaccaaaactagtgacgttggtggagcaggacgcaaatactaacactaccccattcccttccaggttccgggaggtctatgactactattcggcactttttgattcactggatgccacccttccaagggaaagcccagatagaatgaacgtggagcgccagtgcctcgcacgggaaatcgtcaacatcttagcttgtgaaggccctgaccgtgtggaaaggtatgaagtggctgggaaatggagagctaggatggcaatggcgggctttgtgccgtccccatttaacagcggcgcggttgatggcataagatctctactgaaatcgtactgcgataagtacaggttcgagaaggtccaggacggcctccactttggctggggcgacaagacgctcgtcttctcttcggcgtggcaatagaagcttgcttgtagtattgccgatctgagcactttccagcgttttaggagcatctggtgcaagggctgtaaagagatttctgtcgccgtattgttgaagtacactcgtagctaaccttagcgtgttgcctgcctgtaggcttgtgaggtctacggtttacctagtttcttagatgaagtatgttgtgcattgtacacctactgaactacatgtagactgtagagtcgcgggtgtatttaattttgcccttcttttggaggggcagaatcacaatatgtcgacattgtttcgtgtataaagtactggatgatgatgatgctcttttgtactggtcatgagatgggataaaataacaaaaaaaatcgccaatccggtgcac

SEQ ID NO: 59628 - DNA, 3596 bp, Zea Mays
aggaggaaaacgaggtggcggctagggttggactcccggctccctacaggaagccggaaaacaatgtgtttctgcttgatctatagagtggtgcttacaattatttatactcccctctagtccttatctaataagatagatctcctcttttctctctaacaaatcttatcttctaatccctatcttctctctaacaaatcttatcttctaatccttatctgcatgcttatcttctaatccttatttacatgcttatgctgttgcccggtgcctatagtggctgccggtcattacatcccgtgtgaccatttggtggggcatgtatgcacaaaacagcgaagaaaagtctctaggcactgattgaggcgctcagtctgtccatccgattgcgggtgatacgctgaggacatgcacaacttggtgcccgagagctggaataatgcttgccaaaaagtgctagtgaaaatgcggtcgcgattagatatgatgttggttggtaagccatgaagttgatatatattgtccaggaatactttagcaacctttgcagctgtaaatgggtgggacaatggcaaaaagtggccatacttcgagaatttatcgacgacaaccaatatgcagttgaaatgtgctgaacgaggaagaccttctataaaatcaagggaaatggtgtgccatgcttgcagaggaataggtagaggttggagaaggcctggatagttaacccgttctggtttggcctgctgacatatagaacatgactgcacataggatcggatatccgatttcatactaggccaatagaaaagctgcttcacacgactgtaagtcgccggtacacccaaattcaattgcagtcatgtaaagcacgcagcacaccctggattaaagaaaaaggtccttcagcatccgatttcagacacagtgtggctaacaactgcttagttgcaggatccctgtcatacccagttatcacctcctgtaaccatgtgggagcacactgaaatagagcaaagcaagaaactggtggatggggcatccgagaaagatcatcagcagctgtgttatcggagccctttttgtacacaatgtgatactggagtcccatcaatttagtgtataccttttgctaccatggtgtatgaagtcgctgctcattcagttgagtaagactgatatgatcagtgtgaatggtgaactcggccaactgatggtatgagcgccattgattgacggccaataggatagccatatattccttttcataagtagatagtccctgatttttaggccccaaaacccgactgagaaaggccaacagatgtgactgctgcattagtatagcaccgacaccatgttgggaggcatcagtatggatgttgaacggcttggtgaaatctggtaatgccaacacatgtgctgaaatgagagcagccttgagaatgtcaaatgcatgttgatgttctcctgtccagataaacaacatgtttttcttcagcggatgaaaaagaggcctactgatgacaccgaaattacgaacaaatttgcaatagaaccctgcgaggctaaggaaactatgcaaatccttaacattagaaggtgttggccattgcttgatgtcactaattttagctgggtcaattgccacaccttgtgcgttgataatgtgtcccaaataagcgatttgctgcttggcaaaatcacacttggacaatttcaccttccatttgtcccttaagagaagattcaaaacttcagacaagtgtaacagatgtgtctcaaacgatgggctatatatcaaaatgtcataaaaaaaccaaggcacaccttttgagtattgtctttagtgtctcgttcatggctcctaaaaatgtatttggggctcccgttaatccaaaagccatgacacgaaattcataatgcccaatatgtgtttggaatgttgttttatactcctctcctgactgcaaatgaatttggtggtatccggctttaaggtctaacttggtaaactaggaagcatgggacagttcatctatgagatgatcaaacaccggtagatgatacttgcttttaagggtaagagcattcaagtacctgtaatccacgcaaaagcgccatgtattgtctttttccgaaccaatagaactggggaagcgaaggggctatgactcttctgaatgacaccttgcatcaacatgtcaccaatttgtttttcgatctcatccttcagttgtggagggtacctgtaaacagtcaaaggaatggtgtgatcgcaatcatgactaggaggcaacccctagggatcctcaaagagggtagcaaactgcttcaatagctcttggactgcatcggggattggtgaatggtcattaactgatactgtggcagcaaccagaagaagttccaccacggtgcatactggcacctgagatgactgtccatacaaagttgcagtagtgccattataaggaatagacaaccatttttgagcccaatccacacgcattagattgaaggcctgcaaccagtccatgtcaacaataatatgatagcaaggaatgggcaaaaatgccatatctgaccataaagtgcagtcctgaatttgccatggtatctacagtatcttgtgttggtaatgtaacaattcaccattagccacacgaacctgtagtggggcactcaccaaatccacattcttgaacaatgggcgaaatttctcatgcaagaatgtatgtgacctaccactatcaatcaaggctagaacacgtctccggatcgctatgtatgcggatgatgccatcatctttgtcaaacctgaaaagagagagctggattccttcgcaaccttgctacatcaattcggggaagcgactggtttgcgtaccaatattcagaaatcctcagtcgttccgattaaatgtgctggcctcaatctcgacgaaattcttgctggcttccctgcttcaagatcgcaattccctattaaataccttgggattcctttgtcggttgagaggctcaaaaaagttgacttccagtatcttctcgataaggttagcagcaagttaacatgctggcaaggtcgcaatttcacttttgcaggaagactcgttttggtcaaatccgtgttgtctgcacaacctgttcacactcttacgaccattaatgtacctaaggtggtgctcgaaaaaattgacaaatttaggaagcatttcctatgggcagggaatgagaacctcactggtggcaagtgcaaggttaactggccgacggtggcgaggccgttggatcttggggggctcggcgtacttgacatccatcgctttgcaagggcgctgcggctccgctggctatggcgggagtgggaggtcccagaggccccttgggcagggttacagaccccttgcaacgacactgataaactactctttgcagcagccacgagaatcgcaattggcgacggcgccaagacctccttctggcattgcgcctgggtcaacggtcgacgacccaaggacattgcgcctgacatcttcgctgcctcctctgactgcaggctctctgttcgggaggccttgactgacagcacgtgg

SEQ ID NO: 59629 - DNA, 689 bp, Zea Mays
caaggatcgatgattagacgaagctccgcattgccatctccctgacgccaacgcctcctcctgtaccaaaacaagagagcacgcagtatccagagttgaaggacgttgcaccataatcactgatttaatatcatcatgtaaaccatcaatgaaacacatggtataatataatggatcggcattatcttcataagctgattggtgatcaacaaggacagaaaactgctctacatactccaccaccgaacccgtctgacgaatatgaaagagccttctaatcaaggattgatgctgatcatgcccaaagtggctatgaatttgagcacaaaactctgaccatgacaaaaaacgcacgcggcggcccacagcttgcagccaacccacgacgcggccagagaaatgcattgttgtcacccgaatccagtgcgatgggtcaacctcatacgtatcaaagtaattctcacaactcgacttccataattgtagattatccccatcgaatacatgaaaattcagacgaggaagactaccatagcccccttaaaatcttctgggtccctatgcccttcgtgcggtctagtaaaatcaggtagtaaaatcagggataacaccaaacctttggaagtgtggatcggggatcttacccttgaccgggccgtgaggttgggtcgggatgcgaccaaactcac

SEQ ID NO: 59630 - DNA, 2051 bp, Zea Mays
tttttccttccaccctctggaatcattaccccctccctccctcccccgcaggctacaaacaaactacgtgcatgaagaatagatccccatccaacaacacggttaatcagtgtaaccgtcctgttttcccgccttcgccagtcgccagtagtggccactgccatcccatcagctgctggccgggttgggatgggtgaacgactcacgtgtttcctgtgcaaggttggcagctcacccatggcccctgcgcgcgccctttctgttcgtccgcctttcccttctgcgcgctgcagtcagccctcatggccgccgcacaatgccagtgccagaccttcaccacgggccgggcgtgcatggcagatcttccatttaggtagagtagtggacaaccaagcccaaggccaaagccattgcttgctcagcctctctgcactgcagggcgatgatgaggcaacggcaaactggcagcagcaagtactactagcgcttgctaaaggtcggtgagttcctcctcagtcctcacctcctccttttgccggttttttccaggttgaagaatgagagtgctgtgtgtacttcagatttcaggctatctctctgtttatctgcttgctaccactattctctgccgtttccttttttttcagcatgcttttcagctttacacccagtcatgggaggatagtacatagtagtagtgggtgttcgttgtgaatctctctctctctctctctctctctctctctctctctctctctctctctctatccagttttggatacatttctgaaacttgcgccgctgagagcctgagatcaagcgagcgcgcggcgcttggaagagccacggcgtgagtgacgcattgcggcaaaggcatcactgtttctcgttctggtttggactttggagtcccacagcaaaaaaatgcctatccctacccactcatgcctaccaagaaacaacaactcaactctcgggaggcgcaacaaacgatgccgcatttcccttcccctttcgttttttttttacctcttcagtgttcacatgtactagaacgtgtgatatgtcttcgcaagcgtcacatggtctcgcgcgggcacgagagacaggacggcctcgagtcctctcaactcaactgccctctgatgcctgcatttcttctaccaggccaggagcccaggacccggaggtgctcgctgtcgctgatcaaccgcgcgccgtcgcaggcagcacagcaaccagcaacagccaacagctaggcaggtagtagtagtatacatgagcaggttcgcggggcagacgtccaccaggccgtgggtggggatggcgggctctggcgccaccgcgtccgagcctgccgccgccgacgtcgcgagggacgacgccacggcggccatgaggggcgccggcgccggcgccggcaccaacgccagcgccatctccttcggcttcgcggccacggcggtcctcgtctccatgttcctcctcatggccatcttcgagcacctcatcaagcccggcctggcttcctcctcctcccgcggcgcatcgggctcccatgaagacgccgccgacgacgatggcgaaggccgcggccaccgccaccgcatggggggatcacccccggctcgactgcgcgagcgcgacgacgcggcgccggacaagctctgtcacctgccaaaggtggaggccgtggtggacttgacggtgctgatgccggggcagcggtacccgacgttcctggcgcagccggcgccgctcgcgccgtgccacagggaaggcgtgctctggccttcccacgaccgtcgccgctcgtttgtgccaccgtgattttttccccccaccacatcgttctttctgtacagaggttattgtaaatggcagcgccctggcttattcgaggctgatatatcatatggctgttgtcacatgtgatgtggaacactgtttcggtatggtagatatagcgatggtaggatagatcttcacatgcgtacggccggtacgtagtttcagcaacttgctaattaggctgggaaatgtcgttgggt

SEQ ID NO: 59631 - DNA, 1032 bp, Zea Mays
cgcgctgcagtcagccctcatggccgccgcacaatgccagtgccagaccttcaccacgggccgggcgtgcatggcagatcttccatttagggcgatgatgaggcaacggcaaactggcagcagcaagtactactagcgcttgctaaaggccaggagcccaggacccggaggtgctcgctgtcgctgatcaaccgcgcgccgtcgcaggcagcacagcaaccagcaacagccaacagctaggcaggtagtagtagtatacatgagcaggttcgcggggcagacgtccaccaggccgtgggtggggatggcgggctctggcgccaccgcgtccgagcctgccgccgccgacgtcgcgagggacgacgccacggcggccatgaggggcgccggcgccggcgccggcaccaacgccagcgccatctccttcggcttcgcggccacggcggtcctcgtctccatgttcctcctcatggccatcttcgagcacctcatcaagcccggcctggcttcctcctcctcccgcggcgcatcgggctcccatgaagacgccgccgacgacgatggcgaaggccgcggccaccgccaccgcatggggggatcacccccggctcgactgcgcgagcgcgacgacgcggcgccggacaagctctgtcacctgccaaaggtggaggccgtggtggacttgacggtgctgatgccggggcagcggtacccgacgttcctggcgcagccggcgccgctcgcgccgtgccacagggaaggcgtgctctggccttcccacgaccgtcgccgctcgtttgtgccaccgtgattttttccccccaccacatcgttctttctgtacagaggttattgtaaatggcagcgccctggcttattcgaggctgatatatcatatggctgttgtcacatgtgatgtggaacactgtttcggtatggtagatatagcgatggtaggatagatcttcacatgcgtacggccggtacgtagtttcagcaacttgctaattaggctgggaaatgtcgttgggt

SEQ ID NO: 59632 - DNA, 1055 bp, Zea Mays
gcacctctgagcttcaatctttttttttctttctttttttctccggtctccccggcctcgcagacaattttggtccgttgatttatctcaagtagtccaaaacgcgtagcatatcgcccgcagctgcccctgcccgccacgatgccgccgcccctgcagcctccactgttgctgcgccttcacctcctcttccgctctgaaacccaaattcctttactccggcgacgacccagctgcgacgcgccccattgccggaccaggagggttggaggcggcggcagtgggcttcgtcaccggtaagaggaaggccaccgaggtagcccaagcgtaggttctggagaaatattgttcagaaaggggatacggtggtcgatgccacatgcggccatgcgggaatgacaatgacacgctcgctctgcttaagatggtggctgacaaaacaggccgtggatgtgtttatgggatggacattcaagaatctgcgatagagaatacttcctcttttctgaaaatggccgtggatgatgaacatcatgtgtgggtttgaactatgaagcttttacctaatttcccctgaagaatgaaatagaaaggagacacttatgaattctgatttgacattattatttactattcagatacagaggatacttgtcatcttctcactgaatatttgatatatctgtacctgtcattgtatttgttttatgtggcagcagggactggtaaaactatttcctatatggtcatagtagaatggaagagattgttcccaaagacgctcctgtcaggaggagataaaactgtaatcacagtgcctagaacaactgagttagcattgcaagctgccagcagaattctcagttctgggggactcataaagtcataagtgttcttgtatacattgggcatccaggtggaaggtaaacaccagttgcaaacattgtagtctacccatctagaaaagaatgcaattgtagcataatgtctagttaaatcatcgtaagtttgactaactatgtataaaagcatgggcttattaattttcttctctc

SEQ ID NO: 59633 - DNA, 1040 bp, Zea Mays
gcacctctgagcttcaatctttttttttctttctttttttctccggtctccccggcctcgcagacaattttggtccgttgatttatctcaagtagtccaaaacgcgtagcatatcgcccgcagctgcccctgcccgccacgatgccgccgcccctgcagcctccactgttgctgcgccttcacctcctcttccgctctgaaacccaaattcctttactccggcgacgacccagctgcgacgcgccccattgccggaccaggagggttggaggcggcggcagtgggcttcgtcaccggtaagaggaaggccaccgaggttctggagaaatattgttcagaaaggggatacggtggtcgatgccacatgcggccatgcgggaatgacaatgacacgctcgctctgcttaagatggtggctgacaaaacaggccgtggatgtgtttatgggatggacattcaagaatctgcgatagagaatacttcctcttttctgaaaatggccgtggatgatgaacatcatgtgtgggtttgaactatgaagcttttacctaatttcccctgaagaatgaaatagaaaggagacacttatgaattctgatttgacattattatttactattcagatacagaggatacttgtcatcttctcactgaatatttgatatatctgtacctgtcattgtatttgttttatgtggcagcagggactggtaaaactatttcctatatggtcatagtagaatggaagagattgttcccaaagacgctcctgtcaggaggagataaaactgtaatcacagtgcctagaacaactgagttagcattgcaagctgccagcagaattctcagttctgggggactcataaagtcataagtgttcttgtatacattgggcatccaggtggaaggtaaacaccagttgcaaacattgtagtctacccatctagaaaagaatgcaattgtagcataatgtctagttaaatcatcgtaagtttgactaactatgtataaaagcatgggcttattaattttcttctctc

SEQ ID NO: 59634 - DNA, 1243 bp, Zea Mays
ctcaagtagtccaaaacgcgtagcatatcgcccgcagctgcccctgcccgccacgatgccgccgcccctgcagcctccactgttgctgcgccttcacctcctcttccgctctgaaacccaaattcctttactccggcgacgacccagctgcgacgcgccccattgccggaccaggaggtatatatccgttcgcgcctccgctgcacagctcgccgccgcggacgtctcgacggcgcagcagcttgaacttgggttggaggcggcggcagtgggcttcgtcaccggtaagaggaaggccaccgaggtagcccaagcgtaggttctggagaaatattgttcagaaaggggatacggtggtcgatgccacatgcggccatgcgggaatgacaatgacacgctcgctctgcttaagatggtggctgacaaaacaggccgtggatgtgtttatgggatggacattcaagaatctgcgatagagaatacttcctcttttctgaaaatggccgtggatgatgaacatcatgtgtgggtttgaactatgaagcttttacctaatttcccctgaagaatgaaatagaaaggagacacttatgaattctgatttgacattattatttactattcagatacagaggatacttgtcatcttctcactgaatatttgatatatctgtacctgtcattgtatttgttttatgtggcagcagggactggtaaaactatttcctatatggtcatagtagaatggaagagattgttcccaaagacgctcctgtcaggtgatcaaggccttcctataagttcgttgctgtttgaaaattccaactcaattggtactataattcaacaaaacagtttcctggaaaagtggaaatgccagttcaagtagtgttaataataatcctagacttgctgattcactgtaacacattcattctaggcttgtttctttcaattttcaacttggtctaccttccaggaggagataaaactgtaatcacagtgcctagaacaactgagttagcattgcaagctgccagcagaattctcagttctgggggactcataaagtcataagtgttcttgtatacattgggcatccaggtggaaggtaaacaccagttgcaaacattgtagtctacccatctagaaaagaatgcaattgtagcataatgtctagttaaatcatcgtaagtttgactaactatgtataaaagcatgggcttattaattttcttctctc

SEQ ID NO: 59635 - DNA, 506 bp, Zea Mays
caagtagtccaaaacgcgtagcatatcgcccgcagctgcccctgcccgccacgatgccgccgcccctgcagcctccactgttgctgcgccttcacctcctcttccgctctgaaacccaaattcctttactccggcgacgacccagctgcgacgcgccccattgccggaccaggagggttggaggcggcggcagtgggcttcgtcaccggtaagaggaaggccaccgaggtagcccaagcgtaggttctggagaaatattgttcagaaaggggatacggtggtcgatgccacatgcggccatgcgggaatgacaatgacacgctcgctctgcttaagatggtggctgacaaaacaggccgtggatgtgtttatgggatggacattcaagaatctgcgatagagaatacttcctcttttctgaaaatggccgtggatgatgaacatcatgtcagggactggtaaaactatttcctatatggtcatagtagaatggaagagattgttcc

SEQ ID NO: 59636 - DNA, 712 bp, Zea Mays
ctgcccgccacgatgccgccgcccctgcagcctccactgttgctgcgccttcacctcctcttccgctctgaaacccaaattcctttactccggcgacgacccagctgcgacgcgccccattgccggaccaggagggttggaggcggcggcagtgggcttcgtcaccggttctggagaaatattgttcagaaaggggatacggtggtcgatgccacatgcggccatgcgggaatgacaatgacacgctcgctctgcttaagatggtggctgacaaaacaggccgtggatgtgtttatgggatggacattcaagaatctgcgatagagaatacttcctcttttctgaaaatggccgtggatgatgaacatcatgtcagggactggtaaaactatttcctatatggtcatagtagaatggaagagattgttcccaaagacgctcctgtcaggaggagataaaactgtaatcacagtgcctagaacaactgagttagcattgcaagctgccagcagaattctcagttctgggggactcataaagtcataagtgttcttgtatacattgggcatccaggtggaaggtaaacaccagttgcaaacattgtagtctacccatctagaaaagaatgcaattgtagcataatgtctagttaaatcatcgtaagtttgactaactatgtataaaagcatgggcttattaattttcttctctc

SEQ ID NO: 59637 - DNA, 740 bp, Zea Mays
ctgcccgccacgatgccgccgcccctgcagcctccactgttgctgcgccttcacctcctcttccgctctgaaacccaaattcctttactccggcgacgacccagctgcgacgcgccccattgccggaccaggagggttggaggcggcggcagtgggcttcgtcaccggtaagaggaaggccaccgaggtagcccaagcgttctggagaaatattgttcagaaaggggatacggtggtcgatgccacatgcggccatgcgggaatgacaatgacacgctcgctctgcttaagatggtggctgacaaaacaggccgtggatgtgtttatgggatggacattcaagaatctgcgatagagaatacttcctcttttctgaaaatggccgtggatgatgaacatcatgtggactggtaaaactatttcctatatggtcatagtagaatggaagagattgttcccaaagacgctcctgtcaggaggagataaaactgtaatcacagtgcctagaacaactgagttagcattgcaagctgccagcagaattctcagttctgggggactcataaagtcataagtgttcttgtatacattgggcatccaggtggaaggtaaacaccagttgcaaacattgtagtctacccatctagaaaagaatgcaattgtagcataatgtctagttaaatcatcgtaagtttgactaactatgtataaaagcatgggcttattaattttcttctctc

SEQ ID NO: 59638 - DNA, 154 bp, Zea Mays
cccgccacgatgccgccgcccctgcagcctccactgttgctgcgccttcacctcctcttccgctctgaaacccaaattcctttactccggcgacgacccagctgcgacgcgccccattgccggaccaggagggttggaggcggcggcagtgggc

SEQ ID NO: 59639 - DNA, 1163 bp, Zea Mays
atcgagcttgccacctgccgcttcctcaactcgctcaggctctcaaccaggctcgatggcctgatcccgccctagctcgacggtgctcacggccggcatgcggcagctcgacccacccccatctcctgctgctcgcgatctccaccgcccggaattcgaaccaggccacccacagaccagtccactacaggctgtcggcctccgttcgctcctctgcgccagtcatcgcgcccctgcgttgcctgctgccgcccacaccctcggcggccatggacgcgcacgcgatggactgcaccatcgtcggcgcagccgcaccccttgcccctactggtgcagccgcgcgcccagctacgcccttgcccgccaacctctcctcgcccagcgctgccaccgccggcggccttgtcccctccgggcttggcctaccgggctacccggcgtcccttgacgcccttaccggccttctatcactgacccacttccccaggaagcctcctccagggttctccaccacccgtccactcgttgtcgacgccacctggacttccgtggtgccccaatcttatcggacggttggcgcaagcacagcttggctcgattccgttcacaactccatatttctcttgtttagaaacgactccgtcgccatcgtctatcagattggagactctttgatcctgcgtcgccgctcgtgcgattccaattcaagcgactccttcgatcgtcgtcgtcgtggtgtcgtcatggaggttgatttatctctcggtgaggacgctgctccggttgaagatcgtgatgtcgtcggatatgaggatgttgatttcaacacacagtctcgtaccatggaatgtgtagatgcagggattcatgcaactcatgaaggggatcacacagctcaagaccttgatgccagtacaattaaagctaatagcttaccacacgatatatatggtcaaccttcaactacgacaattccatcaatgcagggttcttatgctaatgcgacaatgttgagttttaatatgcacatgacttcttctataatagatgctcgtggtatacaaggaggatacaccaatcttttattcggaattgataaagatgttgcatcagctattaggcaattacattttgatggagtgctagataatgaaaatatatga

SEQ ID NO: 59640 - DNA, 1837 bp, Zea Mays
tgccgcccacaccctcggcggccatggacgcgcacgcgatggactgcaccatcgtcggcgcagccgcaccccttgcccctactggtgcagccgcgcgcccagctacgcccttgcccgccaacctctcctcgcccagcgctgccaccgccggcggccttgtcccctccgggcttggcctaccgggctacccggcgtcccttgacgcccttaccggccttctatcactgacccacttccccaggaagcctcctccagggttctccaccacccgtccactcgttgtcgacgccacctggacttccgtggtgccccaatcttatcggacggttggcgcaagcacagcttggctcgattccgttcacaactccatatttctcttgtttagaaacgactccgtcgccatcgtctatcagattggagactctttgatcctgcgtcgccgctcgtgcgattccaattcaagcgactccttcgatcgtcgtcgtcgtggtgtcgtcatggaggttgatttatctctcggtgaggacgctgctccggttgaagatcgtgatgtcgtcggatatgaggatgttgatttcaacacacagtctcgtaccatggaatgtgtagatgcagggattcatgcaactcatgaaggggatcacacagctcaagtggctaataaatttttgcatatttcaatcgctcctaaagttggaatggcttttgaatctggggacaatgcttatgagatgtgtaacaactatgctagcaaaattgggttcagcattagaaagagctcctcaaagctacgaccagatggtactatatatcataaatatatagtttgcagtgccgaaggacatgaaaaaacttagtcatcaaaaggcacgacggacgggatgtggtgcttcgcattcagcttgttgtcaacagagagggaatttagacagtcaataaggttgtacttgagcataatcattatcttgctagtccaaataagaagaaaaatctaagatcccaacgacatgtctcagaagcagatataaagctaataggccagatacaggaagctagaatgaggcctgcccaagtgtatgagttcatgaaagagttctatggaggagccgacaaagtgccatactcaaagatggattgcaataatgagattggtcatgaacgcaagaagtacttagaatccaatgacgcacaaacactatgtaactacttgaagaataagcagcgtgaggatccaacatttttctatgcagttgatatagatcaggaagatggacccgataaaggtcaaatagctaatttcttttgggtagatggccaatctattatggattatgcatgtcttggtgatggtgtgtcattcgacaccacatttcaaactaataagtttgaaatgccttttgctccaatccttggtaccaatcatcacaagcaaaccatactttttggagttgtgttgctatttgatgaaacaattccatcatttgtatggctatttgaaagttttttaacagtaatgtctggtaagcacccaagcacaattttcactgatcaagacgcagccatggcaggtgctattgcttatgcatttccaacacaagccattgtctttgtatatggcatatttatattaatgatgctaaacatctcatacatgtaattagtaagcataaggagcttctgcctgcttttaagagttatgtctatgaggatagatcagaatattacttcaataaaagtggcatgatttgtgcgggagtacgacctcgaggacaatgactagatggcgaacctttataacttgagggggaaatgggctattatctaccgtgactctttt

SEQ ID NO: 59641 - DNA, 3497 bp, Zea Mays
aaacaatcatactcaggcccgcagcctcaactccaaggcgacctcagacctcaactcctcatcgccggaggaccaggccaacccatcagatgcgcggaggtgctcgtcgcggcacaccgcaacatcgagccgccactactaagctgctgcctgctggttgctagacgtgacggcgcgtgcactagagggcggggagaacccctagtcggttcctcaccgaccgccatgctccgttacagccgccggttcctcaccagaacacctcgccgccgccaacccaaaaccgccgggaaaacagagccatctcccacagccgcgccgacctatacccgtgacgtggtccgccgcgccactgccatcctccgcgaccagccctggtcggcggcgcgcccgctcctcctctccctccccggcctcgcctgggactcccacaccgtggcgcgcgtgctcaagacccacccgccgctccagaaggccttcctcttcttccgcctggcgaccaccgcctcgcgcaccttccgccacgaccgcttcacctacacctccatgatccacctcctcggggaggccggccgcgttccggccatgctccgcctccttgccgagatgctccgcgccgggatcgcgcccgacgccgccaccttcaccaccgtcatgcactggctcgcgcgggccggtgacgtcgacggcgccatgcgggtgtgggcggagatgaaagcgaggagcaggcctaccgtcgtcagctacaccgcgtgcattaagattctgttcgacgctcggaaggcagaggaggcgcggggggtgcttagagagatggtggctgaagggctgcgccccacctgcaagacctacacggtgctcatcgagcatctcgccgacacaggaaaatttgaagctactcttgagattatggacaagatgaaagaagcatgtgtacaaccagataaagcactctgcaatattttagtacagaaatgttccagggctggtgagacatcagttcttacttgcattcttcagtacatgaaggagcatttcattgtccttcgccgacctatttttttggaagcactacaagctctaaaagctagtggtgatagtgatgaacttcttcgggaagtaaaccctcacctttcatacgaaggcattgagaatgatccaatattgtctgatcaaggctatcttactgacaggagtattattctctaccttatgtctgcaaacaaatggtctgctatagaacaaatggttaatcaaatggccccaaagaatgtgaaaatggagacccatatcctgtctgatgttattgaggccagctgtgccgaccgtaaaccgtcttgtgggctcgcagttatgcgttatggtttaggagtaggctgtgaacttggtaggtctgcatattgttctcttcttggccagtacattagaactgattcatttgatttagtcttagagattgttgaggaattgattaaatctggttgcaatcttgggacatatgtatcatctgttttaatactcagattgggctatgctgggcagtctgcatgtgcagctcatatttttggattgttgactgcagacaagaatgtagtttcgtacacagcccttatcaatgcctattttcaagctggcaaagttgatggtgctcttgatctattcacacaaatgagaactaatagaatatctgcttgcttgggtacatatgaagtcctgatacatggcttagaaaaggctggcctgaaacaggaatcagattactaccgaagagaaagaatgaatatgcaatggcatcttcagtatcatggcccgcagtcacctgaagataccttatgtaaccatctgttttgtggcattcatgggtgatttttcaagatggattgatatacaatgttcttatcattagcacaattgttccagcttcatccttcctcagccttgaaggtaattgtggggaaacacccagtgtcctggaagcctggatcaacaaatagaggactaatagcttctcttatggtgatcgatttgtcttggtgctaactgcaacccaccttccaaaagcattcaactgcttgaggttgcaacaaaagctccacgtgatgaaggttggtgctactcagcagtctttccacaggctcaattaaacagttcccggctactattgcagaagggttttgccatgagactcagcttgcacaaagctgacaatgacctgcaactcatccaattgcttccgcatgggcaaaagcatatattggaattaacacaacaaagcagactgtcaggacctcacaccatagtgatgcaagttactggagtcagaagttaaatttgttttatcaacctgggccgtgaagtgcctttgaacagcatcaactaactgctccctggatggattagggcatgcatcctgttcacaaatgcagtcagtcagaacaatgaaacataattggctacttgcagttgatagtagggccttgtctagaaatttgagctctacttacgagattgaagtggcgccaatatctcaacagtgcagtcagttctaacttgctcaggtcaactttctgcagtgttaccagtcaaaagaatgtaaagatacaagctgcagaagcaatgtggtccaaaaaatagtcgagtattgacgagagcaaaactacatataaagtcatcacagattactgtaaagtgttttttgcattccaaccaaatgatctcaagtccaaaacccaaaggaagcgaaagtcgcaccgtgtgagctctcgaggaagatgaaacagacgtcttagattgggagtcacatgacattgaacggctaaaggattttctgtggaaacccctatgctgcctgctccttgacctttgtggctttggtgattgtgcatcatcggagactgcaagaaaaaaaaagattaaagaagccagcttttcagacgcatataaccacgttgcaggagatggttaggaaagaagacagctgtgcctcaaactaaattcaatctgttcagatccgtgaccttaaatggcatgtagatttttctcaggtgttctttaatcaaatgcaatgctaacctctataaggaacattatctgtttctagaacttttgtttttgtctttgatagatctgattgtatatcgggttattttcctactagttgccgcagaattttgcaatccaaaacatatgaccagtacgatagaaaattgacgaaactaatatattgagtaaatagtcggtctccaagaatgaacaacttttacaaataaaaccaagatctatgcttactccaattgaaatgaaacatatcaaagaatcaattatacaagaaaagaaacagttctaaacacaactgcgaaacagacaaagcattgtgatttgtcaatgaaaaatgcaatcctggtatcttacccaagtctgaactattccaccgcaggttttcacaatcaaatttatcatcatcctcgttgcctgtcggaggttcaatcacacttaaa

SEQ ID NO: 59642 - DNA, 3508 bp, Zea Mays
aaacaatcatactcaggcccgcagcctcaactccaaggcgacctcagacctcaactcctcatcgccggaggaccaggccaacccatcagatgcgcggaggtgctcgtcgcggcacaccgcaacatcgagccgccactactaagctgctgcctgctggttgctagacgtgacggcgcgtgcactagagggcggggagaacccctagtcggttcctcaccgaccgccatgctccgttacagccgccggttcctcaccagaacacctcgccgccgccaacccaaaaccgccgggaaaacagagccatctcccacagccgcgccgacctatacccgtgacgtggtccgccgcgccactgccatcctccgcgaccagccctggtcggcggcgcgcccgctcctcctctccctccccggcctcgcctgggactcccacaccgtggcgcgcgtgctcaagacccacccgccgctccagaaggccttcctcttcttccgcctggcgaccaccgcctcgcgcaccttccgccacgaccgcttcacctacacctccatgatccacctcctcggggaggccggccgcgttccggccatgctccgcctccttgccgagatgctccgcgccgggatcgcgcccgacgccgccaccttcaccaccgtcatgcactggctcgcgcgggccggtgacgtcgacggcgccatgcgggtgtgggcggagatgaaagcgaggagcaggcctaccgtcgtcagctacaccgcgtgcattaagattctgttcgacgctcggaaggcagaggaggcgcggggggtgcttagagagatggtggctgaagggctgcgccccacctgcaagacctacacggtgctcatcgagcatctcgccgacacaggaaaatttgaagctactcttgagattatggacaagatgaaagaagcatgtgtacaaccagataaagcactctgcaatattttagtacagaaatgttccagggctggtgagacatcagttcttacttgcattcttcagtacatgaaggagcatttcattgtccttcgccgacctatttttttggaagcactacaagctctaaaagctagtggtgatagtgatgaacttcttcgggaagtaaaccctcacctttcatacgaaggcattgagaatgatccaatattgtctgatcaaggctatcttactgacaggagtattattctctaccttatgtctgcaaacaaatggtctgctatagaacaaatggttaatcaaatggccccaaagaatgtgaaaatggagacccatatcctgtctgatgttattgaggccagctgtgccgaccgtaaaccgtcttgtgggctcgcagttatgcgttatggtttaggagtaggctgtgaacttggtaggtctgcatattgttctcttcttggccagtacattagaactgattcatttgatttagtcttagagattgttgaggaattgattaaatctggttgcaatcttgggacatatgtatcatctgttttaatactcagattgggctatgctgggcagtctgcatgtgcagctcatatttttggattgttgactgcagacaagaatgtagtttcgtacacagcccttatcaatgcctattttcaagctggcaaagttgatggtgctcttgatctattcacacaaatgagaactaatagaatatctgcttgcttgggtacatatgaagtcctgatacatggcttagaaaaggctggcctgaaacaggaatcagattactaccgaagagaaagaatgaatatgcaatggcatcttcagtatcatggcccgcagtcacctgaagataccttatgtaaccatctgttttgtggcattcatgggtgatttttcaagatggattgatatacaatgttcttatcattagcacaattgttccagcttcatccttcctcagccttgaaggtaattgtggggaaacacccagtgtcctggaagcctggatcaacaaatagaggactaatagcttctcttatggtgatcgatttgtcttggtgctaactgcaacccaccttccaaaagcattcaactgcttgaggttgcaacaaaagctccacgtgatgaaggttggtgctactcagcagtctttccacaggctcaattaaacagttcccggctactattgcagaagggttttgccatgagactcagcctctttgcagcttgcacaaagctgacaatgacctgcaactcatccaattgcttccgcatgggcaaaagcatatattggaattaacacaacaaagcagactgtcaggacctcacaccatagtgatgcaagttactggagtcagaagttaaatttgttttatcaacctgggccgtgaagtgcctttgaacagcatcaactaactgctccctggatggattagggcatgcatcctgttcacaaatgcagtcagtcagaacaatgaaacataattggctacttgcagttgatagtagggccttgtctagaaatttgagctctacttacgagattgaagtggcgccaatatctcaacagtgcagtcagttctaacttgctcaggtcaactttctgcagtgttaccagtcaaaagaatgtaaagatacaagctgcagaagcaatgtggtccaaaaaatagtcgagtattgacgagagcaaaactacatataaagtcatcacagattactgtaaagtgttttttgcattccaaccaaatgatctcaagtccaaaacccaaaggaagcgaaagtcgcaccgtgtgagctctcgaggaagatgaaacagacgtcttagattgggagtcacatgacattgaacggctaaaggattttctgtggaaacccctatgctgcctgctccttgacctttgtggctttggtgattgtgcatcatcggagactgcaagaaaaaaaaagattaaagaagccagcttttcagacgcatataaccacgttgcaggagatggttaggaaagaagacagctgtgcctcaaactaaattcaatctgttcagatccgtgaccttaaatggcatgtagatttttctcaggtgttctttaatcaaatgcaatgctaacctctataaggaacattatctgtttctagaacttttgtttttgtctttgatagatctgattgtatatcgggttattttcctactagttgccgcagaattttgcaatccaaaacatatgaccagtacgatagaaaattgacgaaactaatatattgagtaaatagtcggtctccaagaatgaacaacttttacaaataaaaccaagatctatgcttactccaattgaaatgaaacatatcaaagaatcaattatacaagaaaagaaacagttctaaacacaactgcgaaacagacaaagcattgtgatttgtcaatgaaaaatgcaatcctggtatcttacccaagtctgaactattccaccgcaggttttcacaatcaaatttatcatcatcctcgttgcctgtcggaggttcaatcacacttaaa

SEQ ID NO: 59643 - DNA, 3993 bp, Zea Mays
cctcaactccaaggcgacctcagacctcaactcctcatcgccggaggaccaggccaacccatcagatgcgcggaggtgctcgtcgcggcacaccgcaacatcgagccgccactactaagctgctgcctgctggttgctagacgtgacggcgcgtgcactagagggcggggagaacccctagtcggttcctcaccgaccgccatgctccgttacagccgccggttcctcaccagaacacctcgccgccgccaacccaaaaccgccgggaaaacagagccatctcccacagccgcgccgacctatacccgtgacgtggtccgccgcgccactgccatcctccgcgaccagccctggtcggcggcgcgcccgctcctcctctccctccccggcctcgcctgggactcccacaccgtggcgcgcgtgctcaagacccacccgccgctccagaaggccttcctcttcttccgcctggcgaccaccgcctcgcgcaccttccgccacgaccgcttcacctacacctccatgatccacctcctcggggaggccggccgcgttccggccatgctccgcctccttgccgagatgctccgcgccgggatcgcgcccgacgccgccaccttcaccaccgtcatgcactggctcgcgcgggccggtgacgtcgacggcgccatgcgggtgtgggcggagatgaaagcgaggagcaggcctaccgtcgtcagctacaccgcgtgcattaagattctgttcgacgctcggaaggcagaggaggcgcggggggtgcttagagagatggtggctgaagggctgcgccccacctgcaagacctacacggtgctcatcgagcatctcgccgacacaggaaaatttgaagctactcttgagattatggacaagatgaaagaagcatgtgtacaaccagataaagcactctgcaatattttagtacagaaatgttccagggctggtgagacatcagttcttacttgcattcttcagtacatgaaggagcatttcattgtccttcgccgacctatttttttggaagcactacaagctctaaaagctagtggtgatagtgatgaacttcttcgggaagtaaaccctcacctttcatacgaaggcattgagaatgatccaatattgtctgatcaaggctatcttactgacaggagtattattctctaccttatgtctgcaaacaaatggtctgctatagaacaaatggttaatcaaatggccccaaagaatgtgaaaatggagacccatatcctgtctgatgttattgaggccagctgtgccgaccgtaaaccgtcttgtgggctcgcagttatgcgttatggtttaggagtaggctgtgaacttggtaggtctgcatattgttctcttcttggccagtacattagaactgattcatttgatttagtcttagagattgttgaggaattgattaaatctggttgcaatcttgggacatatgtatcatctgttttaatactcagattgggctatgctgggcagtctgcatgtgcagctcatatttttggattgttgactgcagacaagaatgtagtttcgtacacagcccttatcaatgcctattttcaagctggcaaagttgatggtgctcttgatctattcacacaaatgagaactaatagaatatctgcttgcttgggtacatatgaagtcctgatacatggcttagaaaaggctggcctgaaacaggaatcagattactaccgaagagaaagaatgaatatgcaatggcatcttcagtatcatggcccgcagtcacctgaagataccttatgtaaccatctgttttgtggcattcatgggtgatttttcaagatggattgatatacaatgttcttatcattagcacaattgttccagcttcatccttcctcagccttgaaggtaacacatgcccctttatatttgatttgatatgaaatcagataaaaaacatggattcatttaatctaaatgtataattggagcttcatgctgcggaaaactatgaatagtgaaattaaggaatgatttggaattgaatgcaaaactacaataaattggaaatcctgatgttggcttagggcgtccccaacaattgtcgaagtcgctagctgactcggattctcactgacatggaggagagagagaaaacagaaaaataacctcgctggcgacttgttcatcgctggtctcactaaaaaaacaaggtgagagaagatcaggtagaatgtggaaagaaagtgaaccagactccagtggtgcctcttggctacaaatgctggcatgtgctcgctggaggagtagcagcggacgatgcgtgcgcatgggtggccaccaactgcacgggcgtcctaccatcgccctgccccaactacaaatccaaatttctatgaaatgcctatgggagtggagtgagcggcaaggccaagggtgcatgggtctggaagtgcggcggtgcaagaagagacaaggccagcacacctggtgtcctgatcgcaaggttattaaaacgataaaacgttggaacgctcatgggtgaaattttgacttttaaacgtttaaacttgtttaaacgtagttttaaacagcatatgaaaaataccaatatatcataatttcagacaataatatgaagttaaatactaaaacagagaggtcagtggcttaccaaaacttcacccatgagctggattgaaccccaaaagtaactaatagactggacccaaaaataactaatggtctaaaatgcataaaacactgcgttttacagtttagaacgccaaaacgctaaaacgtgatttcaacctctaattagagttttgacgtttaaacgtagtttaaacatcgtttaaacgtagttttaatcacactgcctgatcggtagcagcgatggggctggcagtagcgacgtagagcaaacccgctcgcccgtgcctgggttcacacaatgggagagagacggttagagagaaaggattttttttaaaaaaaatacttacatgtgggtgctacatggtgacatggagcttaaatagctaacagagggtgatttccattgaggacgcccttactgatcttgtgggagaaaatccatttaagagttaaagaactggctgtaagtctgcaagtccatgacactggaatttgacatctcaccatgcagtcatccacatcactcctggatctccaaggtttatctctttctgtttcccctaaggagataaggaaaaggcgaagatggaaatagaagaatgccaaaatgttaaccataggcaccgttatatatttgttattgctatttactttgatttatcaccacctctcatgcggcatgcgtgtgggggttatttctgattagtgacataagcgcttacatgtcaaagtcaaactgattaaatgtcagtgccacatcagtggaaaacatcctttgagtggaatcagaaggctaatttggccagtttcagtagttgagggctgttggatgtcagtattatacttcagtggcagtttgagggtgtaaaatgtgctttaccctagagtttaagacaaaattagaaaacatgtttttccagagagtgaaaataagatttcatcgactttcctttcctcaacattttcactttacgtttggaagaactgttgcttcggtttctagccagtatggtaaatatgataggatcgccttacctattatgagttctcctaagaccgtatccagcagtttacccatagtttaccaaaatcattgatttacaatgttctgcactgtagacttcactgttcatagagtgaatatgggtatgaggatgaataagctattgaagatagtctaagtgattagaaaacttctgttgattttgacctttagtggtctgtgcatccttcagttagttgtaaggttgtttcataatgtcacatggaactgcagttaatcaagataaatttgaaaaattataggaacttctagaaagtacc

SEQ ID NO: 59644 - DNA, 3768 bp, Zea Mays
cagacctcaactcctcatcgccggaggaccaggccaacccatcagatgcgcggaggtgctcgtcgcggcacaccgcaacatcgagccgccactactaagctgctgcctgctggttgctagacgtgacggcgcgtgcactagagggcggggagaacccctagtcggttcctcaccgaccgccatgctccgttacagccgccggttcctcaccagaacacctcgccgccgccaacccaaaaccgccgggaaaacagagccatctcccacagccgcgccgacctatacccgtgacgtggtccgccgcgccactgccatcctccgcgaccagccctggtcggcggcgcgcccgctcctcctctccctccccggcctcgcctgggactcccacaccgtggcgcgcgtgctcaagacccacccgccgctccagaaggccttcctcttcttccgcctggcgaccaccgcctcgcgcaccttccgccacgaccgcttcacctacacctccatgatccacctcctcggggaggccggccgcgttccggccatgctccgcctccttgccgagatgctccgcgccgggatcgcgcccgacgccgccaccttcaccaccgtcatgcactggctcgcgcgggccggtgacgtcgacggcgccatgcgggtgtgggcggagatgaaagcgaggagcaggcctaccgtcgtcagctacaccgcgtgcattaagattctgttcgacgctcggaaggcagaggaggcgcggggggtgcttagagagatggtggctgaagggctgcgccccacctgcaagacctacacggtgctcatcgagcatctcgccgacacaggaaaatttgaagctactcttgagattatggacaagatgaaagaagcatgtgtacaaccagataaagcactctgcaatattttagtacagaaatgttccagggctggagtattattctctaccttatgtctgcaaacaaatggtctgctatagaacaaatggttaatcaaatggccccaaagaatgtgaaaatggagacccatatcctgtctgatgttattgaggccagctgtgccgaccgtaaaccgtcttgtgggctcgcagttatgcgttatggtttaggagtaggctgtgaacttggtaggtctgcatattgttctcttcttggccagtacattagaactgattcatttgatttagtcttagagattgttgaggaattgattaaatctggttgcaatcttgggacatatgtatcatctgttttaatactcagattgggctatgctgggcagtctgcatgtgcagctcatatttttggattgttgactgcagacaagaatgtagtttcgtacacagcccttatcaatgcctattttcaagctggcaaagttgatggtgctcttgatctattcacacaaatgagaactaatagaatatctgcttgcttgggtacatatgaagtcctgatacatggcttagaaaaggctggcctgaaacaggaatcagattactaccgaagagaaagaatgaatatgcaatggcatcttcagtatcatggcccgcagtcacctgaagataccttatgtaaccatctgttttgtggcattcatgggtgatttttcaagatggattgatatacaatgttcttatcattagcacaattgttccagcttcatccttcctcagccttgaaggtaacacatgcccctttatatttgatttgatatgaaatcagataaaaaacatggattcatttaatctaaatgtataattggagcttcatgctgcggaaaactatgaatagtgaaattaaggaatgatttggaattgaatgcaaaactacaataaattggaaatcctgatgttggcttagggcgtccccaacaattgtcgaagtcgctagctgactcggattctcactgacatggaggagagagagaaaacagaaaaataacctcgctggcgacttgttcatcgctggtctcactaaaaaaacaaggtgagagaagatcaggtagaatgtggaaagaaagtgaaccagactccagtggtgcctcttggctacaaatgctggcatgtgctcgctggaggagtagcagcggacgatgcgtgcgcatgggtggccaccaactgcacgggcgtcctaccatcgccctgccccaactacaaatccaaatttctatgaaatgcctatgggagtggagtgagcggcaaggccaagggtgcatgggtctggaagtgcggcggtgcaagaagagacaaggccagcacacctggtgtcctgatcgcaaggttattaaaacgataaaacgttggaacgctcatgggtgaaattttgacttttaaacgtttaaacttgtttaaacgtagttttaaacagcatatgaaaaataccaatatatcataatttcagacaataatatgaagttaaatactaaaacagagaggtcagtggcttaccaaaacttcacccatgagctggattgaaccccaaaagtaactaatagactggacccaaaaataactaatggtctaaaatgcataaaacactgcgttttacagtttagaacgccaaaacgctaaaacgtgatttcaacctctaattagagttttgacgtttaaacgtagtttaaacatcgtttaaacgtagttttaatcacactgcctgatcggtagcagcgatggggctggcagtagcgacgtagagcaaacccgctcgcccgtgcctgggttcacacaatgggagagagacggttagagagaaaggattttttttaaaaaaaatacttacatgtgggtgctacatggtgacatggagcttaaatagctaacagagggtgatttccattgaggacgcccttactgatcttgtgggagaaaatccatttaagagttaaagaactggctgtaagtctgcaagtccatgacactggaatttgacatctcaccatgcagtcatccacatcactcctggatctccaaggtttatctctttctgtttcccctaaggagataaggaaaaggcgaagatggaaatagaagaatgccaaaatgttaaccataggcaccgttatatatttgttattgctatttactttgatttatcaccacctctcatgcggcatgcgtgtgggggttatttctgattagtgacataagcgcttacatgtcaaagtcaaactgattaaatgtcagtgccacatcagtggaaaacatcctttgagtggaatcagaaggctaatttggccagtttcagtagttgagggctgttggatgtcagtattatacttcagtggcagtttgagggtgtaaaatgtgctttaccctagagtttaagacaaaattagaaaacatgtttttccagagagtgaaaataagatttcatcgactttcctttcctcaacattttcactttacgtttggaagaactgttgcttcggtttctagccagtatggtaaatatgataggatcgccttacctattatgagttctcctaagaccgtatccagcagtttacccatagtttaccaaaatcattgatttacaatgttctgcactgtagacttcactgttcatagagtgaatatgggtatgaggatgaataagctattgaagatagtctaagtgattagaaaacttctgttgattttgacctttagtggtctgtgcatccttcagttagttgtaaggttgtttcataatgtcacatggaactgcagttaatcaagataaatttgaaaaattataggaacttctagaaagtacc

SEQ ID NO: 59645 - DNA, 2750 bp, Zea Mays
ctcggctaggcctttccagctacgacccgacgcaatcgcacagcgtcgcctcggccgcagttcggagtgcaggcacaggccgcagagataggcgatctggcgcggcggttgccaagggcagactaccgagcgggcagggcagtgcgatcgcggaccaaatttcagttgctatctcccggccttttctccccttcactcgctaaccttaccttcctctagtctcccgtggggttcctattcttagcctgacgcgcctagcgacgggcgcgcgcacgcacacgcacacggttcgttccatggccgcggccgcgacgacgtccacggcaaccagttgctcgtcctcgtccaccagccccggccctcaccgcaggcgccagcccaacgacatcgagcgcgacgacgactcctgctgcggctgcggcggcggcgccgatcaccacttcctacacgcctgtgcgcacgacgacgccgagtgcgacctccacgggcacgccgccgccgccacgccctgcagcgggagggcgctgcagttggcgcggaggaagcgagcgtgggccgtggcaggcgcgccaccccggacggcctggatgaggggcatcgtgctctgcctcctcggcctcgtcgccgtcattgggttcctgggatcgcaccggggcggcgggcgcacggccacgagcgcgggcggcgctggcaccgacgacggcgggaggctcagggtggaggtggccgacgccgacgtcatggagtggacggaggagaatttgacggcccttgcgcgccgctcgcctgaaccgccgatacctgggatatggatgaaaccagacagtgagggttacagccagtgcattgaacggccgaagaatcaccgcaggaaaaacaatgcatctgtcggttacctggtcgttgatgcaaacggtggcctaaaccagatgagaatgggaataagtgatatggttgcagtggcgaagatcatgaacgcatcgctggtgatccctactctggatcatcagtcattctggactgacccaagcgatttcaaagatatattcgacgtcgatcacttcaaggagtcgttgaaggaagacattgtgatcgtggattccctcccaccacattacagaagggtgaaaccgtacgtgagagcgcccacctcctggtccaggctccgttttccaggcttccttctacagagactttgcgaaaatcctgaggaagttcaaagtggtgaggtttacacacacggattcacggatcgtgaacaacggcctcgctccttcgctgcaaaagcttcggtgccgcgcgaactacgaggcgctccagtacaggaaggagatcgaagagctcggcaacacgctggttgatcggctgagaaacgagtcccagcattacatcgcgcttcacctgagatacgagaaggacatgctggccttcaccgggtgcaaccacaacctgacgctggatgaggcggcggagctgacggacatgcggttcaaggtgcggcactggaaggagaaggacatcaacagcgaggagaggcggctacagggcgggtgccccatgacgccccgcgaggcggccgtgttcctcaaggccatggggtacccctcggccaccaagatctacatcgtcgccggcgagatctacggggcgcacagcctggacgcgctccgggccgagtaccccaacatctacacgcactacagcctcgccacggtggacgagctggagccgctggagctgtaccagaacaggctcgccgccgtggactacatcgtggccctgcagagcgacgtgttcgtgtacacgtacgacggcaacatggcaagggccgtgcaagggcacaggcgatttgaagggttcagaaaaaccatcaaccctgacaggctgaagtttgtggagcttattgacaagctggatgaaggttctatgtcctggactgagttccagactgtggtgaggaagcaacatgagaatagactcggaggtccgtacgagagattgcgtggggcaagcccaaggcaggaggaatacttctactcaaacccgatccctgggtgcctctgcaaaagggttcagaggagtagatgatatggatttttctgggttccattgaaattgttcagtcttagaaacataccgtaccgacagcttcagcggctggagcgtggatggagatgaaccttcctccgcgtagcagagatcatcaccccgaagcgaagagcgagagctagcaaactgactttacactagcagtttcgattattttttttttcctaggctgacaggcaacacgtgcagctgagatatctggagagggcacagggtgtgcagaatgtgaagtgcgtcgtcaaaagagttgtgtaaaagcaaggaatgcagatgtgcaggtaatagggcgagccaaaaatgtttcacggtggctgctgtttgtagttgttggtgtttctgattaattcggtttagaaggtaccagtaccatacctttttttgatggatggattcatcgttgcctcttcttaagaataatgtataaatgctctctttgtagtaggcctgttgaaccagatgtgtacatagtaaagtaaagagtggacaactgatagttttgtagtagtttagttcccacgaataaatctatgtaatcctatctaagaacctgttgacgcatcatcatcgatcgcaaaggcaacgcaatgtacagcagcagaaaatattccctaaatttcaagaaacagtaaattgaattgttg

SEQ ID NO: 59646 - DNA, 2717 bp, Zea Mays
agcgtcgcctcggccgcagttcggagtgcaggcacaggccgcagagataggcgatctggcgcggcggttgccaagggcagactaccgagcgggcagggcagtgcgatcgcggaccaaatttcagttgctatctcccggccttttctccccttcactcgctaaccttaccttcctctagtctcccgtggggttcctattcttagcctgacgcgcctagcgacgggcgcgcgcacgcacacgcacacggttcgttccatggccgcggccgcgacgacgtccacggcaaccagttgctcgtcctcgtccaccagccccggccctcaccgcaggcgccagcccaacgacatcgagcgcgacgacgactcctgctgcggctgcggcggcggcgccgatcaccacttcctacacgcctgtgcgcacgacgacgccgagtgcgacctccacgggcacgccgccgccgccacgccctgcagcgggagggcgctgcagttggcgcggaggaagcgagcgtgggccgtggcaggcgcgccaccccggacggcctggatgaggggcatcgtgctctgcctcctcggcctcgtcgccgtcattgggttcctgggatcgcaccggggcggcgggcgcacggccacgagcgcgggcggcgctggcaccgacgacggcgggaggctcagggtggaggtggccgacgccgacgtcatggagtggacggaggagaatttgacggcccttgcgcgccgctcgcctgaaccgccgttcccttccaaacacggacagatacctgggatatggatgaaaccagacagtgagggttacagccagtgcattgaacggccgaagaatcaccgcaggaaaaacaatgcatctgtcggttacctggtcgttgatgcaaacggtggcctaaaccagatgagaatgggaataagtgatatggttgcagtggcgaagatcatgaacgcatcgctggtgatccctactctggatcatcagtcattctggactgacccaagcgatttcaaagatatattcgacgtcgatcacttcaaggagtcgttgaaggaagacattgtgatcgtggattccctcccaccacattacagaagggtgaaaccgtacgtgagagcgcccacctcctggtccagggcttccttctacagagactttgcgaaaatcctgaggaagttcaaagtggtgaggtttacacacacggattcacggatcgtgaacaacggcctcgctccttcgctgcaaaagcttcggtgccgcgcgaactacgaggcgctccagtacaggaaggagatcgaagagctcggcaacacgctggttgatcggctgagaaacgagtcccagcattacatcgcgcttcacctgagatacgagaaggacatgctggccttcaccgggtgcaaccacaacctgacgctggatgaggcggcggagctgacggacatgcggttcaaggtgcggcactggaaggagaaggacatcaacagcgaggagaggcggctacagggcgggtgccccatgacgccccgcgaggcggccgtgttcctcaaggccatggggtacccctcggccaccaagatctacatcgtcgccggcgagatctacggggcgcacagcctggacgcgctccgggccgagtaccccaacatctacacgcactacagcctcgccacggtggacgagctggagccgctggagctgtaccagaacaggctcgccgccgtggactacatcgtggccctgcagagcgacgtgttcgtgtacacgtacgacggcaacatggcaagggccgtgcaagggcacaggcgatttgaagggttcagaaaaaccatcaaccctgacaggctgaagtttgtggagcttattgacaagctggatgaaggttctatgtcctggactgagttccagactgtggtgaggaagcaacatgagaatagactcggaggtccgtacgagagattgcgtggggcaagcccaaggcaggaggaatacttctactcaaacccgatccctgggtgcctctgcaaaagggttcagaggagtagatgatatggatttttctgggttccattgaaattgttcagtcttagaaacataccgtaccgacagcttcagcggctggagcgtggatggagatgaaccttcctccgcgtagcagagatcatcaccccgaagcgaagagcgagagctagcaaactgactttacactagcagtttcgattattttttttttcctaggctgacaggcaacacgtgcagctgagatatctggagagggcacagggtgtgcagaatgtgaagtgcgtcgtcaaaagagttgtgtaaaagcaaggaatgcagatgtgcaggtaatagggcgagccaaaaatgtttcacggtggctgctgtttgtagttgttggtgtttctgattaattcggtttagaaggtaccagtaccatacctttttttgatggatggattcatcgttgcctcttcttaagaataatgtataaatgctctctttgtagtaggcctgttgaaccagatgtgtacatagtaaagtaaagagtggacaactgatagttttgtagtagtttagttcccacgaataaatctatgtaatcctatctaagaacctgttgacgcatcatcatcgatcgcaaaggcaacgcaatgtacagcagcagaaaatattccctaaatttcaagaaacagtaaattgaattgttg

SEQ ID NO: 59647 - DNA, 2528 bp, Zea Mays
cttcactcgctaaccttaccttcctctagtctcccgtggggttcctattcttagcctgacgcgcctagcgacgggcgcgcgcacgcacacgcacacggttcgttccatggccgcggccgcgacgacgtccacggcaaccagttgctcgtcctcgtccaccagccccggccctcaccgcaggcgccagcccaacgacatcgagcgcgacgacgactcctgctgcggctgcggcggcggcgccgatcaccacttcctacacgcctgtgcgcacgacgacgccgagtgcgacctccacgggcacgccgccgccgccacgccctgcagcgggagggcgctgcagttggcgcggaggaagcgagcgtgggccgtggcaggcgcgccaccccggacggcctggatgaggggcatcgtgctctgcctcctcggcctcgtcgccgtcattgggttcctgggatcgcaccggggcggcgggcgcacggccacgagcgcgggcggcgctggcaccgacgacggcgggaggctcagggtggaggtggccgacgccgacgtcatggagtggacggaggagaatttgacggcccttgcgcgccgctcgcctgaaccgccgatacctgggatatggatgaaaccagacagtgagggttacagccagtgcattgaacggccgaagaatcaccgcaggaaaaacaatgcatctgtcggttacctggtcgttgatgcaaacggtggcctaaaccagatgagaatgggatggcgaagatcatgaacgcatcgctggtgatccctactctggatcatcagtcattctggactgacccaagcgatttcaaagatatattcgacgtcgatcacttcaaggagtcgttgaaggaagacattgtgatcgtggattccctcccaccacattacagaagggtgaaaccgtacgtgagagcgcccacctcctggtccagggcttccttctacagagactttgcgaaaatcctgaggaagttcaaagtggtgaggtttacacacacggattcacggatcgtgaacaacggcctcgctccttcgctgcaaaagcttcggtgccgcgcgaactacgaggcgctccagtacaggaaggagatcgaagagctcggcaacacgctggttgatcggctgagaaacgagtcccagcattacatcgcgcttcacctgagatacgagaaggacatgctggccttcaccgggtgcaaccacaacctgacgctggatgaggcggcggagctgacggacatgcggttcaaggtgcggcactggaaggagaaggacatcaacagcgaggagaggcggctacagggcgggtgccccatgacgccccgcgaggcggccgtgttcctcaaggccatggggtacccctcggccaccaagatctacatcgtcgccggcgagatctacggggcgcacagcctggacgcgctccgggccgagtaccccaacatctacacgcactacagcctcgccacggtggacgagctggagccgctggagctgtaccagaacaggctcgccgccgtggactacatcgtggccctgcagagcgacgtgttcgtgtacacgtacgacggcaacatggcaagggccgtgcaagggcacaggcgatttgaagggttcagaaaaaccatcaaccctgacaggctgaagtttgtggagcttattgacaagctggatgaaggttctatgtcctggactgagttccagactgtggtgaggaagcaacatgagaatagactcggaggtccgtacgagagattgcgtggggcaagcccaaggcaggaggaatacttctactcaaacccgatccctgggtgcctctgcaaaagggttcagaggagtagatgatatggatttttctgggttccattgaaattgttcagtcttagaaacataccgtaccgacagcttcagcggctggagcgtggatggagatgaaccttcctccgcgtagcagagatcatcaccccgaagcgaagagcgagagctagcaaactgactttacactagcagtttcgattattttttttttcctaggctgacaggcaacacgtgcagctgagatatctggagagggcacagggtgtgcagaatgtgaagtgcgtcgtcaaaagagttgtgtaaaagcaaggaatgcagatgtgcaggtaatagggcgagccaaaaatgtttcacggtggctgctgtttgtagttgttggtgtttctgattaattcggtttagaaggtaccagtaccatacctttttttgatggatggattcatcgttgcctcttcttaagaataatgtataaatgctctctttgtagtaggcctgttgaaccagatgtgtacatagtaaagtaaagagtggacaactgatagttttgtagtagtttagttcccacgaataaatctatgtaatcctatctaagaacctgttgacgcatcatcatcgatcgcaaaggcaacgcaatgtacagcagcagaaaatattccctaaatttcaagaaacagtaaattgaattgttg

SEQ ID NO: 59648 - DNA, 2271 bp, Zea Mays
cactccctgcctgcccctctacaaatctctcctgctccactcttctccacgtccatcccgcgccccgaatttcccgagccaactccgccccgccctgtcgctttcccttccacacgcgccgttcgctttgatcgatcaggcaggcatggccgacgagacgaagcaagaagccgccgcgggcgatgaggcggccgtgatcgatggcactgggtcgttcaaggaggagagtaacctggtgtccgagctccccgaccctgagcgcacagcgctcgcgcagctcaaggagctcgtcgccaccgcgctcgctaacggggagttcaacctgccgccgccgccagccaaggaggaggccaagaaggaggagccggcaaaggaagaagctccggcggacaaggaggacgagcccaaggcagaggaggcggctgcccaagagcccgtcaaggaggaggccaagcctgaggagcccaaaacggaggcgccggcggaagcagcgcccgaggaggttaaggacgagacacccgtgccggaagagaccaagactgaggctcccgcgccggaggagcccaaggccgaggagcctgccaaggaggagctcaaggcagaggcggcgacggaagcggtcgccgaggagaccaaaccagctgagccggtgccggaggaggaggagaagacggtcgttgttgccgaggaggaggccaccaaaacggtggaagccatcgaggagacggtcgccgtcgccgtcgccgccgccgcgtccgaggagcccgaggcgggcgagccgaaggaggagctgatctggggcgtgccgctggcgggcgacgacgagcgcacggacacggtgctgctcaagttcctccgcgcgcgcgagttcaaggtgaaggaggcgatggcgatgctcaagtcggcggtgctgtggcgcaagcggttcggcatcgacgagctcctcctggacgccgacctcggcctgcgggagctggagggcgtggtgttctaccgcggcgccgaccgcgagggccacccggtctgctacaacgtgtacggcgagttccaggacaaggagctgtacgagagggccttcggcgacgaggagaagcgggagcgcttcctcaagtggcgcatccagctcctggagcgcggcatccgggagcagctcgacttctcgcccagcggcatctgctccatggtgcaggtcaccgacctcaagaactcgccgcccatgctcggcaagcaccgcgccgtcacgcgccaggctctcgccctgctacaggacaactacccggagttcgtggccaagaaggtgttcatcaacgtgccgtggtggtacctggcggcaaacaaggtgatgagcccattcctgactcagcgcaccaagagcaagatcgtcttctgcagccccggcaagtcggcggagaccctcttcaggtacatcgccccggagcaagtccccgtccagttcggcggcctgtacaaggaggacgacaccgagttctccacctccgacgccgtcaccgagctcaccgtgaaaccgtcctccaaggagaccgtcgagatcccagccaccgagaactccaccgtggtgtgggagctccgcgtgctggggtgggaggtgagctacggcgccgagttcacccccgacgcggagggcggctacaccgtcatcgtgcagaagacgcggaaggtccccgcccacgaggagcccatcatgaagggcagcttcaaggccacggagcccggcaagctggtgctgggcgtgaacaacccggcgtccaggaagaagaagctgctgtgccggttcaaggtgaggagcgccgccgcctgatgagggtcgttggtctgggtcccagcaggtacagcctgccagctgcttgaccaccagcccgacatgtataattcgatcgatcgccaaccaggtccataccgccaccatttgaatgaacatgctgcattgcattacatgataggagagagagagagagagagagaggacaataaagagtttctgcttcctagctaggcccgttccgtgtcctggtcgttctttgattatttgttggcttgctgttcttttttttccttggggggagggtcgcgtttgtatgtgtttattacttgaatgaaaacaaaagtgagcttgttatatgagatagccatggcttgttgaggtcaccgtggtccgtggtggggtgggggaagaagaacagtaacagttgctgcccggcctgtacatttctttcatccgtggattctgttccgtcgacatgtttgtttgag

SEQ ID NO: 59649 - DNA, 2781 bp, Zea Mays
acaggctccgcatgccatggagcatggttctagccaaggttgtggcctacaagaacaaggcttcgatgtccctgcttcccccgatctacggtctcctgtcctgcaacttgattccccacatcttcgatcaccatcagcccttcatgcagctgcggtccttcagcggctaggcttcacacactggcgacttaattttgattaggagaaaacattcaggtgtcgtatcgggcttcgaagtccttcaatttctttgtatgctccttaactttttcgtctgtctttccctataattcttcgttgtctttgccgattctaaaagtgtgttgttcctcgcatattttgattgggttgagatacccaacccttttatcggcatccgaataaagattcagtctataacagatctcatattgatcatattgcattctgcatgatgcatgtgcatgtcagatatttaaaattaatacaactcattaataataacacatgcatgtgtaaaaatgagtgacacttacaatacaagcaacattagaagctggacgtcgagtctcttaaggttcatcatcagccacatgtcctcgaacataacaattgcatgttaattgccaatagcaaaagcatctactggtatacaaacattgatcgtgttgatgccaacaacaaatgctcttatataccagtcgtgtaaccttttttatactagttgggacctttttgagtacatcccaagtgagtagaggtctgctaggcacataatatttagggacattcttgtaatccttcccagttggcttcttgatctttatggtacgcatctcatgcttttttgctaacaactcgtgatcaaccaaatcaatactccatgtggtgtggctccgtgcaatccttgacaaattttttgttgtaccagcggttttcggcttctttggatcgaacgaggaaatcattgttggtataaaattgtttttggtttttaagctcttttgggggtggagaaagtggagccctttatagagatgctggtggcggaggtagtgggtcacaaagaggatgagtacgacagagaaggtggagcccttaatggcgatattagtggcggagatggggggctagaaagatgtaacacccggtccactccaagaccggggtacttactcctggcaaccctctaggaccatagaccatccccacagaccaacacgagtcttttatgtgtactttgtcctcactcctgtgcacccgggaagacttttcggtcgatcacccatcccaaaattgctctaggccaagcacacttaattggaggttctttcgagataggcttccaaaaaaagatgcaccttattgatatgagtactatattaatcctattaagtcttgggccagtatatcacaaaagcggatgaggaggtggcgttggtaggtgaaaaggaatagactaggtagcgggtaaagattgaggaggtgatgacagtttagcaataggacctgcatgtgatgcctcttgagttaggggaggtaatgggatgatggtggtggtgactcaaccaattggacatcccattgaggcagagaatgaaattcttgatagcttgttgagagcacctagagggggtgaataggtgatcttgcaaaatatcacttaaacccacaaacttggtctataatatgagttagagtaaatcaaaaccaagattgcaaaaagagaaagagagataagttccttttcacttgattgctctatcaagatatggtttatactttgagcaatatcacaagtgagaagatggaactaagaagagataaaaattgcaataatgtaaatgacacaagagacatgacaaattttatcctgtgatttggtcaagcgtaatatgcttgtctactccatgttgtggcgtcccaatggacgagggttgcactcaacccctcttaagtgatccaaagatcaaacttgagtaccatagttcttcattatatcttgaaatccgtttgtgtagaatctccacaagttggattctctcacgccttacacaagatgatcacaatccaaaatcagagcaagggagggagtagaacacacacacaagtacacaacgcaacaacaacatgcacaaaagaaaagacaagagcgcaacaacaaaacgatagagtaacgactaaaaaatgtgctcaaatctctctcaagtcactctacggtatggtcacggagtctcgtagttgtagttgaaagggaaatatgcccttgggccaattctataatgttttggtgattaagtgtccaacacatagtgagtgagttgctatgtgctaaacaagcaagaagtgcaaatcatataacaaggtatgtttctagacttagtaattggtttttgtatactaatgtatttgtctgagtgttagaaacagagcagagaagaaaagaaacaaatatgaaaagacttggttgtgtgcagccaaacagcaactctggtcaggtgcaccggacattgtccggtggtgcaccggatagtgtccggtgcgccaggctggtccgcggtgaactcgccgctctcggaattcgacggcggcgtacggctaaaattcaccggactgtccgttggtgcactgaactgtccggtgagccaacggtcgccagcgccaacggtcgggcgtgaaatctgcgggcgacgcgtggcagctccaacggtcggcagggggcactggactgtccggtgcgccaacgggcccggagctgcaacggtcgtcagtgcccgatttagaaggcaatcgcacaccgaa

SEQ ID NO: 59650 - DNA, 3406 bp, Zea Mays
cttcgatgtccctgcttcccccgatctacggtctcctgtcctgcaacttgattccccacatcttcgatcaccatcagcccttcatgcagctgcggtccttcagcggctaggcttcacacactggcgacttaattttgattaggagaaaacattcaggtatgtgctttcttttccatcactaatagtaataagtagacagtgagagaaaccattcatgtttgtgcattgctcgaaagtctatagaaatggtgcatttcttttcacttgatttctttgctgaatagttaaaagtatttctttacaatgaaatacttgctaaagattatataatgtagaaaggcaatgtgctgaatactccccctgtttttatataaacgttttaacttttgtatattcatagcttttgttgtgcacttagatcataccctaatctagacatgtaataaaaataatatatctagaaaagtcaaaacgtcttataatttagaacaaaagaattatgttttgtctaaagattaaacactacctaaaatgtatacttacatggctcatttataaatgacatatctgtacgttaattgcacttaggttctgtaaattaatttaacatgcgtaaacttcggatctgaaagtttcatatttgtatctgtagttttgtggatatgacaagtttgtatttggtaccttgaatttaacacaactgcactgtattgctgtggggaattagaaacaactgagtcttgcaatgaaatcataaggcttttagacctctagtgaagagctaatggagttgagctgcaggcaaccataattgggttgttatccttcaatttctttgcaggtgtcgtatcgggcttcgaagtccttcaatttctttgtatgctccttaactttttcgtctgtctttccctataattcttcgttgtctttgccgattctaaaagtgtgttgttcctcgcatattttgattgggttgagatacccaacccttttatcggcatccgaataaagattcagtctataacagatctcatattgatcatattgcattctgcatgatgcatgtgcatgtcagatatttaaaattaatacaactcattaataataacacatgcatgtgtaaaaatgagtgacacttacaatacaagcaacattagaagctggacgtcgagtctcttaaggttcatcatcagccacatgtcctcgaacataacaattgcatgttaattgccaatagcaaaagcatctactggtatacaaacattgatcgtgttgatgccaacaacaaatgctcttatataccagtcgtgtaaccttttttatactagttgggacctttttgagtacatcccaagtgagtagaggtctgctaggcacataatatttagggacattcttgtaatccttcccagttggcttcttgatctttatggtacgcatctcatgcttttttgctaacaactcgtgatcaaccaaatcaatactccatgtggtgtggctccgtgcaatccttgacaaattttttgttgtaccagcggttttcggcttctttggatcgaacgaggaaatcattgttggtataaaattgtttttggtttttaagctcttttgggggtggagaaagtggagccctttatagagatgctggtggcggaggtagtgggtcacaaagaggatgagtacgacagagaaggtggagcccttaatggcgatattagtggcggagatggggggctagaaagatgtaacacccggtccactccaagaccggggtacttactcctggcaaccctctaggaccatagaccatccccacagaccaacacgagtcttttatgtgtactttgtcctcactcctgtgcacccgggaagacttttcggtcgatcacccatcccaaaattgctctaggccaagcacacttaattggaggttctttcgagataggcttccaaaaaaagatgcaccttattgatatgagtactatattaatcctattaagtcttgggccagtatatcacaaaagcggatgaggaggtggcgttggtaggtgaaaaggaatagactaggtagcgggtaaagattgaggaggtgatgacagtttagcaataggacctgcatgtgatgcctcttgagttaggggaggtaatgggatgatggtggtggtgactcaaccaattggacatcccattgaggcagagaatgaaattcttgatagcttgttgagagcacctagagggggtgaataggtgatcttgcaaaatatcacttaaacccacaaacttggtctataatatgagttagagtaaatcaaaaccaagattgcaaaaagagaaagagagataagttccttttcacttgattgctctatcaagatatggtttatactttgagcaatatcacaagtgagaagatggaactaagaagagataaaaattgcaataatgtaaatgacacaagagacatgacaaattttatcctgtgatttggtcaagcgtaatatgcttgtctactccatgttgtggcgtcccaatggacgagggttgcactcaacccctcttaagtgatccaaagatcaaacttgagtaccatagttcttcattatatcttgaaatccgtttgtgtagaatctccacaagttggattctctcacgccttacacaagatgatcacaatccaaaatcagagcaagggagggagtagaacacacacacaagtacacaacgcaacaacaacatgcacaaaagaaaagacaagagcgcaacaacaaaacgatagagtaacgactaaaaaatgtgctcaaatctctctcaagtcactctacggtatggtcacggagtctcgtagttgtagttgaaagggaaatatgcccttgggccaattctataatgttttggtgattaagtgtccaacacatagtgagtgagttgctatgtgctaaacaagcaagaagtgcaaatcatataacaaggtatgtttctagacttagtaattggtttttgtatactaatgtatttgtctgagtgttagaaacagagcagagaagaaaagaaacaaatatgaaaagacttggttgtgtgcagccaaacagcaactctggtcaggtgcaccggacattgtccggtggtgcaccggatagtgtccggtgcgccaggctggtccgcggtgaactcgccgctctcggaattcgacggcggcgtacggctaaaattcaccggactgtccgttggtgcactgaactgtccggtgagccaacggtcgccagcgccaacggtcgggcgtgaaatctgcgggcgacgcgtggcagctccaacggtcggcagggggcactggactgtccggtgcgccaacgggcccggagctgcaacggtcgtcagtgcccgatttagaaggcaatcgcacaccgaa

SEQ ID NO: 59651 - DNA, 1133 bp, Zea Mays
cctcactttcgcaatcaaatcaaacgccaccatcgcggcgcgtcgccacctgccctgccctgccctccctaccgggtcccacgctgtcagttgcacagcaaaaccgccctccgcgtccccgtccccgtccccatcccgaaaccgcgcgtgtcgccagcccatagatcagagcctagccagagccagagctgagagccgaggagggaaacgaagaagcggccatggcgatgaagcggccggcgcgcagcgacccacacctgccacccgaggaggcggcacgggtggaggccgaggttcggagctacttcgacagcgtcgcgccgaggcgcccggccaagccgccgcgcagcgacccgtcggtggacaccttcgcggaacccgccgccgtcgacgccggggaccacgacttgccggagctccgcaagctgcgcgacctcgaggcgaagccccagaagctggtgttggacggagggggaggggacgtggatggcggggaggattacgtggagacgcgatactacgatggcctcataggcatcgacaagcagcatcacacgcatcgttctgtggccgttcaagtcagttccgtttgtttgcagactgggacaggctttatcaaagtggagagatccaatggcagcaccttcagtgtgatgactaacggctacccacctgccagctctgtccgctgcacgagcaatcctgcgacaaatgattggataccatcttctgaatcgatcatccctgcttcgaacaagcccagcaggagcgactcctgaccagcctttccttgccttgaagtgccgtggattgcttacctgcaaagataataaactgcacactactgttcgagtgttgataatgaactacagaccctgaatgaatgtgcctatgtgatggtttggtactttgatgaccggtttttcttttccagcaaaccttgatgaccaggtgtgcggcgtgtgccccgtcctgatcatgatatgaatttgtgtgcaagatgcgtctgtgtaagagcaagtttaataatatagtttatagtgagtttttatgatgttgacatataacatatagccaattaaaagctcggtcatataataacaccgttataatacagattatacatttaattc

SEQ ID NO: 59652 - DNA, 1040 bp, Zea Mays
cagagcctagccagagccagagctgagagccgaggagggaaacgaagaagcggccatggcgatgaagcggccggcgcgcagcgacccacacctgccacccgaggaggcggcacgggtggaggccgaggttcggagctacttcgacagcgtcgcgccgaggcgcccggccaagccgccgcgcagcgacccgtcggtggacaccttcgcggaacccgccgccgtcgacgccggggaccacgacttgccggagctccgcaagctgcgcgacctcgaggcgaagccccagaagctggtgttggacggagggggaggggacgtggatggcggggaggattacgtggagacgcgatactacgatggcctcataggcatcgacaagcagcatcacacgctctgtccgctgcacgagcaatcctgcgacaaatgattggataccatcttctgaatcgatcatccctgcttcgaacaagcccagcaggagcgactcctgaccagcctttccttgccttgaagtgccgtggattgcttacctgcaaagataataaaatgcactgcttctgtgtggtagtaccgtagtagtgcagcacgcggcagagatcctgacttgacactcgagagagagagaagggaagcatactgccggagtgccgggcgcacgggttggggacacgagatgtgactacttcaacgaagaatgtgtacgggcacgggtgcgtcagcacatgttacttgttgctgcacctgcacactactgttcgagtgttgataatgaactacagaccctgaatgaatgtgcctatgtgatggtttggtactttgatgaccggtttttcttttccagcaaaccttgatgaccaggtgtgcggcgtgtgccccgtcctgatcatgatatgaatttgtgtgcaagatgcgtctgtgtaagagcaagtttaataatatagtttatagtgagtttttatgatgttgacatataacatatagccaattaaaagctcggtcatataataacaccgttataatacagattatacatttaattc

SEQ ID NO: 59653 - DNA, 1081 bp, Zea Mays
atggcgatgaagcggccggcgcgcagcgacccacacctgccacccgaggaggcggcacgggtggaggccgaggttcggagctacttcgacagcgtcgcgccgaggcgcccggccaagccgccgcgcagcgacccgtcggtggacaccttcgcggaacccgccgccgtcgacgccggggaccacgacttgccggagctccgcaagctgcgcgacctcgaggcgaagccccagaagctggtgttggacggagggggaggggacgtggatggcggggaggattacgtggagacgcgatactacgatggcctcataggcatcgacaagcagcatcacacgttccgtttgtttgcagactgggacaggctttatcaaagtggagagatccaatggcagcaccttcagtgtgatgactaacggctacccacctgccagctctgtccgctgcacgagcaatcctgcgacaaatgattggataccatcttctgaatcgatcatccctgcttcgaacaagcccagcaggagcgactcctgaccagcctttccttgccttgaagtgccgtggattgcttacctgcaaagataataaaatgcactgcttctgtgtggtagtaccgtagtagtgcagcacgcggcagagatcctgacttgacactcgagagagagagaagggaagcatactgccggagtgccgggcgcacgggttggggacacgagatgtgactacttcaacgaagaatgtgtacgggcacgggtgcgtcagcacatgttacttgttgctgcacctgcacactactgttcgagtgttgataatgaactacagaccctgaatgaatgtgcctatgtgatggtttggtactttgatgaccggtttttcttttccagcaaaccttgatgaccaggtgtgcggcgtgtgccccgtcctgatcatgatatgaatttgtgtgcaagatgcgtctgtgtaagagcaagtttaataatatagtttatagtgagtttttatgatgttgacatataacatatagccaattaaaagctcggtcatataataacaccgttataatacagattatacatttaattc

SEQ ID NO: 59654 - DNA, 2046 bp, Zea Mays
  misc_feature (2045)..(2046): n is a, c, g, or t
gcaacgcgcgccaaatgttctagtcctactaatcgcaactcgtttcccacaacacaacgcccatctctttcgtctccgctcccttctgctcacccgcacgatggcgccggaggcgcgaggtgaggcggcgccggtgtacagggacgcattgacgccggtggaggaaagggtgcgagacctgctgggccgcatgacgctgcgtgagaaggcggcgcagatggcccagatcgagcgcaccgtcgcgacgccgcgcgccctcacggagctcggggccggcagcgttctcaacgccgggggaagcatgccctgcgagcaagcctcccccgccgactgggccgccatggttgacggcttccagcgccttgcgatctcctcccgcctcggcgtccccatcctctacggcaccgacgccgtccacggccacaacaacgtctacggcgccaccgtgttcccccacaatgtcggtctcggggcctgcagggacggagagctcgcgcgtaggatcggcgaggcgacggcgcttgaggttcgcgccactggcatccactggaccttcgcgccatgcgtcgccgtctgtcgggatcctaggtggggtagatgctacgaaagctacagcgaggacccagaaatcgtgcgctcgttgaccaccattgtcagcggtttgcaggggcagccgtcagcggaccatcctcatggttaccccttcctcgcttcgcctaggggatggcggcacggacaagggggtcactgaggggaacgccatttgctcctatgaggatttggaagcaatccatatgagaccttacccggattgtatggctcaaggggtggcaacagtaatgacgtcctactctaaatggaatggggagccattgcattcgagtcgctacttgttaacagatgttctgaagggcaagttaggctttaagattgggagggcattgacaggatctgtgagcctcgagggtctgattatcgctattgcattgcacaatcagtaaatgcaggaatggacatgattatgatacctcataggtttgagaaatttttggatgatattgtgttcttggtggaggcgggggagataccaatgtctcgtattgatgacgctgttgaacgaattctgagggtcaagtttatttctggagtgtttgagcatccattttcagaccaatctctactggacatagttggttgtaaggaacatcgattactagcgcgtgaagctgttcgcaagtctttggtacttctgaaaaatggcaaggatcagaaggagccatttcttccattggccagagatgcaaaaagaatactggttgcaggaacacatgctgacgatattggatatcaatgtggtggctggacgatagcgtggcctggagacagtggaaaagtaactcttggtacaagcatattggaggccatacaagaattagtgggagtgcaaactgaagttgtgcatgagaaatacccaaccaaagctatgattgaaactgggggtttttcctatgcggtggtggttgttggagaggttccatatgctgaatggataggagatagaactgaccttagtatcccgtttaatggctctgaccttatcatccgtgttgcaagtaaaatccctatcctagtgattgttatttctggaaggccattgattattgagtcacaagttttggaaaagatagatgctctagtcgctgcctggctgcctggaagtgaaggcatgggaattaccgattgcctctttggagatcatgattttgtgggcacattgcctgtgacatggtataagtctgttgatcaattgcctataaatgctggagactctaactatgacccgttattccctgttggatatgggctgaaaatgtttcgaagtgatgatgattcaacataactttattattgattgggtacatttggatctctgtgatattaaatactctttatttactagctattggtacttaaaaccaaataatatattgttgtagtatgcattatactgtattggaaacattatattcttaccttagattttnn

SEQ ID NO: 59655 - DNA, 2064 bp, Zea Mays
  misc_feature (2063)..(2064): n is a, c, g, or t
gcaacgcgcgccaaatgttctagtcctactaatcgcaactcgtttcccacaacacaacgcccatctctttcgtctccgctcccttctgctcacccgcacgatggcgccggaggcgcgaggtgaggcggcgccggtgtacagggacgcattgacgccggtggaggaaagggtgcgagacctgctgggccgcatgacgctgcgtgagaaggcggcgcagatggcccagatcgagcgcaccgtcgcgacgccgcgcgccctcacggagctcggggccggcagcgttctcaacgccgggggaagcatgccctgcgagcaagcctcccccgccgactgggccgccatggttgacggcttccagcgccttgcgatctcctcccgcctcggcgtccccatcctctacggcaccgacgccgtccacggccacaacaacgtctacggcgccaccgtgttcccccacaatgtcggtctcggggcctgcagggacggagagctcgcgcgtaggatcggcgaggcgacggcgcttgaggttcgcgccactggcatccactggaccttcgcgccatgcgtcgccgtctgtcgggatcctaggtggggtagatgctacgaaagctacagcgaggacccagaaatcgtgcgctcgttgaccaccattgtcagcggtttgcaggggcagccgtcagcggaccatcctcatggttaccccttcctcgcttcgcctagggagaatgtacttgcttgcgctaagcatttcgcaggggatggcggcacggacaagggggtcactgaggggaacgccatttgctcctatgaggatttggaagcaatccatatgagaccttacccggattgtatggctcaaggggtggcaacagtaatgacgtcctactctaaatggaatggggagccattgcattcgagtcgctacttgttaacagatgttctgaagggcaagttaggctttaagattgggagggcattgacaggatctgtgagcctcgagggtctgattatcgctattgcattgcacaatcagtaaatgcaggaatggacatggtttgagaaatttttggatgatattgtgttcttggtggaggcgggggagataccaatgtctcgtattgatgacgctgttgaacgaattctgagggtcaagtttatttctggagtgtttgagcatccattttcagaccaatctctactggacatagttggttgtaaggaacatcgattactagcgcgtgaagctgttcgcaagtctttggtacttctgaaaaatggcaaggatcagaaggagccatttcttccattggccagagatgcaaaaagaatactggttgcaggaacacatgctgacgatattggatatcaatgtggtggctggacgatagcgtggcctggagacagtggaaaagtaactcttggtacaagcatattggaggccatacaagaattagtgggagtgcaaactgaagttgtgcatgagaaatacccaaccaaagctatgattgaaactgggggtttttcctatgcggtggtggttgttggagaggttccatatgctgaatggataggagatagaactgaccttagtatcccgtttaatggctctgaccttatcatccgtgttgcaagtaaaatccctatcctagtgattgttatttctggaaggccattgattattgagtcacaagttttggaaaagatagatgctctagtcgctgcctggctgcctggaagtgaaggcatgggaattaccgattgcctctttggagatcatgattttgtgggcacattgcctgtgacatggtataagtctgttgatcaattgcctataaatgctggagactctaactatgacccgttattccctgttggatatgggctgaaaatgtttcgaagtgatgatgattcaacataactttattattgattgggtacatttggatctctgtgatattaaatactctttatttactagctattggtacttaaaaccaaataatatattgttgtagtatgcattatactgtattggaaacattatattcttaccttagattttnn

SEQ ID NO: 59656 - DNA, 1522 bp, Zea Mays
ccggcgcctcagcctccccaccggcgccacgtacgaccgcgcgtccatacagcgttggctggactccggccaccgcacctgcccggccacgcggctgccgctggcgtccaccgacctggttcccaacctgctgctgcgccgcctcatccacctgcacgcggccacgctgccgccttccccgtcgcccgaggaggtgctgtcgcagctggccgccgcagacggggagcccgcggccgcggagaaggccgtgcggtcgctggcggccaagatcgcgccggagaaagggaagcgggcctcggtcgcgtccgcggtgtccgccgatctcgactccgcggtgccggcgctcctctcgttcgccaagggcggggcgggcgccgacgcgcgcgtggacgcggtgagggtccttgctaccgtggccccggagctggtcccttacctgacgggggatggcacggagaatcgcgacagggtgagtatggcggtggaggccctggccgccgtgctgtccgcggaagggatcgcggaagaggccagggagggcctcgtccttgctcttgtcgccgaggatctgggccgcgtcgtgacgacgctgctcggcgcgggcgcgaacggcgccgcggtccttgaggcgatgctgacgtcggcgcgcgtggacgcggacgccaagaccgcaatcgccgacaggccggagctgttcccggacctcgtgcggatcctcagggacgccgcgtcgcaggcggccatccggtgcatggtcgccgcggtgcaggtccgcggccggccggcgcgcgcgtccatggtccgggccggggccgtccccgcgctggcgctggccgtggcggccgcgcccacggccgccgcggagtccgcgctgcggctgctggcggaggcggcgcgctgtggcgacggcaaagcggccatcggcgccgacgccgcggaggtggcggccgccgtgatggggcggatgatccgggtggggccggcggggcgggaggctgccgtggtggcgctgtggctgtgctgctgcgcgggcggcggcgaccggaggatgcgggaggccgtggcttccgcgcccgaggcggtggggaagctgctggtggtgatgcagggggactgcgccccgaccacctcgcggatggccggagagctgctgcgagcggtgcggatggagcatgagaagaagggcatggccgccgcctacgacagccgcaccatccatgtcatgccgtactgatggatccggcggaaacgcatcgccctgcagcttcacagcttgcagctgtaatacaatctatggaaagcggtgtaagtaacgtaggggatcgatcggtcggattggagcgaatcatgtgctgactgctttgcaaaatatgctgcttgcatcggggaagtgagaaaaaaaatcgctgtagaagctcgaataagaacgagaatacgtgcacaattctggcacggctctggctcgttggagacggaggcacagagtcaaaaatggagacagaatgacagtagcactatttgc

SEQ ID NO: 59657 - DNA, 3554 bp, Zea Mays
aaatccggagccagtagggagtggtaggcggagcggagccgcgaggagcccgcgtgtcgcgagagagcagaggcggcggaccggcggcgtccaccgaacaggagatcttgccgtgacatcgtcccgtcgcctgttcccaccagaatcgaaggagaaacttcgtcgccgctgccgcggcatccggtcatcctcgccgcttgccaatgcaggtggagaccaccgcgagctcgcttaagatgtcgccgtgtttgaacctcagttggacctggtcaggacaaatgtgactggttgggctatatacggattgacgtacctgttgcgagttgctgctgctggactgtgattgttttgtcacgtattgaggctcatggagtcacggatggatcagtacgaaatcatggagcagattggccgtggggctttcggtgccgccatactagtcaatcacaaatctgaaaagaagaagtatgtgctgaagaaaatccgtcttgcgaggcagactgagcgctgtcggaagtctgcccatcaagagatggctctaattgctcggctgcagcacccttacattgttgaattcaaggaggcttgggttgagaagggttgttatgtctgcattgtcacgggctattgtgaaggtggagacatggatgagctgatgaagaaatcaaatggtacctactttcctgaggaggtattgcttaaatggttcgctcaattggtgttggctgtagattacttgcactcgaactatgtcttgcaccgtgatctgaaatgctccaacatatttctcaccaaagaccaggacatacgccttggttagtctctcacaacaaatacagtaatgcaagagactttggcctggcgaagactttgaaggaagatgatctaacttcatcggtggtcgggacaccaaattacatgtgcccagagctgctagctgatattccctatggtttcaagtcagacatctggtctctcggatgttgtatgtatgagatggcagctcaccgccctgccttcaaggcatttgatatggctggattaataagcaagataaatcggtcttccatgggtcctttgcctgcctgttactcagtgtctatgaaaaccctaatcaaaagtatgttgaggaagagtccagagcatcgacctactgcatctgagatcctgaagaacccgtacctacaaccttatgttaatcaataccggcccctttatgattcttcaaacccaatgcggatgccagagaaacaattacatacttcacggagcagtcagagaagcatgtctgacagccaaagcagtagcatttccagtagtgacattgacagtgcccagtcaagtgacagaagcacatcaggtggaactacaagtactgacagaaagactattgatactgcaagcattcgagatgtggatcaaggtaagtcagatgaaaatggtgcaacacctgaagatgttagaggcaacaaagacaatggtagtgttcagtttaaaaggcaagattcattgaaatgcatacatgttgatcaccatcccagaccagagagcaaacaaccaaagatcattgagaagataatgacaacccttagagaggagagcaggctgagagaaatcaactgtcctgtcagaggtggtgtaaagccgaattctggccacagcaacaataatcaagtagagcaaccattacaggtttcaaggacaaacagtgatatgccatgcagcttaaaatctggcaacattctatcccatgatgaacatgtaaatgaagttgaagcatcaccacccttgaagaaactgtcacctattgttgaacatagcccaaagatgaaaaccgctgggccatcaactcctgaacctgccaaacaaatcacagaaaatggggctgcagcttcaggaagaactaagaacaagtcaccacttcctgctagacgacctagccctcagaggcaagctggagcagggacttcaagtttcccagtcacaatgacaagacgtactcataccaagttcataacagagagagagaaaactctagagggaccatcctgtagcccggataatactcttagagatcatccacaaagtttaatgatttcttcaaatccttcagaaggacagcatatgaaactggattcttcacaagcaaatccaacaaatctttgggagcttttcaccgtttcagcgaaggaacacagcagtgcttgctcaagttctacagttggttgtactgaacctatggaccagcctgaactatctgaacctaattcacctgtctgccttgtttcaccatgtacaggctgttcaccaaacacaaccgaagaggacgacaaaagcaccataccatgttcagaaattaacactgacaagaacattgcaactaaaaatggtggttcaagcctgaggtcagatttggagccatcctttctgagttctgaacaagagtttatttccaaagaagtgcagtctagcaagcatgagaagagcaacatcacattccaaagcggtgaagataagttcactgtccaggagctgctttcatcggcaccagaagttgctcctcctgtttcatcagcaccagaagctgctcattctattccagccacaaaaggaacactattggattcacccacttctcttcagtcatggaagaaacatgtagtttctcatttaaaccctccagttgatgatgctctacagactataagacacagcactttctgtctcagtgatgagcagccaacacaaggaagtgttcaaagagaagctcagagcgctgatatgatcaaactactggatgttgtaccagaagaggctgatgcaaggagcagctcgttaaacaccctgcttccagcacgatccccatcagttactgctacatcacaagtctcagaagccaatgttgctaccaaggcactagctgcctcggacaatacaaaatcatctgctgcctcatcggggaccagcaacggagtgcaggaagaggcatcccctactaaggaagtactcgatgttacatcgtttcggcagcgtgctgaggctctcgaagggcttctggagctttcggcagagctgctggagactcaaaggctggaggagctagccattgttctcaagccgtttgggaagaacaaggtgtccccacgagaaaccgctatctggctggccagaagtttcaaagggatgatgactgacgaagcaggtcgcacgtcactatgagcacgaatttttgtctgcctgtttgtttggtttcacttgagcagagttgtgctcggagtaaatcggtgccgctaggtttggtaatagcagtgctctgagttactcaaaattgattgaattgacagcagcttgtggagttgtattcttttttatttttatttttgagaagacagtttgtggtctccgttgccacttttttttcccatttccgattgctccattcttttggcgtatgttgtacatagccaagaacttagaactgtaaacagcaataaagcttgcctccggggtgtgattcaaaaaacaaaacactgttaagctaaatgaaccttgaa

SEQ ID NO: 59658 - DNA, 1600 bp, Zea Mays
acccgcgacggttagtttattgcacgccgtccaccagccggtcctgcgctctcgagtcgagactccaccttccattcatttcatctgctccatctccctctctgttcgccggcgtataataagcttcccctttctgcaactgatctgatccgggctgccgtgagctctgctcgtcctgatggagttcaagagggatgtatggagcctgctcctcgtgctgctcctcgggcagctcgtcgccttctccatggccgcctcaagcttcgcctcctccctcattgctaatcttggagtcgatgccccactgacacagtctttcttagcctacctgttgctgaccttagtctatgtaccaatcgtcctgcgtcgacggcagaagctgcaaatagcttggtactggtacctagctctggccttctttgatgtacaggggaactatcttgttgtgaaggcgtaccagtactcatacattaccagtgtgactttgttggattgctggactgttgtatgggtcgtcatgctcacctggtacgcactgggcacaagatactcactctggcagttcgtgggggcagggacctgtgtggcagggctcgcccttgtgctgctttcagatgcaaaatctcaagatgagcaagatccgaaaaaaataccacttctgggggatgcccttgttattgctgggacagttggttttgcatttagcaatgttggggaggaatactgtgtcaagaaaaaggatagagttgaagttgttgcaatgcttggtctctttgggttgctgatcagcacagcgcagatacttgtatttgaaaggaagggcctagaagcagttacatggtctccaacaatgataagtctgtttgcaggatttgcagtggcaattttcgtattctacacagttgctcctttcgttcttaagatgagtggagctacattgttcaacctttcactgctaacatctgacatgtgggcagtcgccattcgagttttattctatcagcaagagataaacaggttgtactacctagcattcgcagttgtggccattggattaatcatctattcgttgaatgatagatcttcagatgatgaaacagctggaagtacagaagcaccggcccaatatcagcaacttccaattgaagacaattcaacaagaattggttctagttcaggaaaacgtttaattggcccaagaagctaagcaagatgaggaagagaatcagaattaattttctttacaagtcagtccagcagattattcacaagagcagacccattgctgaaggctcccgcatcagtgagatctaaggaagggataatacatcgggtcaaaatgatctttgactagggattgtgaacaatcacagctggtctgcaaagcataatagcaacagtatgaacatgtaaagggagttactagtcactaaagctctttcaagaattgtctatgaaggaaaaaaaattctagatagtgtatggatagcttacatgctttactggaatgcagaattatgatttaatgatattttctatattactcattgttaaattctatgagaagtatcatgccccgtgaattggaagctaaaagggg

SEQ ID NO: 59659 - DNA, 1994 bp, Zea Mays
ccagccggtcctgcgctctcgagtcgagactccaccttccattcatttcatctgctccatctccctctctgttcgccggcgtataataagcttcccctttctgcaactgatctgatccgggctgccgtgagctctgctcgtcctgatggagttcaagagggatgtatggagcctgctcctcgtgctgctcctcgggcagctcgtcgccttctccatggccgcctcaagcttcgcctcctccctcattgctaatcttggagtcgatgccccactgacacagtctttcttagcctacctgttgctgaccttagtctatgtaccaatcgtcctgcgtcgacggcagaagctgcaaatagcttggtactggtacctagctctggccttctttgatgtacaggggaactatcttgttgtgaaggcgtaccagtactcatacattaccagtgtgactttgttggattgctggactgttgtatgggtcgtcatgctcacctggtacgcactgggcacaagatactcactctggcagttcgtgggggcagggacctgtgtggcagggctcgcccttgtgctgctttcagatgcaaaatctcaagatgagcaagatccgaaaaaaataccacttctgggggatgcccttgttattgctgggacagttggttttgcatttagcaatgttggggaggaatactgtgtcaagaaaaaggatagagttgaagttgttgcaatgcttggtctctttgggttgctgatcagcacagcgcagatgtatcctcaaaaattcattattagttatataacctgtatagcaaactggcatgatctattggtaatcacatacattgctctatttcgcaaggttaaactcttgccacagttttcctggaacaaaaaagtagtaactgtgtaacccatattaatcttaaaaattagttaaataaactggcatgatctgtcgaatgacatctatatattgtctcccttttgtcaagttaaactaacagcacaattctttggaacaaaagttgtaactataaatatgacccaggttcttgtaatcttttaacttgatgaaccttagacttgtatttgaaaggaagggcctagaagcagttacatggtctccaacaatgataagtctgtttgcaggatttgcagtggcaattttcgtattctacacagttgctcctttcgttcttaaggttaagatctccaacatgtcaggcatgacatgagcttcacaaggaggaggcaacactagaaacttaggccctgtcaaatggttatggtttattaaaaataaacacagaataatgatgagtggagctacattgttcaacctttcactgctaacatctgacatgtgggcagtcgccattcgagttttattctatcagcaagagataaacaggttgtactacctagcattcgcagttgtggccattggattaatcatctattcgttgaatgatagatcttcagatgatgaaacagctggaagtacagaagcaccggcccaatatcagcaacttccaattgaagacaattcaacaagaattggttctagttcaggaaaacgtttaattggcccaagaagctaagcaagatgaggaagagaatcagaattaattttctttacaagtcagtccagcagattattcacaagagcagacccattgctgaaggctcccgcatcagtgagatctaaggaagggataatacatcgggtcaaaatgatctttgactagggattgtgaacaatcacagctggtctgcaaagcataatagcaacagtatgaacatgtaaagggagttactagtcactaaagctctttcaagaattgtctatgaaggaaaaaaaattctagatagtgtatggatagcttacatgctttactggaatgcagaattatgatttaatgatattttctatattactcattgttaaattctatgagaagtatcatgccccgtgaattggaagctaaaagggg

SEQ ID NO: 59660 - DNA, 1944 bp, Zea Mays
ccagccggtcctgcgctctcgagtcgagactccaccttccattcatttcatctgctccatctccctctctgttcgccggcgtataataagcttcccctttctgcaactgatctgatccgggctgccgtgagctctgctcgtcctgatggagttcaagagggatgtatggagcctgctcctcgtgctgctcctcgggcagctcgtcgccttctccatggccgcctcaagcttcgcctcctccctcattgctaatcttggagtcgatgccccactgacacagtctttcttagcctacctgttgctgaccttagtctatgtaccaatcgtcctgcgtcgacggcagaagctgcaaatagcttggtactggtacctagctctggccttctttgatgtacaggggaactatcttgttgtgaaggcgtaccagtactcatacattaccagtgtgactttgttggattgctggactgttgtatgggtcgtcatgctcacctggtacgcactgggcacaagatactcactctggcagttcgtgggggcagggacctgtgtggcagggctcgcccttgtgctgctttcagatgcaaaatctcaagatgagcaagatccgaaaaaaataccacttctgggggatgcccttgttattgctgggacagttggttttgcatttagcaatgttggggaggaatactgtgtcaagaaaaaggatagagttgaagttgttgcaatgcttggtctctttgggttgctgatcagcacagcgcagatgtatcctcaaaaattcattattagttatataacctgtatagcaaactggcatgatctattggtaatcacatacattgctctatttcgcaaggttaaactcttgccacagttttcctggaacaaaaaagtagtaactgtgtaacccatattaatcttaaaaattagttaaataaactggcatgatctgtcgaatgacatctatatattgtctcccttttgtcaagttaaactaacagcacaattctttggaacaaaagttgtaactataaatatgacccaggttcttgtaatcttttaacttgatgaaccttagacttgtatttgaaaggaagggcctagaagcagttacatggtctccaacaatgataagtctgtttgcaggatttgcagtggcaattttcgtattctacacagttgctcctttcgttcttaagatgagtggagctacattgttcaacctttcactgctaacatctgacatgtgggcagtcgccattcgagttttattctatcagcaagagataaacaggttgtactacctagcattcgcagttgtggccattggattaatcatctattcgttgaatgatagatcttcagatgatgaaacagctggaagtacagaagcaccggcccaatatcagcaacttccaattgaagacaattcaacaagaattggttctagttcaggtagccaagaaaggacacataaggaagaagttcatatctgttagtgggataataatgtattaatgaaaacgtttaattggcccaagaagctaagcaagatgaggaagagaatcagaattaattttctttacaagtcagtccagcagattattcacaagagcagacccattgctgaaggctcccgcatcagtgagatctaaggaagggataatacatcgggtcaaaatgatctttgactagggattgtgaacaatcacagctggtctgcaaagcataatagcaacagtatgaacatgtaaagggagttactagtcactaaagctctttcaagaattgtctatgaaggaaaaaaaattctagatagtgtatggatagcttacatgctttactggaatgcagaattatgatttaatgatattttctatattactcattgttaaattctatgagaagtatcatgccccgtgaattggaagctaaaagggg

SEQ ID NO: 59661 - DNA, 1880 bp, Zea Mays
ccagccggtcctgcgctctcgagtcgagactccaccttccattcatttcatctgctccatctccctctctgttcgccggcgtataataagcttcccctttctgcaactgatctgatccgggctgccgtgagctctgctcgtcctgatggagttcaagagggatgtatggagcctgctcctcgtgctgctcctcgggcagctcgtcgccttctccatggccgcctcaagcttcgcctcctccctcattgctaatcttggagtcgatgccccactgacacagtctttcttagcctacctgttgctgaccttagtctatgtaccaatcgtcctgcgtcgacggcagaagctgcaaatagcttggtactggtacctagctctggccttctttgatgtacaggggaactatcttgttgtgaaggcgtaccagtactcatacattaccagtgtgactttgttggattgctggactgttgtatgggtcgtcatgctcacctggtacgcactgggcacaagatactcactctggcagttcgtgggggcagggacctgtgtggcagggctcgcccttgtgctgctttcagatgcaaaatctcaagatgagcaagatccgaaaaaaataccacttctgggggatgcccttgttattgctgggacagttggttttgcatttagcaatgttggggaggaatactgtgtcaagaaaaaggatagagttgaagttgttgcaatgcttggtctctttgggttgctgatcagcacagcgcagatgtatcctcaaaaattcattattagttatataacctgtatagcaaactggcatgatctattggtaatcacatacattgctctatttcgcaaggttaaactcttgccacagttttcctggaacaaaaaagtagtaactgtgtaacccatattaatcttaaaaattagttaaataaactggcatgatctgtcgaatgacatctatatattgtctcccttttgtcaagttaaactaacagcacaattctttggaacaaaagttgtaactataaatatgacccaggttcttgtaatcttttaacttgatgaaccttagacttgtatttgaaaggaagggcctagaagcagttacatggtctccaacaatgataagtctgtttgcaggatttgcagtggcaattttcgtattctacacagttgctcctttcgttcttaagatgagtggagctacattgttcaacctttcactgctaacatctgacatgtgggcagtcgccattcgagttttattctatcagcaagagataaacaggttgtactacctagcattcgcagttgtggccattggattaatcatctattcgttgaatgatagatcttcagatgatgaaacagctggaagtacagaagcaccggcccaatatcagcaacttccaattgaagacaattcaacaagaattggttctagttcaggaaaacgtttaattggcccaagaagctaagcaagatgaggaagagaatcagaattaattttctttacaagtcagtccagcagattattcacaagagcagacccattgctgaaggctcccgcatcagtgagatctaaggaagggataatacatcgggtcaaaatgatctttgactagggattgtgaacaatcacagctggtctgcaaagcataatagcaacagtatgaacatgtaaagggagttactagtcactaaagctctttcaagaattgtctatgaaggaaaaaaaattctagatagtgtatggatagcttacatgctttactggaatgcagaattatgatttaatgatattttctatattactcattgttaaattctatgagaagtatcatgccccgtgaattggaagctaaaagggg

SEQ ID NO: 59662 - DNA, 2356 bp, Zea Mays
ccagccggtcctgcgctctcgagtcgagactccaccttccattcatttcatctgctccatctccctctctgttcgccggcgtataataagcttcccctttctgcaactgatctgatccgggctgccgtgagctctgctcgtcctgatggagttcaagagggatgtatggagcctgctcctcgtgctgctcctcgggcagctcgtcgccttctccatggccgcctcaagcttcgcctcctccctcattgctaatcttggagtcgatgccccactgacacagtctttcttagcctacctgttgctgaccttagtctatgtaccaatcgtcctgcgtcgacggcagaagctgcaacttggtactggtacctagctctggccttctttgatgtacaggggaactatcttgttgtgaaggcgtaccagtactcatacattaccagtgtgactttgttggattgctggactgttgtatgggtcgtcatgctcacctggtacgcactgggcacaagatactcactctggcagttcgtgggggcagggacctgtgtggcagggctcgcccttgtgctgctttcagatgcaaaatctcaagatgagcaagatccgaaaaaaataccacttctgggggatgcccttgttattgctgggacagttggttttgcatttagcaatgttggggaggaatactgtgtcaagaaaaaggatagagttgaagttgttgcaatgcttggtctctttgggttgctgatcagcacagcgcagatgtatcctcaaaaattcattattagttatataacctgtatagcaaactggcatgatctattggtaatcacatacattgctctatttcgcaaggttaaactcttgccacagttttcctggaacaaaaaagtagtaactgtgtaacccatattaatcttaaaaattagttaaataaactggcatgatctgtcgaatgacatctatatattgtctcccttttgtcaagttaaactaacagcacaattctttggaacaaaagttgtaactataaatatgacccaggttcttgtaatcttttaacttgatgaaccttagacttgtatttgaaaggaagggcctagaagcagttacatggtctccaacaatggtaagaaaagtacattctaccgtgaaactccccataaacctcactgattttattatctggaaactcattcctgcttttgtctttttcatttgttccagataagtctgtttgcaggatttgcagtggcaattttcgtattctacacagttgctcctttcgttcttaaggttaagatctccaacatgtcaggcatgacatgagcttcacaaggaggaggcaacactagaaacttaggccctgtcaaatggttatggtttattaaaaataaacacagaataatggtgatctgtttaaataatagtggttgactaaatattatcagactttttattgtaatttcaatcagttgaataatagtttagctttttttatttttgtgctcttttgcagatgagtggagctacattgttcaacctttcactgctaacatctgacatgtgggcagtcgccattcgagttttattctatcagcaagagataaacaggttgtactacctagcattcgcagttgtggccattggattaatcatctattcgttgaatgatagatcttcagatgatgaaacagctggaagtacagaagcaccggcccaatatcagcaacttccaattgaagacaattcaacaagaattggttctagttcaggtagccaagaaaggacacataaggaagaagttcatatctgttagtgggataataatgtattaatgtacgaagacacttcattgtcaatgcatggatttttaccaaatcaaatatggcatagagatatgcagagtaaaatgctggttgcttcatgtataggaaaacgtttaattggcccaagaagctaagcaagatgaggaagagaatcagaattaattttctttacaagtcagtccagcagattattcacaagagcagacccattgctgaaggctcccgcatcagtgagatctaaggaagggataatacatcgggtcaaaatgatctttgactagggattgtgaacaatcacagctggtctgcaaagcataatagcaacagtatgaacatgtaaagggagttactagtcactaaagctctttcaagaattgtctatgaaggaaaaaaaattctagatagtgtatggatagcttacatgctttactggaatgcagaattatgatttaatgatattttctatattactcattgttaaattctatgagaagtatcatgccccgtgaattggaagctaaaagggg

SEQ ID NO: 59663 - DNA, 1681 bp, Zea Mays
ccagccggtcctgcgctctcgagtcgagactccaccttccattcatttcatctgctccatctccctctctgttcgccggcgtataataagcttcccctttctgcaactgatctgatccgggctgccgtgagctctgctcgtcctgatggagttcaagagggatgtatggagcctgctcctcgtgctgctcctcgggcagctcgtcgccttctccatggccgcctcaagcttcgcctcctccctcattgctaatcttggagtcgatgccccactgacacagtctttcttagcctacctgttgctgaccttagtctatgtaccaatcgtcctgcgtcgacggcagaagctgcaaatagcttggtactggtacctagctctggccttctttgatgtacaggggaactatcttgttgtgaaggcgtaccagtactcatacattaccagtgtgactttgttggattgctggactgttgtatgggtcgtcatgctcacctggtacgcactgggcacaagatactcactctggcagttcgtgggggcagggacctgtgtggcagggctcgcccttgtgctgctttcagatgcaaaatctcaagatgagcaagatccgaaaaaaataccacttctgggggatgcccttgttattgctgggacagttggttttgcatttagcaatgttggggaggaatactgtgtcaagaaaaaggatagagttgaagttgttgcaatgcttggtctctttgggttgctgatcagcacagcgcagatacttgtatttgaaaggaagggcctagaagcagttacatggtctccaacaatgataagtctgtttgcaggatttgcagtggcaattttcgtattctacacagttgctcctttcgttcttaaggttaagatctccaacatgtcaggcatgacatgagcttcacaaggaggaggcaacactagaaacttaggccctgtcaaatggttatggtttattaaaaataaacacagaataatgatgagtggagctacattgttcaacctttcactgctaacatctgacatgtgggcagtcgccattcgagttttattctatcagcaagagataaacaggttgtactacctagcattcgcagttgtggccattggattaatcatctattcgttgaatgatagatcttcagatgatgaaacagctggaagtacagaagcaccggcccaatatcagcaacttccaattgaagacaattcaacaagaattggttctagttcaggaaaacgtttaattggcccaagaagctaagcaagatgaggaagagaatcagaattaattttctttacaagtcagtccagcagattattcacaagagcagacccattgctgaaggctcccgcatcagtgagatctaaggaagggataatacatcgggtcaaaatgatctttgactagggattgtgaacaatcacagctggtctgcaaagcataatagcaacagtatgaacatgtaaagggagttactagtcactaaagctctttcaagaattgtctatgaaggaaaaaaaattctagatagtgtatggatagcttacatgctttactggaatgcagaattatgatttaatgatattttctatattactcattgttaaattctatgagaagtatcatgccccgtgaattggaagctaaaagggg

SEQ ID NO: 59664 - DNA, 1631 bp, Zea Mays
ccagccggtcctgcgctctcgagtcgagactccaccttccattcatttcatctgctccatctccctctctgttcgccggcgtataataagcttcccctttctgcaactgatctgatccgggctgccgtgagctctgctcgtcctgatggagttcaagagggatgtatggagcctgctcctcgtgctgctcctcgggcagctcgtcgccttctccatggccgcctcaagcttcgcctcctccctcattgctaatcttggagtcgatgccccactgacacagtctttcttagcctacctgttgctgaccttagtctatgtaccaatcgtcctgcgtcgacggcagaagctgcaaatagcttggtactggtacctagctctggccttctttgatgtacaggggaactatcttgttgtgaaggcgtaccagtactcatacattaccagtgtgactttgttggattgctggactgttgtatgggtcgtcatgctcacctggtacgcactgggcacaagatactcactctggcagttcgtgggggcagggacctgtgtggcagggctcgcccttgtgctgctttcagatgcaaaatctcaagatgagcaagatccgaaaaaaataccacttctgggggatgcccttgttattgctgggacagttggttttgcatttagcaatgttggggaggaatactgtgtcaagaaaaaggatagagttgaagttgttgcaatgcttggtctctttgggttgctgatcagcacagcgcagatacttgtatttgaaaggaagggcctagaagcagttacatggtctccaacaatgataagtctgtttgcaggatttgcagtggcaattttcgtattctacacagttgctcctttcgttcttaagatgagtggagctacattgttcaacctttcactgctaacatctgacatgtgggcagtcgccattcgagttttattctatcagcaagagataaacaggttgtactacctagcattcgcagttgtggccattggattaatcatctattcgttgaatgatagatcttcagatgatgaaacagctggaagtacagaagcaccggcccaatatcagcaacttccaattgaagacaattcaacaagaattggttctagttcaggtagccaagaaaggacacataaggaagaagttcatatctgttagtgggataataatgtattaatgaaaacgtttaattggcccaagaagctaagcaagatgaggaagagaatcagaattaattttctttacaagtcagtccagcagattattcacaagagcagacccattgctgaaggctcccgcatcagtgagatctaaggaagggataatacatcgggtcaaaatgatctttgactagggattgtgaacaatcacagctggtctgcaaagcataatagcaacagtatgaacatgtaaagggagttactagtcactaaagctctttcaagaattgtctatgaaggaaaaaaaattctagatagtgtatggatagcttacatgctttactggaatgcagaattatgatttaatgatattttctatattactcattgttaaattctatgagaagtatcatgccccgtgaattggaagctaaaagggg

SEQ ID NO: 59665 - DNA, 2771 bp, Zea Mays
cggccgaggactcgaagcacaagcaccacactaccacagtcatcacggattcatggcagcacgtgagtacatggcgagggcaccccacaaccacaccggacgcggcacgctggcgggtggttggcaaaagccaaagggtaggctttcatcgcctccgcgtcgcgtcgcgtcgcgtcgctttggatgcgactgacagcacgagtctcccgagacctgagtcctgagatgagaagaaagcactaaagcagagtgggatgccgcggtgaggactgaggactgaggactggacgcgcggcgcgggtgcgcggcttcggagtccgctagactacaccacgcgggttcggcaaatggggatggcggcggacgcgacgacggccatgaccatcgacttcctccgcgcgcgcctcctctccgagcgctccgtctcccgcgccgccaaggagcgggccgaccaccttgccaagcgggttgtggagctggaggagcagctccggacggtgacggcgcagcggcgcaaggcggagcgggcggccgcggaggtgcttgccatcctcgactcccagggcttcggccgcctctccgacgccgcggacgattcaggctcagagtacgaggccgacacgggcgatcccaatgccgtcgagagggacggaggcggcgggaatgcagcggaggacgcgctgtcggggtcggagctgggagccccggcggcggcggctgctgcctctgctgctcaggccgggggcttgtcgtggaggggccgcgccgcgagccccgaatgcgagaggcggcggccgcagcaccaacagcacaagggcaggcagctaaggcagaggcacggccacggccacggccacaggaggggttacttttactgccgcgccgcggattcgtcgcccaagtaccacccagggcagtcttgccggaagatcaagaggaaggagctgagatctcagacagaagaagaggagggcaacgacaatgcagtggagagcacggaggacgggcaggagagatcagattgtactgtttgcactgatcaaccggctgatgttgatggcgaggtgaaccaagatgggcatggctcttctagtaatggaagaggggaggatcgtgatgatcttgccatggtatatgagaaggatggggagatggagagggtactcgagaagcaggctgagctaattggacagttcgaggctcaagaaaatgctcagagggagtgggaggagaaattcagcctgagccgggattcagttatggataatgttaacttattaaacaacaagctaaatcaggctgaaaatgcttgtgggaggagggaaactgctcgggttgtagataaagaagtggtttgtgaacaggcaagatcaagtgacaataatttccattgcatcaacgacccctctgaatgtctaccaaatggccctgtttcagaattgccccaaaatgtagccaaagatagtgttactgaacaccggaaatttgatgggtttggtcatgattgtgtagtgactgctgcagcagtaatttcaagccacggagaactgcaggttaggaaggatgtgctgacaactaaaagctatcctgaaggaagtggcaataatcttgggaaatcagctctaccaccacaaggaagctgtggtagcagactaaatgcaggacatagaaatggtcaaggagatgaaagttcagacagtggttcaagctaccatgtgaatgctcgatcttctgagcaatacataaacacatcatcagttgggagccagctaagtgatactcctaaaagcgaagtctcagaatggagctcctcttgctttcataaccataccgataaccagcttgatacacaacttcatcaatcatcaaacaaagatgtaggaggggtgctagaggcccttcgacgtgccaagatgtctctcagagcaaagctgagctggccaagtctagccagcaagaacatattggcacttgaagcaccggatgatttgccagtcaatggcatggaactttcactctgcaggacagcccatgtcagtcaggaaatattcgcactaccaacaccaacagactaccttaacaaggtattaccgcatgatgatgtgaaggtaccaataggtcctgctggtttgtttcgtttgccaatagattcatttcccagagatgagatgaccacaagggatggctatggttcatggttcagtttgacctcggtgagtccaccctacgtgtcgccaagctatcatgctgatcatattatgccagctctatccttgtctcagtatggttctgggttgtcactaaatccatactatgatcctcatagttccatgttgctatccatgcccactgctggtgggcgtagcgtccctgtgtcagatttcagaataggggatggttccttcctccgagaagttccacggcctgacaattattaggggatgccttctagagacaactgcacacttccagtatggtcatggtcacgggaactctcataatgttcaaatgtatcttcatgctttgtaaaaactatcaaaaagttcaattgtacctgttcatgcttggaatctcacgtctgtgatggtgttggatgccatttgctgcatcgattctgcattacgttaggtactgatgtataccatgtagtgttgcaaactaagaacatgttctgtttgtaagcagtatcggtgtttgaaatattatttcgtccgtccgatgtaagttgtgataaggtactaggatggtaataaagctaatttttttaactg

SEQ ID NO: 59666 - DNA, 2471 bp, Zea Mays
cacgagtctcccgagacctgagtcctgagatgagaagaaagcactaaagcagagtgggatgccgcggtgaggactgaggactgaggactggacgcgcggcgcgggtgcgcggcttcggagtccgctagactacaccacgcgggttcggcaaatggggatggcggcggacgcgacgacggccatgaccatcgacttcctccgcgcgcgcctcctctccgagcgctccgtctcccgcgccgccaaggagcgggccgaccaccttgccaagcggtcaatagtcaccgagcccgtcgccgcagtgcaggttgtggagctggaggagcagctccggacggtgacggcgcagcggcgcaaggcggagcgggcggccgcggaggtgcttgccatcctcgactcccagggcttcggccgcctctccgacgccgcggacgattcaggctcagagtacgaggccgacacgggcgatcccaatgccgtcgagagggacggaggcggcgggaatgcagcggaggacgcgctgtcggggtcggagctgggagccccggcggcggcggctgctgcctctgctgctcaggccgggggcttgtcgtggaggggccgcgccgcgagccccgaatgcgagaggcggcggccgcagcaccaacagcacaagggcaggcagctaaggcagaggcacggccacggccacggccacaggaggggttacttttactgccgcgccgcggattcgtcgcccaagtaccacccagggcagtcttgccggaagatcaagaggaaggagctgagatctcagacagaagaagaggagggcaacgacaatgcagtggagagcacggaggacgggcaggagagatcagattgtactgtttgcactgatcaaccggctgatgttgatggcgaggtgaaccaagatgggcatggctcttctagtaatggaagaggggaggatcgtgatgatcttgccatggtatatgagaaggatggggagatggagagggtactcgagaagcaggctgagctaattggacagttcgaggctcaagaaaatgctcagagggagtgggaggagaaattcagcctgagccgggattcagttatgaagctaaatcaggctgaaaatgcttgtgggaggagggaaactgctcgggttgtagataaagaagtggtttgtgaacaggcaagatcaagtgacaataatttccattgcatcaacgacccctctgaatgtctaccaaatggccctgtttcagaattgccccaaaatgtagccaaagatagtgttactgaacaccggaaatttgatgggtttggtcatgattgtgtagtgactgctgcagcagtaatttcaagccacggagaactgcaggttaggaaggatgtgctgacaactaaaagctatcctgaaggaagtggcaataatcttgggaaatcagctctaccaccacaaggaagctgtggtagcagactaaatgcaggacatagaaatggtcaaggagatgaaagttcagacagtggttcaagctaccatgtgaatgctcgatcttctgagcaatacataaacacatcatcagttgggagccagctaagtgatactcctaaaagcgaagtctcagaatggagctcctcttgctttcataaccataccgataaccagcttgatacacaacttcatcaatcatcaaacaaagatgtaggaggggtgctagaggcccttcgacgtgccaagatgtctctcagagcaaagctgagctggccaagtctagccagcaagaacatattggcacttgaagcaccggatgatttgccagtcaatggcatggaactttcactctgcaggacagcccatgtcagtcaggaaatattcgcactaccaacaccaacagactaccttaacaaggtattaccgcatgatgatgtgaaggtaccaataggtcctgctggtttgtttcgtttgccaatagattcatttcccagagatgagatgaccacaagggatggctatggttcatggttcagtttgacctcgttccatgttgctatccatgcccactgctggtgggcgtagcgtccctgtgtcagatttcagaataggggatggttccttcctccgagaagttccacggcctgacaattattaggggatgccttctagagacaactgcacacttccagtatggtcatggtcacgggaactctcataatgttcaaatgtatcttcatgctttgtaaaaactatcaaaaagttcaattgtacctgttcatgcttggaatctcacgtctgtgatggtgttggatgccatttgctgcatcgattctgcattacgttaggtactgatgtataccatgtagtgttgcaaactaagaacatgttctgtttgtaagcagtatcggtgtttgaaatattatttcgtccgtccgatgtaagttgtgataaggtactaggatggtaataaagctaatttttttaactg

SEQ ID NO: 59667 - DNA, 1318 bp, Zea Mays
gtgctgacgacgaatcgctcgacgtgattcctcctccaccgcagtgccgccatcctgtggaccgagcctgcgctgccatactccgaagagcagtggcagaggagtcaattgttcagcaggtagaagttgttgagcaggagctcattgaagacaagttgtgccttgaccactttttacccaataatgttctttattatcacttatcaatgcataggcttaattttgatgggacccaatatgtcaccttagactggttatccttttaccttgtttacccctgaatcatttgggtagttttggtattactctatatggttttgggtttaatactacaatatgttcatgttccaattattctgttattttatttattatccatgtcaatatcattatttttaattggaacatggagcttaacttgagaaacacgtgccaccacgagggtggaatgggacgccattggctggctaactaggaaagctagtggaggactaccttacccgataagggcaagggcaatagaggagtaggcgtgtagggaggttgccgagttgattttgctgtgatggcggtcagacggggattcctgcattcctcttcctagaaactgtagcgggttttctgaagcaattggaactaggtaaaggcctcctagtgttaccctgcctcgcttccttggtagaggtgtatgagagtcgcgatcccttggcagatgggtaacatgacttgtggatacagggtacaacctctcagagtgtaaaactgatatactagccgtgctcgctgtcatgagcagcttaggactctcgcatgattaatatatggaactaaattcaatttgtcatttgcattgcatgggattatttattaattttgttctattcttattatggtttggtatttacttacatctattaattgctaataaaattcgaccaacttattaaaggcaatgttcagctttaacccttattgttgatcacccttacacatcacatgaactctcacctttggtgagttcatgcacattattccccacgacttgttgagatatgatcttttgtgagctcactcttgcgatatataaacccccccacaggtgaagagcaggtggtcgaagaggagccgcacaacgaggagtttgacttgatctaggtggcgtctcccagtcagctttatagcgccagggaaataatatttagttcgttttatatttatcatttattttgtaagactttcgctatgtaataagtacatttatgatatttatgatatttatctctatgcatgttattatatgtgttgttcttccttggcg

SEQ ID NO: 59668 - DNA, 258 bp, Zea Mays
ccgccatcctgtggaccgagcctgcgctgccatactccggtgaagagcaggtggtcgaagaggagccgcacaacgaggagtttgacttgatctaggtggcgtctcccagtcagctttatagcgccagggaaataatatttagttcgttttatatttatcatttattttgtaagactttcgctatgtaataagtacatttatgatatttatgatatttatctctatgcatgttattatatgtgttgttcttccttggcg

SEQ ID NO: 59669 - DNA, 2111 bp, Zea Mays
cgccgatctggtgaactccggcgaggaatccactgcgaccgtggcggcgctgccagtgccggttgggggaaggggacgatggtctcgcgccgttcgattggaatcacgtggaggggattaaatttgggtgtaatctgttcagaaccctcgatcggtggatgtgtggctaggatttgatgctaggaacatttcgcagtatggaaccatagtccacgaccactatgttctgagtctaggaaatcttgcgcagaggcctctgttgttctcttattttgtgcgcacagtccaagggatagaaaatccaggaaaagtaaatagaaaatgattgttaatgtaaaaataattgttagaacttgtttaattcctagaaaattcatattaagtccaaattagcccatcctagttcatataattttgtattaatattgtctataaattagtaacactgttttaacatgaaaagtgtattaaaattgatctcttaattaatcttgtaccaaacacataaaaaccttttggaaattcataacttaaaatccataactctgaatttaatgattctttttcctatgatcttattttaatatgtagattattaatatgtattttatatatatgtttggtgtgatgttaattttttatttgcactatgtttgtttgtattgtggcgagtagaagagcagtggcagaggagtcaattgttcagcaggtagaagttgttgagcaggagctcattgaagacaagttgtgccttgaccactttttacccaataatgttctttattatcacttatcaatgcataggcttaattttgatgggacccaatatgtcaccttagactggttatccttttaccttgtttacccctgaatcatttgggtagttttggtattactctatatggttttgggtttaatactacaatatgttcatgttccaattattctgttattttatttattatccatgtcaatatcattatttttaattggaacatggagcttaacttgagaaacacgtgccaccacgagggtggaatgggacgccattggctggctaactaggaaagctagtggaggactaccttacccgataagggcaagggcaatagaggagtaggcgtgtagggaggttgccgagttgattttgctgtgatggcggtcagacggggattcctgcattcctcttcctagaaactgtagcgggttttctgaagcaattggaactaggtaaaggcctcctagtgttaccctgcctcgcttccttggtagaggtgtatgagagtcgcgatcccttggcagatgggtaacatgacttgtggatacagggtacaacctctcagagtgtaaaactgatatactagccgtgctcgctgtcatgagcagcttaggactctcgcatgattaatatatggaactaaattcaatttgtcatttgcattgcatgggattatttattaattttgttctattcttattatggtttggtatttacttacatctattaattgctaataaaattcgaccaacttattaaaggcaatgttcagctttaacccttattgttgatcacccttacacatcacatgaactctcacctttggtgagttcatgcacattattccccacgacttgttgagatatgatcttttgtgagctcactcttgcgatatataaacccccccacaggtgaagagcaggtggtcgaagaggagccgcacaacgaggagtttgacttgatctaggtggcgtctcccagtcagctttatagcgccagggaaataatatttagttcgttttatatttatcatttattttgtaagactttcgctatgtaataagtacatttatgatatttatgatatttatctctatgcatgttattatatgtgttgttcttccttggcgcacatatgagacgtacccgactttatcctttaaatatgggtgtgacacagtctagcgctgacaggcggacctgcgcgtcagctgcaccctcccgcgtcgtgtcttccttcccaatcgctaactggtgggtcccgcttgccaaacgcgttcaccgtcaccattgcatgggacccaggcatcacacgctttcttcgccaagatcg

SEQ ID NO: 59670 - DNA, 1025 bp, Zea Mays
ccacctctgcaggttgggccgcacgttccctttaggcccactcccggactggttactttgtttgctcgcaccggtaccaagccctgcagctctagggctccatttgttcgtaaggggtgcgtcccgtttggttcctttgccgaggttctgaaggcggcgacggctatggaggggaacaatggcatccgtgggcggggagctggccaaggttcgggcttggggaacggcagctttcggggtcgtggagctggccagggaccattctcgggacgcaatggaaatgggatgggtcgcggcttcgtcggtggacatgcgtcggtccctgggcatggtggagacaggtgggatcttggccgaggtcgtcaatttcacagaggaggcgagcacttcaacaacgttggacccaacaggtttccaggttctttttagaggtacacactggcttagattctgggcccagctacaaaaggatgaagctgatggagttttaataaagaatgtctgtcgtcgcctggaatcggtggccatgcaattttgtgttaattttggttggaggttttctaataggattgccttgtaatcatctcactggttttattaagtttaaagaacctttagtgtgttagtgtgtggctgtgtggaggggtatgtcccttcattgagcagtgtgatataacaatttgtgttggctctaacctcttttgaggggaaagccggaactttctctccattatcaaaaaaaaaaaatcaatacccttcattccacttgctcccaaacaagcccttagggagtataccaactacaccaacaaccacaagttttccatcaattctgtcttgctgatgaaaagacccaaacccgcatggtggaactgtattatcaccactctttggggggacaaacacgattggtgtgtctaccagaaatctcttgtatgagctttccgtaactgtcttcttcttatgcacctttgtctgatacctaaggtacatagcaaactcctcaagatcaaagtgagacgtgc

SEQ ID NO: 59671 - DNA, 2062 bp, Zea Mays
ggctaggtggggggatgatttgcgtgctgggcaacgctctctccagggggatgtagccagtttcagttcaggacaggggtacggttctgctgtcagcaaggtggagggttcatcgtcggggccaccaatggcaggtccatcggctgaagctcttgcacaagctgtcgccctgattaatcatgctcttgccaaacctgcacctgaaaccgctcctgatgtaaaaccagtgcctttggggtctcagtttctgtctgatgcaaagggtaagaatgttatgcaaggaaagggggatggggatcaaggagtagttggtgatctgtttggtaaaggcggcggaaaagagaaagcgccatattgctggaggtgtttgacgaagggccataccatgcaggtttgcaccgctgatctgtggtgtgacatttgtcaggctccctctcacaacactgaacgctgtcagaagttccggggtaccaaaccagcagctctcacggctggctatgcagtggatgggctggggttcttttatataccccatacttcttctaccaagcagcctgcagactccaggttggctagtataaaaattgatggagggtgcttatcagttcctcaagtggtggctgaattggagagacttgaatcatatgattgagtggggggtggtgcagacgaagttcaaagcttcgatgacaatagaagagaagtcggggcctaaagaggttaaggctactttaccaaaagtctggatccaattcacaggcattccaaatgacatgatggaattcttgctaatttgggcggttggatctattttgggggtaacaaaaactgttgatatgaagtttaccaaccaatatggtatttgtcgtcttcaagtgatggtgttggaccctttgctgatcccgcagttcattgaggtggtgattggtgaatgtttatttgagctgcaatttcgggttgaagaaaacatggatggtgacagcccagttccagtggatatggatgactttagctgtggggaagacgaaaataagtcggatcaattagaggatgtggttcgtgggggtaattctctgccccctaataatagtgctccagatagtggcaaatctgtttcaaagggtgctggtaatgatggtaatactggtaaaaagggagcggcgcatgatgttattagctcggtagtccagtatgctgatttgggtttgggtatgcaaggtgttgatcatgctggtaatcccactcaagctgttgtgccagcaacctcgtcgtgtatggctgtttcggtgccgtgtactccggatgtggcagctatggctgctgttccagaagcaactatggggctaaccgagtcaggcaggagcaaaagaagaaacaggagcgggaatggggacagcatgcaaagagcttcaaagttgaaggctgctcgcaatttagatgcggtcctctctacaggttctttttagaggtacacactggcttagattctgggcccagctacaaaaggatgaagctgatggagttttaataaagaatgtctgtcgtcgcctggaatcggtggccatgcaattttgtgttaattttggttggaggttttctaataggattgccttgtaatcatctcactggttttattaagtttaaagaacctttagtgtgttagtgtgtggctgtgtggaggggtatgtcccttcattgagcagtgtgatataacaatttgtgttggctctaacctcttttgaggggaaagccggaactttctctccattatcaaaaaaaaaaaatcaatacccttcattccacttgctcccaaacaagcccttagggagtataccaactacaccaacaaccacaagttttccatcaattctgtcttgctgatgaaaagacccaaacccgcatggtggaactgtattatcaccactctttggggggacaaacacgattggtgtgtctaccagaaatctcttgtatgagctttccgtaactgtcttcttcttatgcacctttgtctgatacctaaggtacatagcaaactcctcaagatcaaagtgagacgtgc

SEQ ID NO: 59672 - DNA, 754 bp, Zea Mays
gtcaaaagtatccttcaggccaggtaatggagaacaaataagattctgggaggatgtgtggttgggagaccaaccactcatgaggcaatatccttcactatatcatattgtgagacagaaaagtgatacagttgcgtctatcttgaggttctttttagaggtacacactggcttagattctgggcccagctacaaaaggatgaagctgatggagttttaataaagaatgtctgtcgtcgcctggaatcggtggccatgcaattttgtgttaattttggttggaggttttctaataggattgccttgtaatcatctcactggttttattaagtttaaagaacctttagtgtgttagtgtgtggctgtgtggaggggtatgtcccttcattgagcagtgtgatataacaatttgtgttggctctaacctcttttgaggggaaagccggaactttctctccattatcaaaaaaaaaaaatcaatacccttcattccacttgctcccaaacaagcccttagggagtataccaactacaccaacaaccacaagttttccatcaattctgtcttgctgatgaaaagacccaaacccgcatggtggaactgtattatcaccactctttggggggacaaacacgattggtgtgtctaccagaaatctcttgtatgagctttccgtaactgtcttcttcttatgcacctttgtctgatacctaaggtacatagcaaactcctcaagatcaaagtgagacgtgc

SEQ ID NO: 59673 - DNA, 1201 bp, Zea Mays
gtttatattcaaatatatggaaataaatctaaacacatatattaaacaatatttaatttgaaacggacgaaatattatttataatacaaaatagtattttggagaactatatacaccatctgacaccatatctccgagcagatagtctgacttactgcactggcttgcagtatagctgcatccaccgtcccttccgcgccccccggagacaggctaaaaagtgatgtgttgtgcacagtctaaagtccattttgttgctttgcccgcaacttttgcttgccacgatggaggccagatccagctcctgcctcttgggcgtccgtcatccttccatctcccgccctccctcgtcggagcacgagcaccaaaggtgcccagatcttcgtcggccctgcccctgcttccttcaactccaccaccaggcgatgccctagacttaattgaatgggctctcttctcaccaggactggcgtcctgccatggctccacgccaagattgttgatcccatgctgcaggtcatcagaaggggagcagaacccaagcaactagccttctctgctgcccttggtatcacgattgggatctttccgcttgatcgtccctttcttgcgtttgggggaaaccatcactggcagtgggcacttccccttgacagccaacgcactgaagaatgttctcactggtcatgcatcaaaggatgtgctgctgagcatcgtcaatgcgatgctgggttggcttattgctgcaccatttgtacttgccgtgctgtacgctgtttcgttcccttgtttcaaggtcctggttaacaggtttggcggcattccatcgagccccaggaccccactcaaggcggtgtaggtagtgtgtagcatgctgaatgctcctgaaattgtgtacaccaaattctttgtgatgccgttgggttgagatgggttccggcgtcatgttgctcggccatcccaggcactggcgaataaatccgacttgagaggcacgtgtcctctataattctgtatgctggcttggtaatcatatagtgagatgtgtatttatgaatttacaaactcttcatgaataaagccatgtttggataaaggattaaattttagtctctattctatcggatgttttggatatagttaaaagtattagatagagcctaattataaaactaattacacatattattagtatccatcg

SEQ ID NO: 59674 - DNA, 1315 bp, Zea Mays
gtttatattcaaatatatggaaataaatctaaacacatatattaaacaatatttaatttgaaacggacgaaatattatttataatacaaaatagtattttggagaactatatacaccatctgacaccatatctccgagcagatagtctgacttactgcactggcttgcagtatagctgcatccaccgtcccttccgcgccccccggagacaggctaaaaagtgatgtgttgtgcacagtctaaagtccattttgttgctttgcccgcaacttttgcttgccacgatggaggccagatccagctcctgcctcttgggcgtccgtcatccttccatctcccgccctccctcgtcggagcacgagcaccaaaggtgcccagatcttcgtcggccctgcccctgcttccttcaactccaccaccaggcgatgccctagacttaattgaatgggctctcttctcaccaggactggcgtcctgccatggctccacgccaagattgttgatcccatgctgcaggtcatcagaaggggagcagaacccaagcaactagccttctctgctgcccttggtatcacgattgggatctttccggtatgtggggacaactgttattcttggtgctgttgctgtagcagtgttgggaagtcgttgcaatgctgttactgttatggttttaaatttggccgccactccaattgagctaagcttgatcgtccctttcttgcgtttgggggaaaccatcactggcagtgggcacttccccttgacagccaacgcactgaagaatgttctcactggtcatgcatcaaaggatgtgctgctgagcatcgtcaatgcgatgctgggttggcttattgctgcaccatttgtacttgccgtgctgtacgctgtttcgttcccttgtttcaaggtcctggttaacaggtttggcggcattccatcgagccccaggaccccactcaaggcggtgtaggtagtgtgtagcatgctgaatgctcctgaaattgtgtacaccaaattctttgtgatgccgttgggttgagatgggttccggcgtcatgttgctcggccatcccaggcactggcgaataaatccgacttgagaggcacgtgtcctctataattctgtatgctggcttggtaatcatatagtgagatgtgtatttatgaatttacaaactcttcatgaataaagccatgtttggataaaggattaaattttagtctctattctatcggatgttttggatatagttaaaagtattagatagagcctaattataaaactaattacacatattattagtatccatcg

SEQ ID NO: 59675 - DNA, 1314 bp, Zea Mays
gtttatattcaaatatatggaaataaatctaaacacatatattaaacaatatttaatttgaaacggacgaaatattatttataatacaaaatagtattttggagaactatatacaccatctgacaccatatctccgagcagatagtctgacttactgcactggcttgcagtatagctgcatccaccgtcccttccgcgccccccggagacaggctaaaaagtgatgtgttgtgcacagtctaaagtccattttgttgctttgcccgcaacttttgcttgccacgatggaggccagatccagctcctgcctcttgggcgtccgtcatccttccatctcccgccctccctcgtcggagcacgagcaccaaaggtgcccagatcttcgtcggccctgcccctgcttccttcaactccaccaccaggcgatgccctagacttaattgaatgggctctcttctcaccaggactggcgtcctgccatggctccacgccaagattgttgatcccatgctgcaggtcatcagaaggggagcagaacccaagcaactagccttctctgctgcccttggtatcacgattgggatctttccggtatgtgggacaactgttattcttggtgctgttgctgtagcagtgttgggaagtcgttgcaatgctgttactgttatggttttaaatttggccgccactccaattgagctaagcttgatcgtccctttcttgcgtttgggggaaaccatcactggcagtgggcacttccccttgacagccaacgcactgaagaatgttctcactggtcatgcatcaaaggatgtgctgctgagcatcgtcaatgcgatgctgggttggcttattgctgcaccatttgtacttgccgtgctgtacgctgtttcgttcccttgtttcaaggtcctggttaacaggtttggcggcattccatcgagccccaggaccccactcaaggcggtgtaggtagtgtgtagcatgctgaatgctcctgaaattgtgtacaccaaattctttgtgatgccgttgggttgagatgggttccggcgtcatgttgctcggccatcccaggcactggcgaataaatccgacttgagaggcacgtgtcctctataattctgtatgctggcttggtaatcatatagtgagatgtgtatttatgaatttacaaactcttcatgaataaagccatgtttggataaaggattaaattttagtctctattctatcggatgttttggatatagttaaaagtattagatagagcctaattataaaactaattacacatattattagtatccatcg

SEQ ID NO: 59676 - DNA, 1306 bp, Zea Mays
gtttatattcaaatatatggaaataaatctaaacacatatattaaacaatatttaatttgaaacggacgaaatattatttataatacaaaatagtattttggagaactatatacaccatctgacaccatatctccgagcagatagtctgacttactgcactggcttgcagtatagctgcatccaccgtcccttccgcgccccccggagacaggctaaaaagtgatgtgttgtgcacagtctaaagtccattttgttgctttgcccgcaacttttgcttgccacgatggaggccagatccagctcctgcctcttgggcgtccgtcatccttccatctcccgccctccctcgtcggagcacgagcaccaaagatcttcgtcggccctgcccctgcttccttcaactccaccaccaggcgatgccctagacttaattgaatgggctctcttctcaccaggactggcgtcctgccatggctccacgccaagattgttgatcccatgctgcaggtcatcagaaggggagcagaacccaagcaactagccttctctgctgcccttggtatcacgattgggatctttccggtatgtgggacaactgttattcttggtgctgttgctgtagcagtgttgggaagtcgttgcaatgctgttactgttatggttttaaatttggccgccactccaattgagctaagcttgatcgtccctttcttgcgtttgggggaaaccatcactggcagtgggcacttccccttgacagccaacgcactgaagaatgttctcactggtcatgcatcaaaggatgtgctgctgagcatcgtcaatgcgatgctgggttggcttattgctgcaccatttgtacttgccgtgctgtacgctgtttcgttcccttgtttcaaggtcctggttaacaggtttggcggcattccatcgagccccaggaccccactcaaggcggtgtaggtagtgtgtagcatgctgaatgctcctgaaattgtgtacaccaaattctttgtgatgccgttgggttgagatgggttccggcgtcatgttgctcggccatcccaggcactggcgaataaatccgacttgagaggcacgtgtcctctataattctgtatgctggcttggtaatcatatagtgagatgtgtatttatgaatttacaaactcttcatgaataaagccatgtttggataaaggattaaattttagtctctattctatcggatgttttggatatagttaaaagtattagatagagcctaattataaaactaattacacatattattagtatccatcg

SEQ ID NO: 59677 - DNA, 1213 bp, Zea Mays
gtttatattcaaatatatggaaataaatctaaacacatatattaaacaatatttaatttgaaacggacgaaatattatttataatacaaaatagtattttggagaactatatacaccatctgacaccatatctccgagcagatagtctgacttactgcactggcttgcagtatagctgcatccaccgtcccttccgcgccccccggagacaggctaaaaagtgatgtgttgtgcacagtctaaagtccattttgttgctttgcccgcaacttttgcttgccacgatggaggccagatccagctcctgcctcttgggcgtccgtcatccttccatctcccgccctccctcgtcggagcacgagcaccaaaggactggcgtcctgccatggctccacgccaagattgttgatcccatgctgcaggtcatcagaaggggagcagaacccaagcaactagccttctctgctgcccttggtatcacgattgggatctttccgggacaactgttattcttggtgctgttgctgtagcagtgttgggaagtcgttgcaatgctgttactgttatggttttaaatttggccgccactccaattgagctaagcttgatcgtccctttcttgcgtttgggggaaaccatcactggcagtgggcacttccccttgacagccaacgcactgaagaatgttctcactggtcatgcatcaaaggatgtgctgctgagcatcgtcaatgcgatgctgggttggcttattgctgcaccatttgtacttgccgtgctgtacgctgtttcgttcccttgtttcaaggtcctggttaacaggtttggcggcattccatcgagccccaggaccccactcaaggcggtgtaggtagtgtgtagcatgctgaatgctcctgaaattgtgtacaccaaattctttgtgatgccgttgggttgagatgggttccggcgtcatgttgctcggccatcccaggcactggcgaataaatccgacttgagaggcacgtgtcctctataattctgtatgctggcttggtaatcatatagtgagatgtgtatttatgaatttacaaactcttcatgaataaagccatgtttggataaaggattaaattttagtctctattctatcggatgttttggatatagttaaaagtattagatagagcctaattataaaactaattacacatattattagtatccatcg

SEQ ID NO: 59678 - DNA, 1220 bp, Zea Mays
gtttatattcaaatatatggaaataaatctaaacacatatattaaacaatatttaatttgaaacggacgaaatattatttataatacaaaatagtattttggagaactatatacaccatctgacaccatatctccgagcagatagtctgacttactgcactggcttgcagtatagctgcatccaccgtcccttccgcgccccccggagacaggctaaaaagtgatgtgttgtgcacagtctaaagtccattttgttgctttgcccgcaacttttgcttgccacgatggaggccagatccagctcctgcctcttgggcgtccgtcatccttccatctcccgccctccctcgtcggagcacgagcaccaaaggactggcgtcctgccatggctccacgccaagattgttgatcccatgctgcaggtcatcagaaggggagcagaacccaagcaactagccttctctgctgcccttggtatcacgattgggatctttccggtatgtgggacaactgttattcttggtgctgttgctgtagcagtgttgggaagtcgttgcaatgctgttactgttatggttttaaatttggccgccactccaattgagctaagcttgatcgtccctttcttgcgtttgggggaaaccatcactggcagtgggcacttccccttgacagccaacgcactgaagaatgttctcactggtcatgcatcaaaggatgtgctgctgagcatcgtcaatgcgatgctgggttggcttattgctgcaccatttgtacttgccgtgctgtacgctgtttcgttcccttgtttcaaggtcctggttaacaggtttggcggcattccatcgagccccaggaccccactcaaggcggtgtaggtagtgtgtagcatgctgaatgctcctgaaattgtgtacaccaaattctttgtgatgccgttgggttgagatgggttccggcgtcatgttgctcggccatcccaggcactggcgaataaatccgacttgagaggcacgtgtcctctataattctgtatgctggcttggtaatcatatagtgagatgtgtatttatgaatttacaaactcttcatgaataaagccatgtttggataaaggattaaattttagtctctattctatcggatgttttggatatagttaaaagtattagatagagcctaattataaaactaattacacatattattagtatccatcg

SEQ ID NO: 59679 - DNA, 1399 bp, Zea Mays
gtttatattcaaatatatggaaataaatctaaacacatatattaaacaatatttaatttgaaacggacgaaatattatttataatacaaaatagtattttggagaactatatacaccatctgacaccatatctccgagcagatagtctgacttactgcactggcttgcagtatagctgcatccaccgtcccttccgcgccccccggagacaggctaaaaagtgatgtgttgtgcacagtctaaagtccattttgttgctttgcccgcaacttttgcttgccacgatggaggccagatccagctcctgcctcttgggcgtccgtcatccttccatctcccgccctccctcgtcggagcacgagcaccaaaggtccccgtactgcccttacctctgctctccttttcttctcctgttcacccctcgtgccataactgggcgaccgccgctcccgccctacgccaggtgcccagatcttcgtcggccctgcccctgcttccttcaactccaccaccaggcgatgccctagacttaattgaatgggctctcttctcaccaggactggcgtcctgccatggctccacgccaagattgttgatcccatgctgcaggtcatcagaagaacccaagcaactagccttctctgctgcccttggtatcacgattgggatctttccggtatgtgggacaactgttattcttggtgctgttgctgtagcagtgttgggaagtcgttgcaatgctgttactgttatggttttaaatttggccgccactccaattgagctaagcttgatcgtccctttcttgcgtttgggggaaaccatcactggcagtgggcacttccccttgacagccaacgcactgaagaatgttctcactggtcatgcatcaaaggatgtgctgctgagcatcgtcaatgcgatgctgggttggcttattgctgcaccatttgtacttgccgtgctgtacgctgtttcgttcccttgtttcaaggtcctggttaacaggtttggcggcattccatcgagccccaggaccccactcaaggcggtgtaggtagtgtgtagcatgctgaatgctcctgaaattgtgtacaccaaattctttgtgatgccgttgggttgagatgggttccggcgtcatgttgctcggccatcccaggcactggcgaataaatccgacttgagaggcacgtgtcctctataattctgtatgctggcttggtaatcatatagtgagatgtgtatttatgaatttacaaactcttcatgaataaagccatgtttggataaaggattaaattttagtctctattctatcggatgttttggatatagttaaaagtattagatagagcctaattataaaactaattacacatattattagtatccatcg

SEQ ID NO: 59680 - DNA, 2904 bp, Zea Mays
ctatgcacgaggcatgcaaattaacaagactcatacaagcacggaacagtgtgctgatggggcacaagagaaacacatgctcaggtcttaacatgtttggctttcgagcaaactttctccagaccccaaagaaatataatatccgatcagatgtgtcgatgctcatctcaacatactcccgtggcaacgcaccgacacacaactagtaaagaacacaagcctcgtgcgcttcggctttcttaccccctcggcttcctcgctcgctggttcgctccgggtctccgtctccctccacggtcagctcctcgtgtgatctcgtcgcgtggttagcagggaaacccagaggtggaaagaagctaacccggtgaagactctgaaggaatctgagccacctgcactccgatctgccatctgaaggacgcggaggaagccccgaatcggggaatttcgtccttccggcacgcccgccctgacgtgagttctctctcccccaagagctgtgatccgatttcgtgggttcatttgcctgatgcgtccattcccgcggtagagatcttgtgtccatctatttcgattttcgtagcccatcgatttgttccttaaaaggcctctcctttttatccaccactaccacccttgatgaatccgggggaaaaaagggtgggtggggatccttttgatcttttgacaacggaggtcggatcctaggataggaagtaggaatggggttttgccgtacggagacgacgtttctttcttgaaatgttgcaacatgccaccagaatgggttggtgtcgtggcgtgtgatgcgctgatacgacttgtccggaattaaaatgttctcgccgtcgcagctgcactccacgaatcctgttgtggtatatcagttttttttagtctatctatctaccactcactctcgagtgttttgagctcttctcatactcgattttcccccccttcaaatcttcatccctttcctcctcccgacgcgccgccgccccgtagggtctcccgttcctatcgtctgccttgcctacctcccgcaatttcttctaaggccgcgggagatggtgaagaagagaagggaagaatcgggtgttggaagactggagtgagacgtaggctttctgttttttttcttctttttactctcagagtcaccgtctcgtgtgttcaatcgtgatgagctgtacttacttggaattgatctcttaactatatcatatgtcgctatgtctcctctgctatttcacacgctttcacagctactagcatccttctcttggcgcaggtgcaaatcggcgattgcttttttttgtgtgtgtgtaggcacactgttctatcagtgagaaatttgccattatagaagtcctcagacgcggcttcgacgatttggaggcgtagacgagggattcgctgttataaaaaactagggactacccacactccaaaatgaacatgaccacgccattacaaggtaacgtctatgattaaaccattgatactcacgtcgtctctacatccgctatccttctccttctctctattctcgctaccaggcacgcaccctagcagccaccgtcgtcttgctccgtcctccgctcgccaggtctcgacgcgcgcgcagactctgcctcggcgtgccgctgccgtgccccgtctaagagctgccgctccggacgccacggacgcggcggcggccctcatggtcgcgcgcgccgaggccggggacttcgcggaggcctggtccctctgggcgcagctcctgcacagctccgccgcgccgtgcctgcccgccgtggcgccgcgccttctgccggcgtacgcgcgcctgggccgcttcgacgagatcctcctcgcagtgcgcgagctctcggcgcgggaccgcggcgcggcacgcacgctctacccgctcgccgtctcctgcctcggcgccgcgggcgagctggcgcgcatggaggacgccgtcctagaaatgggccgccttggcctccgcgtcgactccgcgaccggggacgccttcgtccgggcctacgcggccgccggaaccatcccgcagatggaggcggcctaccgccggcacaggaagtccgggctgctcatcacccgtggcgccatccgcgccgtcgcgtccgcgtacatctcccgacagaagtactacaggctcggcgcgttcgcggcggacgccggcctccgccggcgcgacgtcggcaacctgctctggaacctctacctcctctcctccgcggccaacttcaagatgaagtccctgcagcgcgcgttcctggagatggtggccgccgggtttcggccggacctcaccaccttcaacatccgcgccgcggccttctccaagatgtgcatgttctgggacctccacctcagcgccgaccacatgcaccgcgacggcgtcgcgccggacctcgtcactcacggctgcttcgtcgacgcctacctcgagcgccgcctcgcgcggaacctcacgttcgcgttcgaccgcctcgacggcgacgccaagcccgtcgtggctacggaccccatcgtgttcgaggcgttcggcaagggcggcttccacgccagctccgaggtgctgctggagaccgccggcgggaaggggcgctggacgtactacaagctgctcggcgtctacctcaggaagcagcataggagaaaccaagttttctggaactactgatgctaatcagttcagcgactagggtagtgcttacattgtaatttttagtgattaaaatgtgcttgccattgccagcaactccatatatctaggagcttgcaacagacataccaagactggaagatgatttatactcgcatcaatagttctgtgcactgattctgaaatggtggtggctaggcccatgaggccgaactcgttgtcca

SEQ ID NO: 59681 - DNA, 2002 bp, Zea Mays
ctatgcacgaggcatgcaaattaacaagactcatacaagcacggaacagtgtgctgatggggcacaagagaaacacatgctcaggtcttaacatgtttggctttcgagcaaactttctccagaccccaaagaaatataatatccgatcagatgtgtcgatgctcatctcaacatactcccgtggcaacgcaccgacacacaactagtaaagaacacaagcctcgtgcgcttcggctttcttaccccctcggcttcctcgctcgctggttcgctccgggtctccgtctccctccacggtcagctcctcgtgtgatctcgtcgcgtggttagcagggaaacccagaggtggaaagaagctaacccggtgaagactctgaaggaatctgagccacctgcactccgatctgccatctgaaggacgcggaggaagccccgaatcggggaatttcgtccttccggcacgcccgccctgacgtgcaaatcggcgattgcttttttttgtgtgtgtgtaggcacactgttctatcagtgagaaatttgccattatagaagtcctcagacgcggcttcgacgatttggaggcgtagacgagggattcgctgttataaaaaactagggactacccacactccaaaatgaacatgaccacgccattacaaggcacgcaccctagcagccaccgtcgtcttgctccgtcctccgctcgccaggtctcgacgcgcgcgcagactctgcctcggcgtgccgctgccgtgccccgtctaagagctgccgctccggacgccacggacgcggcggcggccctcatggtcgcgcgcgccgaggccggggacttcgcggaggcctggtccctctgggcgcagctcctgcacagctccgccgcgccgtgcctgcccgccgtggcgccgcgccttctgccggcgtacgcgcgcctgggccgcttcgacgagatcctcctcgcagtgcgcgagctctcggcgcgggaccgcggcgcggcacgcacgctctacccgctcgccgtctcctgcctcggcgccgcgggcgagctggcgcgcatggaggacgccgtcctagaaatgggccgccttggcctccgcgtcgactccgcgaccggggacgccttcgtccgggcctacgcggccgccggaaccatcccgcagatggaggcggcctaccgccggcacaggaagtccgggctgctcatcacccgtggcgccatccgcgccgtcgcgtccgcgtacatctcccgacagaagtactacaggctcggcgcgttcgcggcggacgccggcctccgccggcgcgacgtcggcaacctgctctggaacctctacctcctctcctccgcggccaacttcaagatgaagtccctgcagcgcgcgttcctggagatggtggccgccgggtttcggccggacctcaccaccttcaacatccgcgccgcggccttctccaagatgtgcatgttctgggacctccacctcagcgccgaccacatgcaccgcgacggcgtcgcgccggacctcgtcactcacggctgcttcgtcgacgcctacctcgagcgccgcctcgcgcggaacctcacgttcgcgttcgaccgcctcgacggcgacgccaagcccgtcgtggctacggaccccatcgtgttcgaggcgttcggcaagggcggcttccacgccagctccgaggtgctgctggagaccgccggcgggaaggggcgctggacgtactacaagctgctcggcgtctacctcaggaagcagcataggagaaaccaagttttctggaactactgatgctaatcagttcagcgactagggtagtgcttacattgtaatttttagtgattaaaatgtgcttgccattgccagcaactccatatatctaggagcttgcaacagacataccaagactggaagatgatttatactcgcatcaatagttctgtgcactgattctgaaatggtggtggctaggcccatgaggccgaactcgttgtcca

SEQ ID NO: 59682 - DNA, 1842 bp, Zea Mays
ctatgcacgaggcatgcaaattaacaagactcatacaagcacggaacagtgtgctgatggggcacaagagaaacacatgctcaggtcttaacatgtttggctttcgagcaaactttctccagaccccaaagaaatataatatccgatcagatgtgtcgatgctcatctcaacatactcccgtggcaacgcaccgacacacaactagtaaagaacacaagcctcgtgcgcttcggctttcttaccccctcggcttcctcgctcgctggttcgctccgggtctccgtctccctccacggtcagctcctcgtgtgatctcgtcgcgtggttagcagggaaacccagaggtggaaagaagctaacccggtgaagactctgaaggaatctgagccacctgcactccgatctgccatctgaaggacgcggaggaagccccgaatcggggaatttcgtccttccggcacgcccgccctgaccctgggcctcgagacgggatgattcagtgtttcataaagcgcgataaatccaagtccacgtatcgtctctacttgtgcctgagtactgctgtgctcatggagaacggcaagttcctcttatcagctaaaaggagccgcagaacaacctgcacgcagtatatcatctcgatggacgccgacaacatatcgagatctagcagcacgtacatcggaaagctgaggtcaaacttcctgggcacgaagttcgtggtctcagacacgcagccgcccccatacagatacagcggggctgcaccccctccccctcgtgctgctgggcggcgggcaagccggcgattcgactccaggaaggtctccccgaaggtgccggccccgggcggtgccggtggtggcagctacagcatagcccaggtgacgtacgagctgaacgtgctgggcacgagaggccccaggcggatgcactgcgtcatgcgctccataccggcgtccgcggtggagccgggcggcacggtccccggacagcccgagcggatcctgccccgggcgctgctggaggaggagcaggaggaggaggaggaggattcgtcgttccgccgcaccggcaccggcaccggcaccacctccttctccaagtcgtcagcatccatcatggaccggtccgtggacttcggcggcggcagcagcagcagcttccgcgacttcagcagcgcccggttctccgacattgtcgacggaggcggtggagatggggggcaggatagggagaggccgctcgtgctccgcaacaaggccccgagatggcacgagcagctgcagtgctggtgcctcaacttccgcggccgcgtgaccatcgcctcggtgaagaacttccagctgatcgcggcggcgccaagcctgcaggctcaggcccccgctgctggggctggggctggggctcctccagccccgtcgtcacagccggctccgcaggaccaggacaaggtcatcctccagttcggtaaggtggccaaggacatgttcaccatggactaccgatacccgctctcggccttccaggctttcgccatctgcttgagtagcttcgacaccaaattggcctgcgagtaaaggagggatagaagcagtggaaccggagccttttttttttttttgcattttgttcgtgcatggttgtattctgcttcctgtctgttaacctggaaccgggaccctctttgcattttgttcatgggttcgatgggaatgtgactctttgtttgcgagtttcgcatgggtacttgcgttatctattgtgtaaatgtaccgagcatgtctctcgcatgtgaagctctcggtggctgttgtctgatgggagaatcaattgctaag

SEQ ID NO: 59683 - DNA, 592 bp, Zea Mays
ctatgcacgaggcatgcaaattaacaagactcatacaagcacggaacagtgtgctgatggggcacaagagaaacacatgctcaggtcttaacatgtttggctttcgagcaaactttctccagaccccaaagaaatataatatccgatcagatgtgtcgatgctcatctcaacatactcccgtggcaacgcaccgacacacaactagtaaagaacacaagcctcgtgcgcttcggctttcttaccccctcggcttcctcgctcgctggttcgctccgggtctccgtctccctccacggtcagctcctcgtgtgatctcgtcgcgtggttagcagggaaacccagaggtggaaagaagctaacccggtgaagactctgaaggaatctgagccacctgcactccgatctgccatctgaaggacgcggaggaagccccgaatcggggaatttcgtccttccggcacgcccgccctgacgtctccaacactttgtgcgcggaggcggagaggaagggtgcacgttcgtacgtgtagcggcaaggtggagaaagaaagggtggatggaatggaatggacccattattatgagtgtggc

SEQ ID NO: 59684 - DNA, 1081 bp, Zea Mays
ctatgcacgaggcatgcaaattaacaagactcatacaagcacggaacagtgtgctgatggggcacaagagaaacacatgctcaggtcttaacatgtttggctttcgagcaaactttctccagaccccaaagaaatataatatccgatcagatgtgtcgatgctcatctcaacatactcccgtggcaacgcaccgacacacaactagtaaagaacacaagcctcgtgcgcttcggctttcttaccccctcggcttcctcgctcgctggttcgctccgggtctccgtctccctccacggtcagctcctcgtgtgatctcgtcgcgtggttagcagggaaacccagaggtggaaagaagctaacccggtgaagactctgaaggaatctgagccacctgcactccgatctgccatctgaaggacgcggaggaagccccgaatcggggaatttcgtccttccggcacgcccgccctgaccctgggcctcgagacgggatgattcagtgtttcataaagcgcgataaatccaagtccacgtatcgtctctacttgtgcctgagtactgctgtgctcatggagaacggcaagttcctcttatcagctaaaaggagccgcagaacaacctgcacgcagtatatcatctcgatggacgccgacaacatatcgagatctagcagcacgtacatcggaaagctgaggtgcgccctgaattggcttcaacactagcagatcggccctgcagtggcctcatcactagctagatgcctaccactggtaccatacaggcttggtgctcgatatgatgacaccgtttctcctcggcgagggtatctgctgtggtatcggatcaccgcctctgggttttcagatctctcggggtttttttaaggccatgtctgtttgatcttaaaatcataaagattgagagggattgaagaggattttgacttgtcagggatataatctccctcaattcctatgaattagcaactgagtggggagtgaggacgcgtgcgtgcggtgcagccgtgcagctcggcgaccatcacttccccctcctgtagctcgccactgactgctgatt

SEQ ID NO: 59685 - DNA, 1340 bp, Zea Mays
ctatgcacgaggcatgcaaattaacaagactcatacaagcacggaacagtgtgctgatggggcacaagagaaacacatgctcaggtcttaacatgtttggctttcgagcaaactttctccagaccccaaagaaatataatatccgatcagatgtgtcgatgctcatctcaacatactcccgtggcaacgcaccgacacacaactagtaaagaacacaagcctcgtgcgcttcggctttcttaccccctcggcttcctcgctcgctggttcgctccgggtctccgtctccctccacggtcagctcctcgtgtgatctcgtcgcgtggttagcagggaaacccagaggtggaaagaagctaacccggtgaagactctgaaggaatctgagccacctgcactccgatctgccatctgaaggacgcggaggaagccccgaatcggggaatttcgtccttccggcacgcccgccctgacgctgaagccccaagtttcctgcgcctgttctagctagttggcgaagaaagatgtcgttccgcagcatcgtccgcgacgtccgagacagcatcggcagcctgtcgaggcgcaacttcgaggtgactgctgcagccgccgccggcggcctctccggacgcaccgccgcgcaacatcgcagggggaggtctcagagcacggtgcacgagctccgggacacgcgtgtcgtggtccagcaggacgagagccgctgggccagcctccctcccgagctcctccgcgacgtggtccggaggctggaggccagcgagagcgcctggccgaaccgcaagcacgtcgtgtcctgcgccgccgtctgccgcgcgtggagggagatgtgccgggagatcgtgctcagcccggaggtctgcgggaagcttaccttcccggtctctctcaagcagcctgggcctcgagacgggatgattcagtgtttcataaagcgcgataaatccaagtccacgtatcgtctctacttgtgcctgagtactgctgtgctcatggagaacggcaagttcctcttatcagctaaaaggagccgcagaacaacctgcacgcagtatatcatctcgatggacgccgacaacatatcgagatctagcagcacgtacatcggaaagctgagacgattccctgcccgccggaaacatgctcgtgcatgctgtttgctgtgcctgtggcgcgacgcggtggtcgctggtcggtggaatcccactccactatcactagccgccactggcaagtgcgatgcgacggaaccaaggattggattctcctccggcgttgcggcgaatgatggccgatgctgtgattgaaccacggaacgtggg

SEQ ID NO: 59686 - DNA, 865 bp, Zea Mays
ctatgcacgaggcatgcaaattaacaagactcatacaagcacggaacagtgtgctgatggggcacaagagaaacacatgctcaggtcttaacatgtttggctttcgagcaaactttctccagaccccaaagaaatataatatccgatcagatgtgtcgatgctcatctcaacatactcccgtggcaacgcaccgacacacaactagtaaagaacacaagcctcgtgcgcttcggctttcttaccccctcggcttcctcgctcgctggttcgctccgggtctccgtctccctccacggtcagctcctcgtgtgatctcgtcgcgtggttagcagggaaacccagaggtggaaagaagctaacccggtgaagactctgaaggaatctgagccacctgcactccgatctgccatctgaaggacgcggaggaagccccgaatcggggaatttcgtccttccggcacgcccgccctgacgtgcaaatcggcgattgcttttttttgtgtgtgtgtaggcacactgttctatcagtgagaaatttgccattatagaagtcctcagacgcggcttcgacgatttggaggcgtagacgagggattcgctgttataaaaaactagggactacccacactccaaaatgaacatgaccacgccattacaagacgattccctgcccgccggaaacatgctcgtgcatgctgtttgctgtgcctgtggcgcgacgcggtggtcgctggtcggtggaatcccactccactatcactagccgccactggcaagtgcgatgcgacggaaccaaggattggattctcctccggcgttgcggcgaatgatggccgatgctgtgattgaaccacggaacgtggg

SEQ ID NO: 59687 - DNA, 900 bp, Zea Mays
ctatgcacgaggcatgcaaattaacaagactcatacaagcacggaacagtgtgctgatggggcacaagagaaacacatgctcaggtcttaacatgtttggctttcgagcaaactttctccagaccccaaagaaatataatatccgatcagatgtgtcgatgctcatctcaacatactcccgtggcaacgcaccgacacacaactagtaaagaacacaagcctcgtgcgcttcggctttcttaccccctcggcttcctcgctcgctggttcgctccgggtctccgtctccctccacggtcagctcctcgtgtgatctcgtcgcgtggttagcagggaaacccagaggtggaaagaagctaacccggtgaagactctgaaggaatctgagccacctgcactccgatctgccatctgaaggacgcggaggaagccccgaatcggggaatttcgtccttccggcacgcccgccctgaccctgggcctcgagacgggatgattcagtgtttcataaagcgcgataaatccaagtccacgtatcgtctctacttgtgcctgagtactgctgtgctcatggagaacggcaagttcctcttatcagctaaaaggagccgcagaacaacctgcacgcagtatatcatctcgatggacgccgacaacatatcgagatctagcagcacgtacatcggaaagctgagacgattccctgcccgccggaaacatgctcgtgcatgctgtttgctgtgcctgtggcgcgacgcggtggtcgctggtcggtggaatcccactccactatcactagccgccactggcaagtgcgatgcgacggaaccaaggattggattctcctccggcgttgcggcgaatgatggccgatgctgtgattgaaccacggaacgtggg

SEQ ID NO: 59688 - DNA, 1399 bp, Zea Mays
ctatgcacgaggcatgcaaattaacaagactcatacaagcacggaacagtgtgctgatggggcacaagagaaacacatgctcaggtcttaacatgtttggctttcgagcaaactttctccagaccccaaagaaatataatatccgatcagatgtgtcgatgctcatctcaacatactcccgtggcaacgcaccgacacacaactagtaaagaacacaagcctcgtgcgcttcggctttcttaccccctcggcttcctcgctcgctggttcgctccgggtctccgtctccctccacggtcagctcctcgtgtgatctcgtcgcgtggttagcagggaaacccagaggtggaaagaagctaacccggtgaagactctgaaggaatctgagccacctgcactccgatctgccatctgaaggacgcggaggaagccccgaatcggggaatttcgtccttccggcacgcccgccctgactggagcaaccacggaggctgtcggaggacctccactgttacatacgtactacttggcaggctgaagccccaagtttcctgcgcctgttctagctagttggcgaagaaagatgtcgttccgcagcatcgtccgcgacgtccgagacagcatcggcagcctgtcgaggcgcaacttcgaggtgactgctgcagccgccgccggcggcctctccggacgcaccgccgcgcaacatcgcagggggaggtctcagagcacggtgcacgagctccgggacacgcgtgtcgtggtccagcaggacgagagccgctgggccagcctccctcccgagctcctccgcgacgtggtccggaggctggaggccagcgagagcgcctggccgaaccgcaagcacgtcgtgtcctgcgccgccgtctgccgcgcgtggagggagatgtgccgggagatcgtgctcagcccggaggtctgcgggaagcttaccttcccggtctctctcaagcagcctgggcctcgagacgggatgattcagtgtttcataaagcgcgataaatccaagtccacgtatcgtctctacttgtgcctgagtactgctgtgctcatggagaacggcaagttcctcttatcagctaaaaggagccgcagaacaacctgcacgcagtatatcatctcgatggacgccgacaacatatcgagatctagcagcacgtacatcggaaagctgagacgattccctgcccgccggaaacatgctcgtgcatgctgtttgctgtgcctgtggcgcgacgcggtggtcgctggtcggtggaatcccactccactatcactagccgccactggcaagtgcgatgcgacggaaccaaggattggattctcctccggcgttgcggcgaatgatggccgatgctgtgattgaaccacggaacgtggg

SEQ ID NO: 59689 - DNA, 820 bp, Zea Mays
ctatgcacgaggcatgcaaattaacaagactcatacaagcacggaacagtgtgctgatggggcacaagagaaacacatgctcaggtcttaacatgtttggctttcgagcaaactttctccagaccccaaagaaatataatatccgatcagatgtgtcgatgctcatctcaacatactcccgtggcaacgcaccgacacacaactagtaaagaacacaagcctcgtgcgcttcggctttcttaccccctcggcttcctcgctcgctggttcgctccgggtctccgtctccctccacggtcagctcctcgtgtgatctcgtcgcgtggttagcagggaaacccagaggtggaaagaagctaacccggtgaagactctgaaggaatctgagccacctgcactccgatctgccatctgaaggacgcggaggaagccccgaatcggggaatttcgtccttccggcacgcccgccctgacgtgcgccctgaattggcttcaacactagcagatcggccctgcagtggcctcatcactagctagatgcctaccactggtaccatacaggcttggtgctcgatatgatgacaccgtttctcctcggcgagggtatctgctgtgacgattccctgcccgccggaaacatgctcgtgcatgctgtttgctgtgcctgtggcgcgacgcggtggtcgctggtcggtggaatcccactccactatcactagccgccactggcaagtgcgatgcgacggaaccaaggattggattctcctccggcgttgcggcgaatgatggccgatgctgtgattgaaccacggaacgtggg

SEQ ID NO: 59690 - DNA, 1348 bp, Zea Mays
ctatgcacgaggcatgcaaattaacaagactcatacaagcacggaacagtgtgctgatggggcacaagagaaacacatgctcaggtcttaacatgtttggctttcgagcaaactttctccagaccccaaagaaatataatatccgatcagatgtgtcgatgctcatctcaacatactcccgtggcaacgcaccgacacacaactagtaaagaacacaagcctcgtgcgcttcggctttcttaccccctcggcttcctcgctcgctggttcgctccgggtctccgtctccctccacggtcagctcctcgtgtgatctcgtcgcgtggttagcagggaaacccagaggtggaaagaagctaacccggtgaagactctgaaggaatctgagccacctgcactccgatctgccatctgaaggacgcggaggaagccccgaatcggggaatttcgtccttccggcacgcccgccctgacacgattccctgcccgccggaaacatgctcgtgcatgctgtttgctgtgcctgtggcgcgacgcggtggtcgctggtcggtggaatcccactccactatcactagccgccactggcaagtgcgatgcgacggaaccaaggattggattctcctccggcgttgcggcgaatgatggccgatgctgtgattgaaccacggaacgtggggggcattggctgcttttttaccagtctcaagtgttcgctgttgccttcgctgtattagctgctggtgctatagttctgacactcaatgttctactgctgggtgggaacataatcttcttccaaagcctcagtcttctcggatactgtctgttcccgctggacgtgggggctctgatttgcatgcttaaggacagtgtcatactaaagatggttgtggtgacggtaacattggcatggagctcttgggcagcataccccctcatgagtgctgctgttaacccaaagagaaaggccctggcgctgtatcccgtgttcctcatgtatatctcagttgcctgtctcataattgctatagattaaggcgggcatggtttctacagaactatcagaagaattacaggattttgttttctaggtggatcatcaaaatgcatatcctttttttttggctgcgtatagatctgggttcacattgttattgtagtttttgctggctgcttcaataccttatttcattttgtttaagaaaaaaaaaatcgcagggatttagaatgtagtcaatcaaatgtatgaatgttgtatagccatacagatatcttgctgtttcgcatctatgtggataatctggaatggactgctgaagcctgaataagtgaattactctgtttt

SEQ ID NO: 59691 - DNA, 1552 bp, Zea Mays
tggcaaatttctcgcggcggcacggtggccaggaacaccttgccggcctgggtgctgaggaacacgcgggcggacccgtccgggtgcgccgccatgttgaggtaggagccgttgccgacgcgctccaggaacatgctgcggagcggcagcgccgccgggcgggtggagttgaacgccgcgccgccgccgtccaggcacggcgacctgccggcgccgcccagcgagccgcagaactcgcccgcggactgccacagggtaacggatgtagagacgacgtgagtatcactggtttaatcatagacgttaccttgtaatggcgtgatcatgttcattttggagtgtgggtagtcccctagttttttataacagcgaatctctcgtctacgcctccaaatcgtcgaagccgcacctaaggacctccataatggcaaatttctctctatcagtggagcaaccacggaggctgtcggaggacctccactgttacatacgtactacttggcaggctgaagccccaagtttcctgcgcctgttctagctagttggcgaagaaagatgtcgttccgcagcatcgtccgcgacgtccgagacagcatcggcagcctgtcgaggcgcaacttcgaggtgactgctgcagccgccgccggcggcctctccggacgcaccgccgcgcaacatcgcagggggaggtctcagagcacggtgcacgagctccgggacacgcgtgtcgtggtccagcaggacgagagccgctgggccagcctccctcccgagctcctccgcgacgtggtccggaggctggaggccagcgagagcgcctggccgaaccgcaagcacgtcgtgtcctgcgccgccgtctgccgcgcgtggagggagatgtgccgggagatcgtgctcagcccggaggtctgcgggaagcttaccttcccggtctctctcaagcagcctgggcctcgagacgggatgattcagtgtttcataaagcgcgataaatccaagtccacgtatcgtctctacttgtgcctgagtactgctgtgctcatggagaacggcaagttcctcttatcagctaaaaggagccgcagaacaacctgcacgcagtatatcatctcgatggacgccgacaacatatcgagatctagcagcacgtacatcggaaagctgaggtgcgccctgaattggcttcaacactagcagatcggccctgcagtggcctcatcactagctagatgcctaccactggtaccatacaggcttggtgctcgatatgatgacaccgtttctcctcggcgagggtatctgctgtggtatcggatcaccgcctctgggttttcagatctctcggggtttttttaaggccatgtctgtttgatcttaaaatcataaagattgagagggattgaagaggattttgacttgtcagggatataatctccctcaattcctatgaattagcaactgagtggggagtgaggacgcgtgcgtgcggtgcagccgtgcagctcggcgaccatcacttccccctcctgtagctcgccactgactgctgatt

SEQ ID NO: 59692 - DNA, 1021 bp, Zea Mays
atccaactgcctcgaacacacatcgccacgatctcgccgccgcatactccgcctcgaacatgcaccctcatccccattgctgcgcccactcccagatctcatccccgccggccccaaccatctcccctgcatgccgctatcttccaaccgctcccgcaccatccgtgctacccgcatggcgccctcatcgcgccgccagcacggcagcaccccgcatgtcgcgcaccccacaccgacatctacgcagcctcctccccatctatccacatccccatccgagcccctacaaccttgctctgcatcccgatcccgcccccgccacgtcgcttgctccaaccgcgttctgcctccatcatgctgccacacggccccctcctaccacgctcctcacaacagtggatctagcgtcctaatcgccagcaaggagagtctgtatgagcctgcgcacaaatccggtgtacgagttccgtgcaatcagccaatcgcattagttgccaggatacatgtcattggtttaataaagccaaacactggtaaccacaaattgttctccattgtcagcagcaactattgagcagccaagatatcagccaagaattttcgaattcacatcaatcaacaatagttttgtgcagagccgaggactccaacccatcccaatgtactctcctccgattcgccgatttggcgtcgttctattcaactcataagtgcaactattgagatggacagcacacaagctccaatttctcagggttttctttctgaaaagggactgttaacactttctataaggctccttttcatttaccagaacaatggcaccatccacacttaatcaaaataggacgattgcagtcgtacctcctattccttcagaatctccgtaagtacatatttcacttatctatactactcctattaagcctaaaacataagcgtccacagtgcccccgccacccacccgcgtgcccgcctgcacgaaccacaacctgccccagacagcagcgcgcagccccac

SEQ ID NO: 59693 - DNA, 921 bp, Zea Mays
gacattaatatggacaagtcatgtgaggtggttaactttaaaatacgtggggatgtgcatctcggtttaggtatatgatcattttaccaatatttgaacagatcctcttatgaatgagtgagtacctattaatcctatttttgttttcaccatgtttcgcagatagctttccagatgactgtagcaccattgatttcagaattttgtcaacacaaggcattgcaggtggagacgaacaagtaaacgtggatctagatgatgatagcgattggttgcatagaaatgagacattccaggcaaacaacattgtcgcaagtaatgaccttctgacaacagttagagatttctagcatggctgacacaagtaaccatggatccctcattgatgaatggttgccgaccctacaccaagcccaaagaactctcatgtcatgctgaatgaaaaattcagctctcgctcaatatctggtctttttagtgaacatggaaccaataagcccaacaatcaatctgaaaaagcagagaagttgtgaattctgcttttctttacaataaaatggggatataacagctttaagcacaatgagaaatgagtccatcattagtgagatccaagcccagctaaagcacaagaatgtcacagtggatgtcaaagcaaattcagaccctcatattagtcctattcagctctcaactacagtcacagtcgaggaacttggtttaccaggcttgaaaaacataatggccatttcttatccacatcaagcatttgggaggtctccatatccagttcagatctccgacccgagcagtgactctctgactgtcaatgcctgccgccacggccccgtcaagacgagccagtgcgcgtgtgctgatctgaggacagaggagagcagccgcgtcaccatcgagttatag

SEQ ID NO: 59694 - DNA, 1721 bp, Zea Mays
cgccacaaggcactgactgtagggcccacctagcacccaccgtcccccgtgcatctcctatatataaacctccagcagggcgccacaccagaaagcgacacgaccgcgcccgaggagaccacaccacaccgcctcctccgcccgccgattcgtcgagctcgccctcccgctcgcctagctcccctgccttttcccttcctccccacctcctgccccgcgaacgtgctcccgcatgccaccgcgctgacgcgcgcggcggacgacggggtcgggatcatggacaagtacgaggctgttcgggacatcgggtcgggcaacttcggggtagcgcggttgatgcgcaaccgcgagacccgagaactcgtcgccgtcaagctcatcgaacgaggccaccggatcgacgagaatgtgtaccgcgagatcgtcaaccaccggtcgctgcggcaccctaacatcatccagttcatagaggtgatcctaactccaactcatcttgcaattgtgatggagtatgcggctggtggtgaactatttgatcgaatcgtagatcgtgggcgatttagcgaggatgagaccaggtatttcttccagcagttgatctgtggagtgagctattgccatcacatgcaaatatgtcatagagatttgaagctggagaatgttctcttggatggcagcccagctccacggcttaagatatgtgattttggctactccaagtcatcagtactacattcaaggccaaagtcagcagtggggacaccagcatatattgcaccagaggtgctttctcggcgggagtatgatgggaagcttgcagatgtatggtcatgtggagttactctttttgtcatgcttgtgggagcctacccgtttgaagatcaggatgatcctaaaaatattagaaagaccattcagcaattcaatataatatcccagacaacattcgcatatctgatgattgcagacaactcatttcacgtatctttgtcagcaatccattaaggagaatcaccatgagggaaataaaaagccatccatggttcctaaagaacttgccgagggagctcacagaggcggtgcagttatcctacttcaggagggacaacagtgtctctgcattttcagaccaaacaaccgaagaaatcatgaagattgtcaaggaggcaagaaccttgccaaaatcgtcgagatcaggctatggttacagtgaagaatgctcagatgaggaggaaaaggaagtggagagcgaacccaaagaggaggaagaagaagctgagtgtgataagacagttagggaggttcgcgagagcggggagctggatatgacctcactgcacatctaaatgctgcctgtgaggctgtgacgtgtctgtagataattggctttattgtctgctgaatttggtagaacttatgcaattctggcgtcagatatagtggtctatataagccttttccatcctgtaatatatttgttttgttgaactgtatgtgtggtactccgtatatgggtttgttctaagggagcaaggctttgtacaggcacacctgattgtgtttttggataggaagttttaccgtctgtttgcacactgcagcaaacattttggagtttgtaagccatatgttgcggcatatccagtaaaaatggatgaaacgctgcaaattccgtcaaaatggcttgtataactttgcaaagattgaagataaaagatttt

SEQ ID NO: 59695 - DNA, 1619 bp, Zea Mays
cgccacaaggcactgactgtagggcccacctagcacccaccgtcccccgtgcatctcctatatataaacctccagcagggcgccacaccagaaagcgacacgaccgcgcccgaggagaccacaccacaccgcctcctccgcccgccgattcgtcgagctcgccctcccgctcgcctagctcccctgccttttcccttcctccccacctcctgccccgcgaacgtgctcccgcatgccaccgcgctgacgcgcgcggcggacgacggggtcgggatcatggacaaatcgacgagaatgtgtaccgcgagatcgtcaaccaccggtcgctgcggcaccctaacatcatccagttcatagaggtgatcctaactccaactcatcttgcaattgtgatggagtatgcggctggtggtgaactatttgatcgaatcgtagatcgtgggcgatttagcgaggatgagaccaggtatttcttccagcagttgatctgtggagtgagctattgccatcacatgcaaatatgtcatagagatttgaagctggagaatgttctcttggatggcagcccagctccacggcttaagatatgtgattttggctactccaagtcatcagtactacattcaaggccaaagtcagcagtggggacaccagcatatattgcaccagaggtgctttctcggcgggagtatgatgggaagcttgcagatgtatggtcatgtggagttactctttttgtcatgcttgtgggagcctacccgtttgaagatcaggatgatcctaaaaatattagaaagaccattcagcgaattgcagcaattcaatataatatcccagacaacattcgcatatctgatgattgcagacaactcatttcacgtatctttgtcagcaatccattaaggagaatcaccatgagggaaataaaaagccatccatggttcctaaagaacttgccgagggagctcacagaggcggtgcagttatcctacttcaggagggacaacagtgtctctgcattttcagaccaaacaaccgaagaaatcatgaagattgtcaaggaggcaagaaccttgccaaaatcgtcgagatcaggctatggttacagtgaagaatgctcagatgaggaggaaaaggaagtggagagcgaacccaaagaggaggaagaagaagctgagtgtgataagacagttagggaggttcgcgagagcggggagctggatatgacctcactgcacatctaaatgctgcctgtgaggctgtgacgtgtctgtagataattggctttattgtctgctgaatttggtagaacttatgcaattctggcgtcagatatagtggtctatataagccttttccatcctgtaatatatttgttttgttgaactgtatgtgtggtactccgtatatgggtttgttctaagggagcaaggctttgtacaggcacacctgattgtgtttttggataggaagttttaccgtctgtttgcacactgcagcaaacattttggagtttgtaagccatatgttgcggcatatccagtaaaaatggatgaaacgctgcaaattccgtcaaaatggcttgtataactttgcaaagattgaagataaaagatttt

SEQ ID NO: 59696 - DNA, 1730 bp, Zea Mays
cgccacaaggcactgactgtagggcccacctagcacccaccgtcccccgtgcatctcctatatataaacctccagcagggcgccacaccagaaagcgacacgaccgcgcccgaggagaccacaccacaccgcctcctccgcccgccgattcgtcgagctcgccctcccgctcgcctagctcccctgccttttcccttcctccccacctcctgccccgcgaacgtgctcccgcatgccaccgcgctgacgcgcgcggcggacgacggggtcgggatcatggacaagtacgaggctgttcgggacatcgggtcgggcaacttcggggtagcgcggttgatgcgcaaccgcgagacccgagaactcgtcgccgtcaagctcatcgaacgaggccaccggatcgacgagaatgtgtaccgcgagatcgtcaaccaccggtcgctgcggcaccctaacatcatccagttcatagaggtgatcctaactccaactcatcttgcaattgtgatggagtatgcggctggtggtgaactatttgatcgaatcgtagatcgtgggcgatttagcgaggatgagaccaggtatttcttccagcagttgatctgtggagtgagctattgccatcacatgcaaatatgtcatagagatttgaagctggagaatgttctcttggatggcagcccagctccacggcttaagatatgtgattttggctactccaagtcatcagtactacattcaaggccaaagtcagcagtggggacaccagcatatattgcaccagaggtgctttctcggcgggagtatgatgggaagcttgcagatgtatggtcatgtggagttactctttttgtcatgcttgtgggagcctacccgtttgaagatcaggatgatcctaaaaatattagaaagaccattcagcgaattgcagcaattcaatataatatcccagacaacattcgcatatctgatgattgcagacaactcatttcacgtatctttgtcagcaatccattaagggaatcaccatgagggaaataaaaagccatccatggttcctaaagaacttgccgagggagctcacagaggcggtgcagttatcctacttcaggagggacaacagtgtctctgcattttcagaccaaacaaccgaagaaatcatgaagattgtcaaggaggcaagaaccttgccaaaatcgtcgagatcaggctatggttacagtgaagaatgctcagatgaggaggaaaaggaagtggagagcgaacccaaagaggaggaagaagaagctgagtgtgataagacagttagggaggttcgcgagagcggggagctggatatgacctcactgcacatctaaatgctgcctgtgaggctgtgacgtgtctgtagataattggctttattgtctgctgaatttggtagaacttatgcaattctggcgtcagatatagtggtctatataagccttttccatcctgtaatatatttgttttgttgaactgtatgtgtggtactccgtatatgggtttgttctaagggagcaaggctttgtacaggcacacctgattgtgtttttggataggaagttttaccgtctgtttgcacactgcagcaaacattttggagtttgtaagccatatgttgcggcatatccagtaaaaatggatgaaacgctgcaaattccgtcaaaatggcttgtataactttgcaaagattgaagataaaagatttt

SEQ ID NO: 59697 - DNA, 618 bp, Zea Mays
gaacaacacacacagagaaaggatattttttccctgaaacctgaataagctaaaccacgtggcttgatctgcaaaacgtgccagcaaacaactagagaaaaatacttcgccgagaaggaagaatcagccgtgcggttggacacggagatgccgagaagatggacgcacggagtcaccacgaacctatcgactttttatctccagatccagattagctaccacggcaccgccagcccggacggctataaagacgaggcccatctcgaaatcgacggcgatgaagaagaccagttcccctctcctgatcgtcctgttcctcacagcagcagccatggcggccgagccggagaagcaggcggcccccgcggcacaggagacggccgtgcacatcgtgtacgttgaccgccccgaggacgccgaccctgaggagttccacatccgcaccctcacccccgtcctcggcagcgaacagaaggccagggacgcagtgctctaccactacaagaacgccgccagcggcttctccgcgaagctcaccccccagcaggtcaaggatctcaaggcttttctaagaacctggttgtggggctgtgaggagaatccgagaaggtgaaggga

SEQ ID NO: 59698 - DNA, 513 bp, Zea Mays
aaaaatacttcgccgagaaggaagaatcagccgtgcggttggacacggagatgccgagaagatggacgcacggagtcaccacgaacctatcgactttttatctccagatccagattagctaccacggcaccgccagcccggacggctataaagacgaggcccatctcgaaatcgacggcgatgaagaagaccagttcccctctcctgatcgtcctgttcctcacagcagcagccatggcggccgagccggagaagcaggcggcccccgcggcacaggagacggccgtgcacatcgtgtacgttgaccgccccgaggacgccgaccctgaggagttccacatccgcaccctcacccccgtcctcggcagcgaacagaaggccagggacgcagtgctctaccactacaagaacgccgccagcggcttctccgcgaagctcaccccccagcaggtcaaggatctcaagggataataattaatcaaagtgattacttctccacattattgtgtgcac

SEQ ID NO: 59699 - DNA, 934 bp, Zea Mays
tggacacggagatgccgagaagatggacgcacggagtcaccacgaacctatcgactttttatctccagatccagattagctaccacggcaccgccagcccggacggctataaagacgaggcccatctcgaaatcgacggcgatgaagaagaccagttcccctctcctgatcgtcctgttcctcacagcagcagccatggcggccgagccggagaagcaggcggcccccgcggcacaggagacggccgtgcacatcgtgtacgttgaccgccccgaggacgccgaccctgaggagttccacatccgcaccctcacccccgtcctcggcagcgaacagaaggccagggacgcagtgctctaccactacaagaacgccgccagcggcttctccgcgaagctcaccccccagcaggtcaaggatctcaagggtgttctccaggttgtgccgagccagacttaccagctacatggtcctgggtctggcactcaccagggcacgacacacaccttgggccttatgtgaaggcgtatgagaatcaagaagactgtgtttagtatggctgtatggcacaggtctgacgaatgtgtatagtacagtactatgtaagaataagggacgtatcgtctatatactgctttgcgcatgctcagccctgttctaaagcttgtaatgcaccaatgcgtatgttttcaatacaatgacaagtatgctatcttgtttggtgcttgatcggtccgtgtttgatccttgaatctggagtggagcactctgcctctctgcgtccgctttgtgttgcttatttgctatgttgttgagtttagggttgaaaacggaccggtaaaataccgacctgtatcgttttctatatttgacccgattgtatatttgatccgattgtttctatatttacggaaaaatatggaaacgggatgga

SEQ ID NO: 59700 - DNA, 614 bp, Zea Mays
gcagcagaaggccagggacgcagtgctctaccactacaagaacgccgccagcggcttctccgcgaagctcaccccccagcaggtcaaggatctcaaggagcaaccaggtgttctccaggttgtgccgagccagacttaccagctacatggtcctgggtctggcactcaccagggcacgacacacaccttgggccttatgtgaaggcgtatgagaatcaagaagactgtgtttagtatggctgtatggcacaggtctgacgaatgtgtatagtacagtactatgtaagaataagggacgtatcgtctatatactgctttgcgcatgctcagccctgttctaaagcttgtaatgcaccaatgcgtatgttttcaatacaatgacaagtatgctatcttgtttggtgcttgatcggtccgtgtttgatccttgaatctggagtggagcactctgcctctctgcgtccgctttgtgttgcttatttgctatgttgttgagtttagggttgaaaacggaccggtaaaataccgacctgtatcgttttctatatttgacccgattgtatatttgatccgattgtttctatatttacggaaaaatatggaaacgggatgga

SEQ ID NO: 59701 - DNA, 2156 bp, Zea Mays
tctcgctctcgcagcctgctcgtccattcaacgaccaaaccgctcacgtcacgtgcctgcccatcgcttcccaatcctaaccgcccgcagcgcagcggcgagatcgacatcgacctcaatcgctgacgagtgacgacctttccgtgtcgatcggtctccattactactagctcgcgggcgcggcatccctcaaccgaaactgatgaaggctgcggtctccagcgccggcgagtcggcgggcgagctgcttctccgcgcggcggcgctggtgccgtggacgcgctacttcctcgcggcgctagccctggccgccgtactcctgtacaggttcctggagctccacttgctcggcgacctcctccgcggcctccgcggcggccgcgtctcgcttaccttccaccccgagtctcaagtgtaccaccgggtcgcctccaagtgccgctcgctgcacggcaggtacctgacgacgccgtggttagcgagtcctcatttgcagacgctgttcctgagcatatctggcagaccaccttcattcacctatcggaggcagttgtacactgttcgtgatggcggtaccattgccttagattggttactagcttctgatcttgaagatggagatattggcacttctgacggaaccatttctaaggatgattcaacaccccttcttgttgtgatacctggattaactagtgattctagtgctgcttatgtgaagcacttggtcttttctatggcaatcaaaggatggaatgttgttgtaagcaaccacaggggtcttggtggcatctccataacatctgattgcttttacaatgccgggtggacggcagatatgcgtgaagttgttagtttccttcatcaagagtatcctaaggctccactattcactgttgggacaagcataggtgccaatattgtggtcaagtatcttggagaagaaggtgaaaacacacctgtagctggtgctgcatctatttgttctccctgggatctgctggtgaccagcaaatttatttcacgcaagcttgtgcagcgatgttatgacagagcccttgcgattggtctaaaaggatatgcgaaactacatcaatcagtcttggcacgacttgcaaactgggaagctattacatcgtcacactctatccgggaattcgaccgccatgccacttgtgttgttgcaaaatacgagtggacacattctaccgcaagtgcagcagtgcaaattatatcggtaatgtgtcagttccactgctttgtatcagtgccttagatgaccccctctgcacaagggaggccattccctgggatgaatgcagggcaaacaaaaacattgtattggcaactacacctaatggcggacatcttgctttctttgaaggcctaactgctggaaagctttggtgggtacgacctgtttccgagttcctctgtgctctgcatgatggcccctacatgcatcggcagaaggcacaagggcacgatttgcactcatcgttggaatcatcaattgacaagagcccatatgtgaatttcatggaagatggaatggtagctgcattaacagatgatggtcctaacaacggtgactccttgcttaacgaggttcttggtgaaattgaacctaatgatagcgtggttgtccaacacgtaaaacagaaccaaaacaccagagctatacaaaatgagagtgacagttggttggatgataaaaacagctccgaagggaatgttcaagcccatggaggaactcaagaacagagagaagtgccatatgcgaataaaatcagtgatgccattggtcctgttaagaaatcaataaaccaactcagtcgatcccagggaagctgaagaaatcgtgaacactgtgctaacacagatttatttggtatgtaagagcatgtacagtgatgtttaatatagaggctcttgagattatctaaagagagcatttgcaaaaaaaaaattgtggagctgtctctatgtgaagagacgcctttagctcgtaacctaagtagtaacatatgtcttcacttcacttgtacgaattcgtcgtatgttatatcgatatgatgctttacagtttcattcactttattatttattaatagactatatttatagacacacaattgtataatagagtatcttag

SEQ ID NO: 59702 - DNA, 2206 bp, Zea Mays
ctcgctctcgcagcctgctcgtccattcaacgaccaaaccgctcacgtcacgtgcctgcccatcgcttcccaatcctaaccgcccgcagcgcagcggcgagatcgacatcgacctcaatcgctgacgagtgacgacctttccgtgtcgatcggtctccattactactagctcgcgggcgcggcatccctcaaccgaaactgatgaaggctgcggtctccagcgccggcgagtcggcgggcgagctgcttctccgcgcggcggcgctggtgccgtggacgcgctacttcctcgcggcgctagccctggccgccgtactcctgtacaggttcctggagctccacttgctcggcgacctcctccgcggcctccgcggcggccgcgtctcgcttaccttccaccccgagtctcaagtgtaccaccgggtcgcctccaagtgccgctcgctgcacggcaggtacctgacgacgccgtggttagcgagtcctcatttgcagacgctgttcctgagcatatctggcagaccaccttcattcacctatcggaggcagttgtacactgttcgtgatggcggtaccattgccttagattggttactagcttctgatcttgaagatggagatattggcacttctgacggaaccatttctaaggatgattcaacaccccttcttgttgtgatacctggattaactagtgattctagtgctgcttatgtgaagcacttggtcttttctatggcaatcaaaggatggaatgttgttgtaagcaaccacaggggtcttggtggcatctccataacatctgattgcttttacaatgccgggtggacggcagatatgcgtgaagttgttagtttccttcatcaagagtatcctaaggctccactattcactgttgggacaagcataggtgccaatattgtggtcaagtatcttggagaagaaggtgaaaacacacctgtagctggtgctgcatctatttgttctccctgggatctgctggtgaccagcaaatttatttcacgcaagcttgtgcagcgatgttatgacagagcccttgcgattggtctaaaaggatatgcgaaactacatcaatcagtcttggcacgacttgcaaactgggaagctattacatcgtcacactctatccgggaattcgaccgccatgccacttgtgttgttgcaaaatacgagacagtggacacattctaccgcaagtgcagcagtgcaaattatatcggtaatgtgtcagttccactgctttgtatcagtgccttagatgaccccctctgcacaagggaggccattccctgggatgaatgcaggcctaactgctggaaagctttggtgggtacgacctgtttccgagttcctctgtgctctgcatgatggcccctacatgcatcggcagaaggcacaagggcacgatttgcactcatcgttggaatcatcaattgacaagagcccatatgtgaatttcatggaagatggaatggtagctgcattaacagatgatggtcctaacaacggtgactccttgcttaacgaggttcttggtgaaattgaacctaatgatagcgtggttgtccaacacgtaaaacagaaccaaaacaccagagctatacaaaatgagagtgacagttggttggatgataaaaacagctccgaagggaatgttcaagcccatggaggaactcaagaacagagagaagtgccatatgcgaataaaatcagtgatgccattggtcctgttaagaaatcaataaaccaactcagtcgatcccagggtaagtcaatctggttgcttgcttacattgctcttgtaacctcttggccgttgcttggggccctaggttttttcttcaggaaaaggttgagtaattctctgttatctaggaagctgaagaaatcgtgaacactgtgctaacacagatttatttggtatgtaagagcatgtacagtgatgtttaatatagaggctcttgagattatctaaagagagcatttgcaaaaaaaaaattgtggagctgtctctatgtgaagagacgcctttagctcgtaacctaagtagtaacatatgtcttcacttcacttgtacgaattcgtcgtatgttatatcgatatgatgctttacagtttcattcactttattatttattaatagactatatttatagacacacaattgtataatagagtatcttag

SEQ ID NO: 59703 - DNA, 2047 bp, Zea Mays
gtccattcaacgaccaaaccgctcacgtcacgtgcctgcccatcgcttcccaatcctaaccgcccgcagcgcagcggcgagatcgacatcgacctcaatcgctgacgagtgacgacctttccgtgtcgatcggtctccattactactagctcgcgggcgcggcatccctcaaccgaaactgatgaaggctgcggtctccagcgccggcgagtcggcgggcgagctgcttctccgcgcggcggcgctggtgccgtggacgcgctacttcctcgcggcgctagccctggccgccgtactcctgtacaggttcctggagctccacttgctcggcgacctcctccgcggcctccgcggcggccgcgtctcgcttaccttccaccccgagtctcaagtgtaccaccgggtcgcctccaagtgccgctcgctgcacggcaggtacctgacgacgccgtggttagcgagtcctcatttgcagacgctgttcctgagcatatctggcagaccaccttcattcacctatcggaggcagttgtacactgttcgtgatggcggtaccattgccttagattggttactagcttctgatcttgaagatggagatattggcacttctgacggaaccatttctaaggatgattcaacaccccttcttgttgtgatacctggattaactagtgattctagtgctgcttatgtgaagcacttggtcttttctatggcaatcaaaggatggaatgttgttgtaagcaaccacaggggtcttggtggcatctccataacagtgaccagcaaatttatttcacgcaagcttgtgcagcgatgttatgacagagcccttgcgattggtctaaaaggatatgcgaaactacatcaatcagtcttggcacgacttgcaaactgggaagctattacatcgtcacactctatccgggaattcgaccgccatgccacttgtgttgttgcaaaatacgagacagtggacacattctaccgcaagtgcagcagtgcaaattatatcggtaatgtgtcagttccactgctttgtatcagtgccttagatgaccccctctgcacaagggaggccattccctgggatgaatgcagggcaaacaaaaacattgtattggcaactacacctaatggcggacatcttgctttctttgaaggcctaactgctggaaagctttggtgggtacgacctgtttccgagttcctctgtgctctgcatgatggcccctacatgcatcggcagaaggcacaagggcacgatttgcactcatcgttggaatcatcaattgacaagagcccatatgtgaatttcatggaagatggaatggtagctgcattaacagatgatggtcctaacaacggtgactccttgcttaacgaggttcttggtgaaattgaacctaatgatagcgtggttgtccaacacgtaaaacagaaccaaaacaccagagctatacaaaatgagagtgacagttggttggatgataaaaacagctccgaagggaatgttcaagcccatggaggaactcaagaacagagagaagtgccatatgcgaataaaatcagtgatgccattggtcctgttaagaaatcaataaaccaactcagtcgatcccagggtaagtcaatctggttgcttgcttacattgctcttgtaacctcttggccgttgcttggggccctaggttttttcttcaggaaaaggttgagtaattctctgttatctaggaagctgaagaaatcgtgaacactgtgctaacacagatttatttggtatgtaagagcatgtacagtgatgtttaatatagaggctcttgagattatctaaagagagcatttgcaaaaaaaaaattgtggagctgtctctatgtgaagagacgcctttagctcgtaacctaagtagtaacatatgtcttcacttcacttgtacgaattcgtcgtatgttatatcgatatgatgctttacagtttcattcactttattatttattaatagactatatttatagacacacaattgtataatagagtatcttag

SEQ ID NO: 59704 - DNA, 2248 bp, Zea Mays
gtcacgtgcctgcccatcgcttcccaatcctaaccgcccgcagcgcagcggcgagatcgacatcgacctcaatcgctgacgagtgacgacctttccgtgtcgatcggtctccattactactagctcgcgggcgcggcatccctcaaccgaaactgatgaaggctgcggtctccagcgccggcgagtcggcgggcgagctgcttctccgcgcggcggcgctggtgccgtggacgcgctacttcctcgcggcgctagccctggccgccgtactcctgtacaggttcctggagctccacttgctcggcgacctcctccgcggcctccgcggcggccgcgtctcgcttaccttccaccccgagtctcaagtgtaccaccgggtcgcctccaagtgccgctcgctgcacggcaggtacctgacgacgccgtggttagcgagtcctcatttgcagacgctgttcctgagcatatctggcagaccaccttcattcacctatcggaggcagttgtacactgttcgtgatggcggtaccattgccttagattggttactagcttctgatcttgaagatggagatattggcacttctgacggaaccatttctaaggatgattcaacaccccttcttgttgtgatacctggattaactagtgattctagtgctgcttatgtgaagcacttggtcttttctatggcaatcaaaggatggaatgttgttgtaagcaaccacaggggtcttggtggcatctccataacatctgattgcttttacaatgccgggtggacggcagatatgcgtgaagttgttagtttccttcatcaagagtatcctaaggctccactattcactgttgggacaagcataggtgccaatattgtggtcaagtatcttggagaagaaggtgaaaacacacctgtagctggtgctgcatctatttgttctccctgggatctgctggtgaccagcaaatttatttcacgcaagcttgtgcagcgatgttatgacagagcccttgcgattggtctaaaaggatatgcgaaactacatcaatcagtcttggcacgacttgcaaactgggaagctattacatcgtcacactctatccgggaattcgaccgccatgccacttgtgttgttgcaaaatacgagacagtggacacattctaccgcaagtgcagcagtgcaaattatatcggtaatgtgtcagttccactgctttgtatcagtgccttagatgaccccctctgcacaagggaggccattccctgggatgaatgcagggcaaacaaaaacattgtattggcaactacacctaatggcggacatcttgctttctttgaaggcctaactgctggaaagctttgcctgtatctatctaaatgcttgacaggtgggtacgacctgtttccgagttcctctgtgctctgcatgatggcccctacatgcatcggcagaaggcacaagggcacgatttgcactcatcgttggaatcatcaattgacaagagcccatatgtgaatttcatggaagatggaatggtagctgcattaacagatgatggtcctaacaacggtgactccttgcttaacgaggttcttggtgaaattgaacctaatgatagcgtggttgtccaacacgtaaaacagaaccaaaacaccagagctatacaaaatgagagtgacagttggttggatgataaaaacagctccgaagggaatgttcaagcccatggaggaactcaagaacagagagaagtgccatatgcgaataaaatcagtgatgccattggtcctgttaagaaatcaataaaccaactcagtcgatcccagggtaagtcaatctggttgcttgcttacattgctcttgtaacctcttggccgttgcttggggccctaggttttttcttcaggaaaaggttgagtaattctctgttatctaggaagctgaagaaatcgtgaacactgtgctaacacagatttatttggtatgtaagagcatgtacagtgatgtttaatatagaggctcttgagattatctaaagagagcatttgcaaaaaaaaaattgtggagctgtctctatgtgaagagacgcctttagctcgtaacctaagtagtaacatatgtcttcacttcacttgtacgaattcgtcgtatgttatatcgatatgatgctttacagtttcattcactttattatttattaatagactatatttatagacacacaattgtataatagagtatcttag

SEQ ID NO: 59705 - DNA, 2234 bp, Zea Mays
cacgtgcctgcccatcgcttcccaatcctaaccgcccgcagcgcagcggcgagatcgacatcgacctcaatcgctgacgagtgacgacctttccgtgtcgatcggtctccattactactagctcgcgggcgcggcatccctcaaccgaaactgatgaaggctgcggtctccagcgccggcgagtcggcgggcgagctgcttctccgcgcggcggcgctggtgccgtggacgcgctacttcctcgcggcgctagccctggccgccgtactcctgtacaggttcctggagctccacttgctcggcgacctcctccgcggcctccgcggcggccgcgtctcgcttaccttccaccccgagtctcaagtgtaccaccgggtcgcctccaagtgccgctcgctgcacggcaggtacctgacgacgccgtggttagcgagtcctcatttgcagacgctgttcctgagcatatctggcagaccaccttcattcacctatcggaggttggagtgaaatagcagttgtacactgttcgtgatggcggtaccattgccttagattggttactagcttctgatcttgaagatggagatattggcacttctgacggaaccatttctaaggatgattcaacaccccttcttgttgtgatacctggattaactagtgattctagtgctgcttatgtgaagcacttggtcttttctatggcaatcaaaggatggaatgttgttgtaagcaaccacaggggtcttggtggcatctccataacatctgattgcttttacaatgccgggtggacggcagatatgcgtgaagttgttagtttccttcatcaagagtatcctaaggctccactattcactgttgggacaagcataggtgccaatattgtggtcaagtatcttggagaagaaggtgaaaacacacctgtagctggtgctgcatctatttgttctccctgggatctgctggtgaccagcaaatttatttcacgcaagcttgtgcagcgatgttatgacagagcccttgcgattggtctaaaaggatatgcgaaactacatcaatcagtcttggcacgacttgcaaactgggaagctattacatcgtcacactctatccgggaattcgaccgccatgccacttgtgttgttgcaaaatacgagacagtggacacattctaccgcaagtgcagcagtgcaaattatatcggtaatgtgtcagttccactgctttgtatcagtgccttagatgaccccctctgcacaagggaggccattccctgggatgaatgcagggcaaacaaaaacattgtattggcaactacacctaatggcggacatcttgctttctttgaaggcctaactgctggaaagctttggtgggtacgacctgtttccgagttcctctgtgctctgcatgatggcccctacatgcatcggcagaaggcacaagggcacgatttgcactcatcgttggaatcatcaattgacaagagcccatatgtgaatttcatggaagatggaatggtagctgcattaacagatgatggtcctaacaacggtgactccttgcttaacgaggttcttggtgaaattgaacctaatgatagcgtggttgtccaacacgtaaaacagaaccaaaacaccagagctatacaaaatgagagtgacagttggttggatgataaaaacagctccgaagggaatgttcaagcccatggaggaactcaagaacagagagaagtgccatatgcgaataaaatcagtgatgccattggtcctgttaagaaatcaataaaccaactcagtcgatcccagggtaagtcaatctggttgcttgcttacattgctcttgtaacctcttggccgttgcttggggccctaggttttttcttcaggaaaaggttgagtaattctctgttatctaggaagctgaagaaatcgtgaacactgtgctaacacagatttatttggtatgtaagagcatgtacagtgatgtttaatatagaggctcttgagattatctaaagagagcatttgcaaaaaaaaaattgtggagctgtctctatgtgaagagacgcctttagctcgtaacctaagtagtaacatatgtcttcacttcacttgtacgaattcgtcgtatgttatatcgatatgatgctttacagtttcattcactttattatttattaatagactatatttatagacacacaattgtataatagagtatcttag

SEQ ID NO: 59706 - DNA, 2211 bp, Zea Mays
gcctgcccatcgcttcccaatcctaaccgcccgcagcgcagcggcgagatcgacatcgacctcaatcgctgacgagtgacgacctttccgtgtcgatcggtctccattactactagctcgcgggcgcggcatccctcaaccgaaactgatgaaggctgcggtctccagcgccggcgagtcggcgggcgagctgcttctccgcgcggcggcgctggtgccgtggacgcgctacttcctcgcggcgctagccctggccgccgtactcctgtacaggttcctggagctccacttgctcggcgacctcctccgcggcctccgcggcggccgcgtctcgcttaccttccaccccgagtctcaagtgtaccaccgggtcgcctccaagtgccgctcgctgcacggcaggtacctgacgacgccgtggttagcgagtcctcatttgcagacgctgttcctgagcatatctggcagaccaccttcattcacctatcggagttgtacactgttcgtgatggcggtaccattgccttagattggttactagcttctgatcttgaagatggagatattggcacttctgacggaaccatttctaaggatgattcaacaccccttcttgttgtgatacctggattaactagtgattctagtgctgcttatgtgaagcacttggtcttttctatggcaatcaaaggatggaatgttgttgtaagcaaccacaggggtcttggtggcatctccataacatctgattgcttttacaatgccgggtggacggcagatatgcgtgaagttgttagtttccttcatcaagagtatcctaaggctccactattcactgttgggacaagcataggtgccaatattgtggtcaagtatcttggagaagaaggtgaaaacacacctgtagctggtgctgcatctatttgttctccctgggatctgctggtgaccagcaaatttatttcacgcaagcttgtgcagcgatgttatgacagagcccttgcgattggtctaaaaggatatgcgaaactacatcaatcagtcttggcacgacttgcaaactgggaagctattacatcgtcacactctatccgggaattcgaccgccatgccacttgtgttgttgcaaaatacgagacagtggacacattctaccgcaagtgcagcagtgcaaattatatcggtaatgtgtcagttccactgctttgtatcagtgccttagatgaccccctctgcacaagggaggccattccctgggatgaatgcagggcaaacaaaaacattgtattggcaactacacctaatggcggacatcttgctttctttgaaggcctaactgctggaaagctttggtgggtacgacctgtttccgagttcctctgtgctctgcatgatggcccctacatgcatcggcagaaggcacaagggcacgatttgcactcatcgttggaatcatcaattgacaagagcccatatgtgaatttcatggaagatggaatggtagctgcattaacagatgatggtcctaacaacggtgactccttgcttaacgaggttcttggtgaaattgaacctaatgatagcgtggttgtccaacacgtaaaacagaaccaaaacaccagagctatacaaaatgagagtgacagttggttggatgataaaaacagctccgaagggaatgttcaagcccatggaggaactcaagaacagagagaagtgccatatgcgaataaaatcagtgatgccattggtcctgttaagaaatcaataaaccaactcagtcgatcccagggtaagtcaatctggttgcttgcttacattgctcttgtaacctcttggccgttgcttggggccctaggttttttcttcaggaaaaggttgagtaattctctgttatctaggaagctgaagaaatcgtgaacactgtgctaacacagatttatttggtatgtaagagcatgtacagtgatgtttaatatagaggctcttgagattatctaaagagagcatttgcaaaaaaaaaattgtggagctgtctctatgtgaagagacgcctttagctcgtaacctaagtagtaacatatgtcttcacttcacttgtacgaattcgtcgtatgttatatcgatatgatgctttacagtttcattcactttattatttattaatagactatatttatagacacacaattgtataatagagtatcttag

SEQ ID NO: 59707 - DNA, 2210 bp, Zea Mays
cccaatcctaaccgcccgcagcgcagcggcgagatcgacatcgacctcaatcgctgacgagtgacgacctttccgtgtcgatcggtctccattactactagctcgcgggcgcggcatccctcaaccgaaactgatgaaggctgcggtctccagcgccggcgagtcggcgggcgagctgcttctccgcgcggcggcgctggtgccgtggacgcgctacttcctcgcggcgctagccctggccgccgtactcctgtacaggttcctggagctccacttgctcggcgacctcctccgcggcctccgcggcggccgcgtctcgcttaccttccaccccgagtctcaagtgtaccaccgggtcgcctccaagtgccgctcgctgcacggcaggtacctgacgacgccgtggttagcgagtcctcatttgcagacgctgttcctgagcatatctggcagaccaccttcattcacctatcggaggcagttgtacactgttcgtgatggcggtaccattgccttagattggttactagcttctgatcttgaagatggagatattggcacttctgacggaaccatttctaaggatgattcaacaccccttcttgttgtgatacctggattaactagtgattctagtgctgcttatgtgaagcacttggtcttttctatggcaatcaaaggatggaatgttgttgtaagcaaccacaggggtcttggtggcatctccataacatctgattgcttttacaatgccgggtggacggcagatatgcgtgaagttgttagtttccttcatcaagagtatcctaaggctccactattcactgttgggacaagcataggtgccaatattgtggtcaagtatcttggagaagaaggtgaaaacacacctgtagctggtgctgcatctatttgttctccctgggatctgctggtgaccagcaaatttatttcacgcaagcttgtgcagcgatgttatgacagagcccttgcgattggtctaaaaggatatgcgaaactacatcaatcagtcttggcacgacttgcaaactgggaagctattacatcgtcacactctatccgggaattcgaccgccatgccacttgtgttgttgcaaaatacgagctcctttcagacagtggacacattctaccgcaagtgcagcagtgcaaattatatcggtaatgtgtcagttccactgctttgtatcagtgccttagatgaccccctctgcacaagggaggccattccctgggatgaatgcagggcaaacaaaaacattgtattggcaactacacctaatggcggacatcttgctttctttgaaggcctaactgctggaaagctttggtgggtacgacctgtttccgagttcctctgtgctctgcatgatggcccctacatgcatcggcagaaggcacaagggcacgatttgcactcatcgttggaatcatcaattgacaagagcccatatgtgaatttcatggaagatggaatggtagctgcattaacagatgatggtcctaacaacggtgactccttgcttaacgaggttcttggtgaaattgaacctaatgatagcgtggttgtccaacacgtaaaacagaaccaaaacaccagagctatacaaaatgagagtgacagttggttggatgataaaaacagctccgaagggaatgttcaagcccatggaggaactcaagaacagagagaagtgccatatgcgaataaaatcagtgatgccattggtcctgttaagaaatcaataaaccaactcagtcgatcccagggtaagtcaatctggttgcttgcttacattgctcttgtaacctcttggccgttgcttggggccctaggttttttcttcaggaaaaggttgagtaattctctgttatctaggaagctgaagaaatcgtgaacactgtgctaacacagatttatttggtatgtaagagcatgtacagtgatgtttaatatagaggctcttgagattatctaaagagagcatttgcaaaaaaaaaattgtggagctgtctctatgtgaagagacgcctttagctcgtaacctaagtagtaacatatgtcttcacttcacttgtacgaattcgtcgtatgttatatcgatatgatgctttacagtttcattcactttattatttattaatagactatatttatagacacacaattgtataatagagtatcttag

SEQ ID NO: 59708 - DNA, 2113 bp, Zea Mays
atgaaggctgcggtctccagcgccggcgagtcggcgggcgagctgcttctccgcgcggcggcgctggtgccgtggacgcgctacttcctcgcggcgctagccctggccgccgtactcctgtacaggttcctggagctccacttgctcggcgacctcctccgcggcctccgcggcggccgcgtctcgcttaccttccaccccgagtctcaagtgtaccaccgggtcgcctccaagtgccgctcgctgcacggcaggtacctgacgacgccgtggttagcgagtcctcatttgcagacgctgttcctgagcatatctggcagaccaccttcattcacctatcggaggcagttgtacactgttcgtgatggcggtaccattgccttagattggttactagcttctgatcttgaagatggagatattggcacttctgacggaaccatttctaaggatgattcaacaccccttcttgttgtgatacctggattaactagtgattctagtgctgcttatgtgaagcacttggtcttttctatggcaatcaaaggatggaatgttgttgtaagcaaccacaggggtcttggtggcatctccataacatctgattgcttttacaatgccgggtggacggcagatatgcgtgaagttgttagtttccttcatcaagagtatcctaaggctccactattcactgttgggacaagcataggtgccaatattgtggtcaagtatcttggagaagaaggtgaaaacacacctgtagctggtgctgcatctatttgttctccctgggatctgctggtgaccagcaaatttatttcacgcaagcttgtgcagcgatgttatgacagagcccttgcgattggtctaaaaggatatgcgaaactacatcaatcagtcttggcacgacttgcaaactgggaagctattacatcgtcacactctatccgggaattcgaccgccatgccacttgtgttgttgcaaaatacgagacagtggacacattctaccgcaagtgcagcagtgcaaattatatcggtaatgtgtcagttccactgctttgtatcagtgccttagatgaccccctctgcacaagggaggccattccctgggatgaatgcagggcaaacaaaaacattgtattggcaactacacctaatggcggacatcttgctttctttgaaggcctaactgctggaaagctttgccaacagtgatgacgttcagcctgtatctatctaaatgcttgacaggtgggtacgacctgtttccgagttcctctgtgctctgcatgatggcccctacatgcatcggcagaaggcacaagggcacgatttgcactcatcgttggaatcatcaattgacaagagcccatatgtgaatttcatggaagatggaatggtagctgcattaacagatgatggtcctaacaacggtgactccttgcttaacgaggttcttggtgaaattgaacctaatgatagcgtggttgtccaacacgtaaaacagaaccaaaacaccagagctatacaaaatgagagtgacagttggttggatgataaaaacagctccgaagggaatgttcaagcccatggaggaactcaagaacagagagaagtgccatatgcgaataaaatcagtgatgccattggtcctgttaagaaatcaataaaccaactcagtcgatcccagggtaagtcaatctggttgcttgcttacattgctcttgtaacctcttggccgttgcttggggccctaggttttttcttcaggaaaaggttgagtaattctctgttatctaggaagctgaagaaatcgtgaacactgtgctaacacagatttatttggtatgtaagagcatgtacagtgatgtttaatatagaggctcttgagattatctaaagagagcatttgcaaaaaaaaaattgtggagctgtctctatgtgaagagacgcctttagctcgtaacctaagtagtaacatatgtcttcacttcacttgtacgaattcgtcgtatgttatatcgatatgatgctttacagtttcattcactttattatttattaatagactatatttatagacacacaattgtataatagagtatcttag

SEQ ID NO: 59709 - DNA, 1006 bp, Zea Mays
gttacttccagaatcaagttcattcatgctatcgattttcaatgattgaagtagctgctgtcttttattgattgaggttcttggtgagaaggcatttgagaaatttgggaagtggttcatctcgcttcgtttttcagaccagttggcaggttcttacaagaaggtccttgcattcaagtttgtattgccagatgcaagcaacatgtcagagatgacaagattggttgctcttgtgccatactacattgatttggttggccgttataagctcagctctcatgctcgctctaaaactgatggagctagaacaaaggctgctcaggaggctttcagggaactacagagtgcccggcaggaggccctgcaaaggaaaaaggctgaaaagaagaaactcatcgaggaggcagatgccaaactaagcgctgagtcactcaggaagaaagaagaaaaggaaagggctcggcaaatgaagaagtctggacccaaagtgaagatgctccgctcttaacaacgtcatgattcaagaatctatcatatcttggcttttgctattcacctgttgattagcatatagttcagtgtctgctagactcatttatattctaatcctgtgagaatgagcaaaaaggatccaggagaaaagaatcctcactggcgtttcggcttttattggatgtgtgccagaattatccgtggccccacgcccccacgcaacttctaagaaaaattggttatgcaaaacctgtgctgtatgagaaatagaacttacatgattcaatgtgtagaatggtgatagaactatgatatgaaattctatgctcggattacatgctttcagattctagcaacttcgctgctcagcatccatttcggttgtttgtaatgtgtttggtttctttttttctcactcctgctgggactttggagtacaagcgatgtcatagcctttccgatatttggaaccctgggagtgaagtgctaatgtccaattgctggactgatgttt

SEQ ID NO: 59710 - DNA, 1651 bp, Zea Mays
atgggaattgtcgccgccgccgccgccacgactgccacgtcccgtctcctctaccgctacgcagccgctggcagcgaccgccataaccggcaccacctcaggtactacgcgagtccgtatcctctctcgctgcgctgcggctccggccggcgtgaggcggcggcccgggcgctcctgcccgaccgcgttaccccgttctcatacggcgtggatgaggacgcggatgaccacccgcgcgaggagtgcggtgtaatcggggtcgtgggcgacccagacgcgtcgtcgctgtgctatctggggctgcagaagctacagcaccgcggggaggagggggccgggatcgtcgccgtgggcggggacggcaagctcaagtccgtgaccgggctggggctcgtggccgacgtgttcgcggacccgtcccggctcgcctcgctcccgggccccgctgccatcgggcacgtgcgctactccacggccggcgccgccgcgtcgctgcgcaacgtgcagccgttcctggccgggtaccggttcgggcaggtcgccgtggcgcataacggaaacctcgtcaactaccaagctctgcggaacaaactcgaggccaggggatccatcttcaacacgtcctcggatacggaggtcattctccacctgattgcgacgtcgctgtcgcggcccctcctcgcccgggtctgcgatgcctgcgagcgccttgcgggggcctactcgctcctgttcctcacggccgacaagctcttcgccgtgcgcgacccacacgggttccgcccgctggtgatgggccgccgccggaacggcgccgtcgtcttcgcgtcggagacgtgcgcgctggacctcatcgacgccacctacgagcgcgaggtggagcctggggaggtggtcgtggtcgaccgccgcgacatgtcggtggcctcggcctgcctcgtcccgcaccgcccccgccgcgcctgcgtgttcgagcacatctacttctcgctgcccaactcggtggtgttctcgcacgccgtccacgagcgccgtaccgccttcgggcaggcgctggccgaggagtcccctgccccgggcgccgacgtcgtcatcccggtgcccgactcgggtttctacgccgcgctcgggttcgcacgcgcgtcggggctcgagttccagcagggtctcatccggtggcactacagcggccgcagcttcatccagccgacgcaggcgatccgggacctcgccgtgaagctgaagctcgcccccgtgcgcggcgtcatcaccggcaagagcgtcgtggtcgtggacgactccctggtgcgcggcaccacctcgagcaagatcgtgcggctgctccgcgacgccggcgcgcgggaggtgcacatgcggatcgcgagcccgcccgttgtgggctcctgcctctacggcatcgacactccgagcgagggcgagctcatctccaaccggatggaccttgatggcgtgcgccgggagatcggcagcgactccctcgccttcctctcgctggacaagctgcacagcatctacggcgaggagtcggggaactactgcgacgcgtgcttctcgcgcaagtaccctgtgctgcccacgctggccgatccggccgccgagctggaggattgagccaggagccagccaggtg

SEQ ID NO: 59711 - DNA, 1465 bp, Zea Mays
cacactctctcctctcatccatgacttggtgagtgagtgtggcttccatatttaagttagctctactccacaagagctagcaatatggtgctattggttccacctatccctttgccatccacttatatgggcttttgagattttcctgggatttatttgaataacttaattgggccaagcccataaatcctaacacatacaacataagtacatcacatttcttttgatgcaattcgcaggaatcacagtagcctttggctgtttggatcgacacgactaccaacattttcacttttgacgttagtgtataattcatttcttgggggaaacatgatccgagtttccaagggacgcaaacgttctatcggttggttacgcttctaatccgaaccgaacgtttgttgcccaaactaggcttagcgtgactcgtttttcgttcccacatttggttggctccgtttgtaatttgaatgcgaccaccggccggtagtgctccactgctcctatttcgcctctggactgccaggctccactgaaggatgtgcacgctctgatttctgctgaggccgtcacactgaaaacgaccgaacgaaccaaagacgtctccaaagaagatacgcacatgcgcagcacaatcaagttgaaaacgggggcagttgcacaaacgtattgaggaggtcgcgtggtcgtcttgaattcagatccacaacgcccaggagaagacgtgtccaaggccatagaggacggtggttctaacatgcatgaaaaatggagactttttttggtgttatacgagagataggaaatagggtggatggttgcagccttgcaggggcaggtcgctcgatagtccggtcagcctctacgcgtccggtgtccggacagcaggatgcacggtcagcttggtgaacttgctatactgctgagctatacggcctacggactcacaactgccagtatacataaacccacaaaaacacatgaatacgtcaagtatgaaacagggtgcatgacagcatgagcgtcagctaagctcatacccaaccaaacaaccaacagtcattgtctggttctcgggatctattcatcactccttcagatgaatagacaggagtttttttcccctgaactcattttatagcatgaattttagaatgtatgattgctacttgctaggcagttccatacttccattccatccatgcgcctctcgtgccgaattttatactcggtcgtgatcgtggacagcaggacaggtcagcgatcacatggcagcaaagagtaacccatgcaatgcaagcacggagcgggaattgataaaagtatgtcggggcgtgagatgggaggagaagcggtgcgtggttgggggctcaccgtgatgtagagcacggaggaggcgacgatggtgcggtagcgcccgagccaggagtcggcgacggcggcgccgaggagcggcagcatggac

SEQ ID NO: 59712 - DNA, 2165 bp, Zea Mays
atggggggtctctgctcgaaggtctcagctgtagacaagtcaccgagcgacactgcgtttggccggaaccaggtcaccgatcatgatccgggggcgtcgttggagttggagaagcagccggtgtccggaaaggcagctgcaccggcaaagcggctggacgagcagcagcagcagcatcagtctttctcgttcctagagagcgtcgtccctggggttgcttttcatgcccgggctaatgctagcggcgaaacggggcccaggacctcgccgcaactgaccagatcgctgtcgcagagggatggcgtgggcaaggcaaaagccggtgctgacaaggtttcagaagtgagctcaattttaggtagagctagcactgttgggcttgaaaaggcagtggaggttctggacacacttggcagtagcatgacaagttttaattctagccgtggttttgtgtcaagttctgcagcaaagggaaacaaaatatccatgctggcttttgagatggcaaatactatagttaaaggctctaatctgatgcattctttatcggagcttagcataaagcatctgaaggaggtggtgcttcattcagaacttcagaaggtgttcaacaccttatatccaaagattttgatgaactgctcaagatggcagctgccgacaaaagggaagagttagaagtattcacaaaagaggtcattcgctttggaaaccgttgcaaggatcctcagtggcataacttggaccgctactttgaaaagctggcatccgaactagccccatgaagttatctgaaaggaaaagcagaatcagtgatgcagaaactggttacatgtgttcaaaatacagttgaattatatcatgaattgcatgctttggatagattggaacatgattatcgccttaaacagaaagaacaggatggcttgagtttaagaggagacagtctggatatactgaagcaggcagtgaaggtccagagtaagcatgttaaaagtatgaaaaagaaatcactttggtccaagaatttggaagaggtggtggtaaagcttgtagatattgtccacttcttacatttggagatatataacgccttcggtcatcctgacaaggaagagccacaagaacgtggcaaacaccataatagattgggaccagcaggccttgcgttgcattacgctagtatcatcaatcagattgacaatcttgtttctcaatcatgtgcaatgcctccaaatgcaagggatgcattatatcatagtttaccacctatcatcaaatctgctctccgctataaactacaatcgtttgaagtcaaggaagagcttacagcttctcaggtcaaagcagaaatggagaagactttgtggtggcttgtccctttggctagtaacacaaataaggcataccatggcttcggttgggttggagagttggcaaatacaggatctgaaatgaactgcaagctatcagggcagaaggacatgtcccgaatcgagacattgtatcatgctgacaaggagaagactgaagcacttatcctggagctggtcgtgtggcttcatcatcttatcagtaaatcaagacacgccagtggaggtgtaaggtctcccatcaaatctccagtcagctcaccaacacaaaatggcgctgcaatcacactgttgccgggcaaaacgaaaatttcatcaccgattctcacccaagaggatcaggatatgctaagggatgtcaagtacaggaaatttgtcccagggataagcaaaagtcaagagtttgacacaaagtcaagtcacagcaaacggagtaggttgagcaagagcaacagccagtccccagctagtggcaacaggaaataattgctcccagttaggaggtcttccatgcttccagttattgacttcgaaattcacaggaccaaagctttggatttaattgacaggcttgacaacctaaaaatacaacgagcaggaagctaaccggaacgtaaacttgaatgtggtcatccgcagtcttgaaaccccagccgcgatataaacagttactgagtatcagatatgagtagcaaggccggccgttgaactctggtccagtgaaaactgtcgagagtggtccaatgaacgacactaaattgtgtgatactacatgaacaagcacatgtcttt

SEQ ID NO: 59713 - DNA, 3123 bp, Zea Mays
cctcattccatccctctttgtacattcaaccaaacacatcctaaacggtggccgcagcccgcagccgcgggttagtgatacgattcatcgcaggaagattcggcctgatgcggagacgttggatcggcatccaacgactgcgttccgctacggtccaaccgctcccccacgccgccgctccccactgagcaaaccccgcgcgccgccgacgagatgaagggagcaacgccgccgcggccgttcatggtgccgggccctgggggcccgatgccgcccccgcagcagcagttcgggctggtggagactcgccccccgctggccgccgtgctgcggccgcgcttcaacatcccgggcctccacccctcggcggccgccgccgccgcggcctcgggcgcgggcaagatcgcctccacctacgacctcgtcgagccgatgcggttcctctacgtgcacgtcgtcaaggcgcgcgacctgcccgcggtgtccgccacgggctccatcgaccccttcgtcgaggtcaagctcggcaacttcaagggcaccacgcccgtcagggcggccagccacagcccgtcctggcagcaggtcttcgccttctccgccgcgcacctccagtcccacctgctcgaggtcgccctcaaggccaaggacctcgccggcgacgacctcgtcggccgcgtcgcgttcgacctctcggaggtgcccgtccgcgtgcccccggactcgccgctcgcgccgcagtggtaccgcctcgagaccaagcgcggggagaagctgccccacggggagatcatgctctccgtctggctcggcacccaggccgacgaggcgttcccggacgcctggcactccgacgcgcacgccgccgcgggccccgccgccgtcgcgtccacgcgcgccaaggtatacttctcgcccaagctcgtgtacctccgcgtcgccgccatcgccgcgcaggacctcgtcccacacgacgcctcgcgcccgatgaccgcctgcgtcaagctgcagctcgccggccaggtgcgccgcacgcgccccggcgcgccgccggggacgcccaacccgatctggaacgaggagttcatgttcgtcgcgtcggagcccttcgacgagccgctccttgtcaccgtcgaggaccgcgtcgcgcccggccgcgacgagatcctcggccgcattgtcctgcccctcaaagcggcaatgccgcggcacgaccacttcggcaagcctgtggagccgcggtggtacagccttatgcgccactccgatgatcctgacaagaaggaggttaagttcgcaagcaagatacagattcggatgtcgcttgattttgggtatcatgttcttgacgagtccacctactacagcagtgatctgcagccatcgtcaaagcctgcaaggaaaccaagcattgggatgcttgagctgggagttctgggtgcccggaacttgataccgatgaagcccaaggatggacgcaccacagacgcctattgtgtggcaaaatatggaccaaagtgggtgcgcaccaggactattcttgacacactgaatccacaatggaatgagcagtacacttgggaggtgtttgatccttgcaccgtgatcacagtggtggtgtttgacaacgggcaaattgggagcaagaatggtggtggcccagatcagcgcattgggaaggtcaggatccggctctctacactggagacagacagagtgtacacgcatttctaccctttgctggttttacatccaagtggactcaagaagactggtgagcttcatttggctgtgcggtttacctgcacagcttgggtgaacatgatggcgctgtatggtcgaccgcttcttccaaagatgcactacacacatccaatcgcagtgatgcaattggactacctgaggcaccaggcaatgcagattgttgccgcaagactcagccgtgctgagcccccgctgcgcagggaagttgtggaatacatgctcgatgtggactcacatatgtttagtctccggcgcagcaaggctaattttcatcgcattacctcactgttctttggttttgtggcaatgctcaagtggtaccatagcatcaggagctggtgtaatccaatcacaacaatgctagtacacatgctgttcttgatactgatctgctatccggagctcatcctgcctaccatcttcctctacatgttcatgatcgggctgtggaactatcggtaccggccaaggcatccgtcacacatggatactaagctctcccatgctgagctgacacaccctgatgagcttgatgaggagtttgacacgttcccttcctccagaccagctgaaattgtaagaatgcgctatgacaggctgaggagcgttggaggtcgtgtgcaggctgtggttggggacctggcgacacaaggcgagagagcccatgctttgctgagctggagggaccctcgggccaccgccatcttcattttcttatccctggtgatcgccgttgtgctgtacgtgacgccgttccaggttttgatggtcatagccatgctttacctgctgcgacatccccggttccgcagcaggatgccctcagtgcctttcaacttctacaggagactgcctgccaagtctgatatgctcctttaagatccagtgtccaccataagagaaacaggtgcaagtcttacttatttatgtctgttccgctcggttccttctggttagcatcagatcagatgtgaatatacctgatgagttcatatattagaggtcattagtatccccggaataaggtgtcggtttaatggtttatttccttggttatgccaaagaaagggaacaactggatcccttttgagttttgggaaatagtgggaggaggattttggtgcagaattgtaatattaacttcaggttattagcatagaactaaaggcaggaacaatattatcccccgtgtattatgtttgtactatttgtgtcaattttgcttgtgtttcagtgatcttttgcctgcagctgggtcatgctgtttgtatttatgtgttcgaatccctcaccttgtttgggttcactggacatgcctgcttgctgcggttgtactccttgttaataggtggttttgct

SEQ ID NO: 59714 - DNA, 883 bp, Zea Mays
atctctagggttagtttaagccgcctccgctacgcgcaaggacgccgccgccgctcagcagagagcagaccgcactccgccccctcccaaattcccactcccacctctggttctcctccgcagctcggatcatctgctataatggcgtctgctgctggagacgcatcccgattcgtgccattaaactggaaggattagagacggcaaaagctagtggtgcatgccagcttgttgtgaagtatctgaaagaataatttgttggtgaatatacatacccctgcttgcgtgctggtgcaatttatgaaagaaagtatttgctggggacttcaatggctaggcctgttattgctaaggcaatggttgatgttgccaaggaagttgatgcagattgttgcttgtggatgcaccgagaaaggcaatgatcaggtatcagaagattggcatcgtcgcaggtgttcctgtttgcatcaacggataagacgtgtcgcccacatccgtctcctcgctgagctcaatgaaattggtgggaagcatgggaggagacttcctcgtttgatgacggggaaatctataaccaggctgacgccgagggggggtcatcaggctctggtctcccgaccggggtccgggcgatgctggagaagggtatctgaatctttctttgtttgattcagagacaaaatccgttcttgggaaatcgttgttgggtcggtgatcacagacggatgggaatcatgtggaattttgtttacatgttgactaactatagttagttgaccgtgcatctgtttctatatatatcatatagctatacattggtttgatgggttatctaaaatatctatcttttatatatagtacaaaccaacacaggcttggttta

SEQ ID NO: 59715 - DNA, 1185 bp, Zea Mays
atctctagggttagtttaagccgcctccgctacgcgcaaggacgccgccgccgctcagcagagagcagaccgcactccgccccctcccaaattcccactcccacctctggttctcctccgcagctcggatcatctgctataatggcgtctgctgctggagacgcatcccgattcgtcggtaatccgcagctagatcgccccacttcgttccaatccgtcctgtcttttcttctcgttccgcccatgtttggcattgcgtgttttccggacagagccgtgttatttagacgcttagatatttctaggctttcgtacgtgttcgcactcgcacggcttccttgacaaaaccctaaaccctccgccgcgctgcagctccgacgtgcgccttaggttctagaacaaggcgagtagcacgcctttacctccccggctcgccttactacctaagcgtctcctaggcgacgcttgaatactatgtgccattaaactggaaggattagagacggcaaaagctagtggtgcatgccagcttgttgtgaagtatctgaaagaataatttgttggtgaatatacatacccctgcttgcgtgctggtgcaatttatgaaagaaagtatttgctggggacttcaatggctaggcctgttattgctaaggcaatggttgatgttgccaaggaagttgatgcagattgttgcttgtggatgcaccgagaaaggcaatgatcaggtatcagaagattggcatcgtcgcaggtgttcctgtttgcatcaacggataagacgtgtcgcccacatccgtctcctcgctgagctcaatgaaattggtgggaagcatgggaggagacttcctcgtttgatgacggggaaatctataaccaggctgacgccgagggggggtcatcaggctctggtctcccgaccggggtccgggcgatgctggagaagggtatctgaatctttctttgtttgattcagagacaaaatccgttcttgggaaatcgttgttgggtcggtgatcacagacggatgggaatcatgtggaattttgtttacatgttgactaactatagttagttgaccgtgcatctgtttctatatatatcatatagctatacattggtttgatgggttatctaaaatatctatcttttatatatagtacaaaccaacacaggcttggttta

SEQ ID NO: 59716 - DNA, 1370 bp, Zea Mays
tttgtctcctctcactctcttcagagtctcggcctcccctaccggcaagcacaggcttttctttttctttctcgcccttttttcgccctcattgtgtgtgtgtgcagcacatataatccgctctctctcccccggtttctcttgtcttcttgctgcggcgatggaccaagaaacctcacgggaaccccactccttgaggagccgtccagtgccgcattagtgggttccattcttctttggatcgctgctcgcgatcgcattgcccgcgtttcttttggccgtcttggttcggtcttgattcttggacgaggtgggatttggagagccgagagcggcgcggcagaggcgggtttctcgggtctgtgagatatgtagctcgactgcatccaacgtggtagtcttgggggatcccgagttcagcgaccagtggagcgaaacaaacagcgccgccgccgccgccgcgcaggcgccgccgccaccagccgaaccccggaggttctggcaggggcatcggttcctcaacttcctcctcgcctgcatggtgttcgccttcgtcatctcttggctcttccacttcaacgtccccggctaacaagttctttggcgcacatacatggcccccgaataaaaaaaaactccaaaaaagccattactccggacgccgggtcggtaagttagcggatctggaagaacaggctggtgggtgctgggttggttgaagtaaaagctcgacatggggccgggggacgatgatactgcatttttgtttatgatgaatgcctttgataaagatcaagagggtggcgatcccgcgagagaaaaaaaagggagcatgattgcgcggcgtttctctgacagtgtctaggtgtagttggaagcaagtagtagaagatgattgatgtgtgctgctggtgttttatcatcgcgagggttgctgctagcctagccatttttttttttggttctagctttcgaaaggttctctgtttgttgctttgcgtgttgtttcggcgtgtgatggattggatcatgttgaacattcctcgcgctttgttccgatgcttctgatccttgtggactcgtcggttcttgcttttgctgtagcgtgtctctggaggtaataaagggaaaaaaagggttgtcagatccttctgcttccgtgttgcgtttttttccctggatgcttgcctgtctctcatctctggtggtgctgatctctgcggcctcagaattctgtgcggagcctgcagttatcagcgtcgcagggaggcagaggcgcgcagtaaattgcaggatcctgatctatctgattcacgggatatgtttgtgctctgcggtgccgattataaatgcaggatcgaggaggcgtt

SEQ ID NO: 59717 - DNA, 1067 bp, Zea Mays
tgccaccttaataaaaaattggggtttaggagtcacgaattgatcacaacaaagggtctgtgagatatgtagctcgactgcatccaacgtggtagtcttgggggatcccgagttcagcgaccagtggagcgaaacaaacagcgccgccgccgccgccgcgcaggcgccgccgccaccagccgaaccccggaggttctggcaggggcatcggttcctcaacttcctcctcgcctgcatggtgttcgccttcgtcatctcttggctcttccacttcaacgtccccggctaacaagttctttggcgcacatacatggcccccgaataaaaaaaaactccaaaaaagccattactccggacgccgggtcggtaagttagcggatctggaagaacaggctggtgggtgctgggttggttgaagtaaaagctcgacatggggccgggggacgatgatactgcatttttgtttatgatgaatgcctttgataaagatcaagagggtggcgatcccgcgagagaaaaaaaagggagcatgattgcgcggcgtttctctgacagtgtctaggtgtagttggaagcaagtagtagaagatgattgatgtgtgctgctggtgttttatcatcgcgagggttgctgctagcctagccatttttttttttggttctagctttcgaaaggttctctgtttgttgctttgcgtgttgtttcggcgtgtgatggattggatcatgttgaacattcctcgcgctttgttccgatgcttctgatccttgtggactcgtcggttcttgcttttgctgtagcgtgtctctggaggtaataaagggaaaaaaagggttgtcagatccttctgcttccgtgttgcgtttttttccctggatgcttgcctgtctctcatctctggtggtgctgatctctgcggcctcagaattctgtgcggagcctgcagttatcagcgtcgcagggaggcagaggcgcgcagtaaattgcaggatcctgatctatctgattcacgggatatgtttgtgctctgcggtgccgattataaatgcaggatcgaggaggcgtt

SEQ ID NO: 59718 - DNA, 1191 bp, Zea Mays
gttatgccctgttgtgtagaacataaaacacacccatcggcgtatccattcggagcacagatctgttccattccaagcaatgtggcttaggcctttctttctttcatagggagtttcagttcttgtgccacatctgattttctttgctttctaatcccttgcatgatatgaagccaagggtctgtgagatatgtagctcgactgcatccaacgtggtagtcttgggggatcccgagttcagcgaccagtggagcgaaacaaacagcgccgccgccgccgccgcgcaggcgccgccgccaccagccgaaccccggaggttctggcaggggcatcggttcctcaacttcctcctcgcctgcatggtgttcgccttcgtcatctcttggctcttccacttcaacgtccccggctaacaagttctttggcgcacatacatggcccccgaataaaaaaaaactccaaaaaagccattactccggacgccgggtcggtaagttagcggatctggaagaacaggctggtgggtgctgggttggttgaagtaaaagctcgacatggggccgggggacgatgatactgcatttttgtttatgatgaatgcctttgataaagatcaagagggtggcgatcccgcgagagaaaaaaaagggagcatgattgcgcggcgtttctctgacagtgtctaggtgtagttggaagcaagtagtagaagatgattgatgtgtgctgctggtgttttatcatcgcgagggttgctgctagcctagccatttttttttttggttctagctttcgaaaggttctctgtttgttgctttgcgtgttgtttcggcgtgtgatggattggatcatgttgaacattcctcgcgctttgttccgatgcttctgatccttgtggactcgtcggttcttgcttttgctgtagcgtgtctctggaggtaataaagggaaaaaaagggttgtcagatccttctgcttccgtgttgcgtttttttccctggatgcttgcctgtctctcatctctggtggtgctgatctctgcggcctcagaattctgtgcggagcctgcagttatcagcgtcgcagggaggcagaggcgcgcagtaaattgcaggatcctgatctatctgattcacgggatatgtttgtgctctgcggtgccgattataaatgcaggatcgaggaggcgtt

SEQ ID NO: 59719 - DNA, 1466 bp, Zea Mays
cccaaacgcacgcggggaagcgccgcccgcccgaggagaggagcgcttcccgtttccgtgcccgcaagacctgtctgtctgggtccggtgggtctccggaccaggtgtcgagtgccccgctcgctcgcgtagccgcgttgcactttttttgcttccgtccaaacgcaggacgcggaccaacccacctgctccattttatgcttcgccctcgctcgcctcgccctcgccgcaacgctttgcgatagagtttctgtctgctaccagcaccacagcctagcaccccaccgcgtctagggttttctgctccaatggccgccgcgagggcagacggggagcgcaggatcggggtggccatcgactactcggagagcgccaagaaggcgctggactgggccatcgacaacctgctccaccacggggacaccctcgtcgtcgtccacgtcctgcaccacggcgcggaggagaccaagcacacgctctgggccaagtccggatcccctgaaggtggtggcgaagctgtactggggcgacgccagggagaagctctgcgacgccgtcgaggatctcaggatcgattccctcgtcatgggtagtcgcggcctcggcccgatccagaggattctcctgggaagcgtgacaaactacgtgctgtcaaacgcatcgtgcccggtgacagtcgtcaaggggaagtagtggcctgggcagcgtgccagtgatatgaatgaagatgctagcgtgcagtttgtgtgggttatagctaaacactatgttccgtcctgttgctgcatttcaataaagcatgtgtcttctagatttcacaaatctctctgaggctctgacctttgtcttattagctgtgaaactgtccgtacttcattcctgttcagatcgaattcgaggattggttcataccccttttactgtcgtgtcgtttgaactgctggttagtctgctcaatttgtatttctgattgtcttgcaccacgtttggattgcagcacagagtggtccgatcctaaaaccgactcttatcgttttgtttggtttgagtcacgacatgacgacgacgtcctctgaaatttacacagcagcactgttaattttgccggacacccaaactcaaatatgaaaccacccgaacaccagtttgggtgataatccaaatccgagaccaaacctcatggatccccgaaacctaatctcaaaggccaaaaccacaccaagcacagcacccctacagctcaaacggttaaacccaccaaaaggtccatgtttcacaactcaaaagcatgttccagctccacacatttgatctctctaccatacatactgaccatgatctgttgcggcgtgtagtagcgtgtgttactgacttacagtagcatcccagggcggtttctcttgttgccgcttgttgcggcgtctagtagcgtgtgtcaggattggacaccagatgttgatcggatc

SEQ ID NO: 59720 - DNA, 1556 bp, Zea Mays
gggaagcgccgcccgcccgaggagaggagcgcttcccgtttccgtgcccgcaagacctgtctgtctgggtccggtgggtctccggaccaggtgtcgagtgccccgctcgctcgcgtagccgcgttgcactttttttgcttccgtccaaacgcaggacgcggaccaacccacctgctccattttatgcttcgccctcgctcgcctcgccctcgccgcaacgctttgcgatagagtttctgtctgctaccagcaccacagcctagcaccccaccgcgtctagggttttctgctccaatggccgccgcgagggcagacggggagcgcaggatcggggtggccatcgactactcggagagcgccaagaaggcgctggactgggccatcgacaacctgctccaccacggggacaccctcgtcgtcgtccacgtcctgcaccacggcgcggaggagaccaagcacacgctctgggccaagtccggatccccgctgatcccactctccgagttccgggagcccgaggtgatgcagggctacggcgtgcgccccgacgccgaggtgctcgacgcgatcgacacggcagcgcgccagaagcaggtggtggcgaagctgtactggggcgacgccagggagaagctctgcgacgccgtcgaggatctcaggatcgattccctcgtcatgggtagtcgcggcctcggcccgatccagaggattctcctgggaagcgtgacaaactacgtgctgtcaaacgcatcgtgcccggtgacagtcgtcaaggggaagtagtggcctgggcagcgtgccagtgatatgaatgaagatgctagcgtgcagtttgtgtgggttatagctaaacactatgttccgtcctgttgctgcatttcaataaagcatgtgtcttctagatttcacaaatctctctgaggctctgacctttgtcttattagctgtgaaactgtccgtacttcattcctgttcagatcgaattcgaggattggttcataccccttttactgtcgtgtcgtttgaactgctggttagtctgctcaatttgtatttctgattgtcttgcaccacgtttggattgcagcacagagtggtccgatcctaaaaccgactcttatcgttttgtttggtttgagtcacgacatgacgacgacgtcctctgaaatttacacagcagcactgttaattttgccggacacccaaactcaaatatgaaaccacccgaacaccagtttgggtgataatccaaatccgagaccaaacctcatggatccccgaaacctaatctcaaaggccaaaaccacaccaagcacagcacccctacagctcaaacggttaaacccaccaaaaggtccatgtttcacaactcaaaagcatgttccagctccacacatttgatctctctaccatacatactgaccatgatctgttgcggcgtgtagtagcgtgtgttactgacttacagtagcatcccagggcggtttctcttgttgccgcttgttgcggcgtctagtagcgtgtgtcaggattggacaccagatgttgatcggatc

SEQ ID NO: 59721 - DNA, 895 bp, Zea Mays
cgcggaccaacccacctgctccattttatgcttcgccctcgctcgcctcgccctcgccgcaacgctttgcgatagagtttctgtctgctaccagcaccacagcctagcaccccaccgcgtctagggttttctgctccaatggccgccgcgagggcagacggggagcgcaggatcggggtggccatcgactactcggagagcgccaagaaggcgctggactgggccatcgacaacctgctccaccacggggacaccctcgtcgtcgtccacgtcctgcaccacggcgcggaggagaccaagcacacgctctgggccaagtccggatccccgctgatcccactctccgagttccgggagcccgaggtgatgcagggctacggcgtgcgccccgacgccgaggtgctcgacgcgatcgacacggcagcgcgccagaagcagctgaaggtggtggcgaagctgtactggggcgacgccagggagaagctctgcgacgccgtcgaggatctcaggatcgattccctcgtcatgggtagtcgcggcctcggcccgatccagaggtatagtacaatcctaagactccattactactactatagtactattgaaatgttgcctcatcaggactggaatgcgctgttcagcctctgatagtaagttagtttctcgctttttctttttgttcggataagcgcgtcaattgagtgtctggaataaatggatatagtctagcgtgcatggatggctcgattgatgatagggatagcccgcatgccaagtcagtatgctggtgcagtactgaaatgttcaaacacagcacatctagttcttgttcttaatagcaatacttatctgaaaaatgctcttgttccttgtatcgttgcatccggtgattctg

SEQ ID NO: 59722 - DNA, 2230 bp, Zea Mays
aaacacacacctagcatagctcaggtgaccatctatacttaccatgctaccaccgaattccagcctacatatttttgagaggcagccaatgcaacacgtagtcccaccgcacccgactccttcgattatttgaatatagattccgtgggaaccatccgcccgctcgccggggtccagccgtgcaacacataacacgcgcccgcgttggcgtattctattcgccaagagccaaggggattggggaggccgtccatgttgcgtgttgtttagacgcgccaaaaggcaaaagcgtggaggaggctcatcaagcacaagcacgccacgcgatccacacacggcaagcaacgcccagggctcgtgctcgccccgcgacccgcgaaagatctgtgctggttcgctcgctcgctcgcgccgcgccgccgcgtgggggtgccgatgagctgcgcggggcaggccggcgggtggctgctcgactacgcgctggtggaggaggagatccagggctccgagttcatctacatggtcgacgacccggccgtctccagcgtgatactggggtttgatgctcccaggaaggaggacggcgtccaggacaaccccggcgccaagaagaggcaatctttctcttcttccttcctttcagttgaccctcaacataaagttaagcttggcgaatttcgcatgcctagtaggagcttgcagagatataatcacgaatgggttgggatgtttcttgtttgtcgctagtattactattaccttaattgttgtgctggagtaatctggcatacaaattacttgattaccagtactccgctctgattgacacgagaggtagaactagtggggttcaggaattggcaaacatgtcaatcccgtcgctgtagaagaaaactcacagatttcaggttgtccagaaaggatgcagtgcttgcggacacgtctagcgaatttgctttctcgtaattaactccactttgagagctactacttgtgcgaattcaatggtcccattaatttcactgtactgtccaaataaagcggaaaagtgtccacatcacactaagtccaattctgttgcccctgaagtccgtgggcataatttgctgtgctttcctgtttccctttcttctacgcagatcccggccggagtccagcgcgccacccggcaccaaggcttgccgtgagaagctccggcgagacaggctcaacgaaaggttcaacgagctctgtgccatcttggaacccggcaagccacccaaggccgacaaagtcgctatcctaagcgacgctgcccgtctcctgaaccagctgcagggcgaggcccagaagcttaagcaatcgaacgaatcgctccaggagtccatcaagagtcttaaggctgagaagtccgagctgcgagacgagaagacgaggctcaaggctgagaaggagaggttggagcagatgctcaagggcgtcgtcagccacgccgcggtggctgctccggggcccttcgtcccgcaccctgctgcggtcgctccatctttccaccaccacccggcggcgtttgctcaggctggaaagttcgtcccgtaccccagctacccgccgccggctgcgttctggcagtggataccgccgacgtccctcgacacgaccaaggaccccgcacactggccgccggtcgcctagccgacctaccacctcaccgtggcatcattcatcggtgatgcgttgccgtgtgtactgaatttgatcgaagcatgcctgaaaaaagaaaccttggctgctgctcgtgtcaaggacgtgatgtgctgaagttcaggcgatctaggtcggctggagaagtctatgtaacagccataatgctaaagcaatgaaagtgatatattaattgaatcgggctagtgtttcctgaaactacggttatttagacattgcctggaaggctagaacaatgcaaacttgggtaacattgtgacaaagatcttaagtagtttaccatctccatattcaaactccactacgtgtagagtgcaaaacagtgtttagacaatgaccatataactgaactgctggaggtctaacaatgcaaatttggctaacattgtggcctgcaatatgagaatatgttatacaagatgtatcagaaacaactactccctctgtttttttagttgttgctggatagtttaattttgcattatccagcgacaactaaaaagaaacagaaggagtactacaaagt

SEQ ID NO: 59723 - DNA, 1588 bp, Zea Mays
gcaacacgtagtcccaccgcacccgactccttcgattatttgaatatagattccgtgggaaccatccgcccgctcgccggggtccagccgtgcaacacataacacgcgcccgcgttggcgtattctattcgccaagagccaaggggattggggaggccgtccatgttgcgtgttgtttagacgcgccaaaaggcaaaagcgtggaggaggctcatcaagcacaagcacgccacgcgatccacacacggcaagcaacgcccagggctcgtgctcgccccgcgacccgcgaaagatctgtgctggttcgctcgctcgctcgcgccgcgccgccgcgtgggggtgccgatgagctgcgcggggcaggccggcgggtggctgctcgactacgcgctggtggaggaggagatccagggctccgagttcatctacatggtcgacgacccggccgtctccaggaaggaggacggcgtccaggacaaccccggcgccaagaagagatcccggccggagtccagcgcgccacccggcaccaaggcttgccgtgagaagctccggcgagacaggctcaacgaaaggttcaacgagctctgtgccatcttggaacccggcaagccacccaaggccgacaaagtcgctatcctaagcgacgctgcccgtctcctgaaccagctgcagggcgaggcccagaagcttaagcaatcgaacgaatcgctccaggagtccatcaagagtcttaaggctgagaagtccgagctgcgagacgagaagacgaggctcaaggctgagaaggagaggttggagcagatgctcaagggcgtcgtcagccacgccgcggtggctgctccggggcccttcgtcccgcaccctgctgcggtcgctccatctttccaccaccacccggcggcgtttgctcaggctggaaagttcgtcccgtaccccagctacccgccgccggctgcgttctggcagtggataccgccgacgtccctcgacacgaccaaggaccccgcacactggccgccggtcgcctagccgacctaccacctcaccgtggcatcattcatcggtgatgcgttgccgtgtgtactgaatttgatcgaagcatgcctgaaaaaagaaaccttggctgctgctcgtgtcaaggacgtgatgtgctgaagttcaggcgatctaggtcggctggagaagtctatgtaacagccataatgctaaagcaatgaaagtgatatattaattgaatcgggctagtgtttcctgaaactacggttatttagacattgcctggaaggctagaacaatgcaaacttgggtaacattgtgacaaagatcttaagtagtttaccatctccatattcaaactccactacgtgtagagtgcaaaacagtgtttagacaatgaccatataactgaactgctggaggtctaacaatgcaaatttggctaacattgtggcctgcaatatgagaatatgttatacaagatgtatcagaaacaactactccctctgtttttttagttgttgctggatagtttaattttgcattatccagcgacaactaaaaagaaacagaaggagtactacaaagt

SEQ ID NO: 59724 - DNA, 837 bp, Zea Mays
gttttccctacgctcttgggggcgagactgagcacctcgcattatttataagctctagttggtgttattcgtagccaccccatggccctcatttcttaattaccccttatatgggctccgtcgatgggtcaatcgatcgatctccagtcggaaggagaccacgccgcatagagccagggggtagcctccattgctcctggtcatgaggtgtgctcatctattgggtaatggtggctgggcccaagggaccctctcctctcggattctcggaaggaccatggtgctcttcgtgcgacactagacgtgactgaggctaaagcaggtctccttcggaaccaactcactaaatcatactatcccttggttgctcttgaaaacgagctagagaagttgtgccatcaggcgggtcaggttgcggagtacgtcggggcccgtggttcttccatggtggagcgcctgaacaatatcccatgtcgtgttcgggatattatcgacttcggtgtacaccgaggggctgccgtagcgctactcgtcggggagcttcggtcgggctccactctttaggacatcctcggacctcccttgtctttgtaagacgagggactagaggtaatcctagagggctatgacaaagtagccagccgcgtcgtggaccggttgtctagagacgacatcgtgtgcagcgccagttgaccctgtgatgtatcacattctatcgctactgaataaaaaacaatttttatttttctcgtgctgtctttttccgacctacctgagactatgtttgtggggcacttggcactccctttgtcgatttgttgcccttgccggtgtctg

SEQ ID NO: 59725 - DNA, 1196 bp, Zea Mays
cgaacaagccacaatataataaaaaaacctctaattccccagacccggcaagcgacgccatcgcgcaccagcgctgctggaccaccgcccgtctgacgcaaacccagccgtccagaaccgtcgtcgccgccgcagcccgtccttccaccacgctcgcgccgttgcgcgctcttagggttccgcagggtcgggatcgccggagatggactggagcgcggtgacggcggaggacctggtggacgcgctgcgggaggtggactggtccacgccgccgcggactgtctcggagttcttctcccggttcaccgtcccacgctcctattccaagtggaccagccgcctcaagtgcaacctctactactacaggacaaactatttcatcttgatcatgttcatccttgggatgggcttcctttggaagccagttgctatccttgctgcttttatgactggacttagcatcgcatttctcaatgatagttttgcagtcactttcaatgagaaagtcacaaggaccgtaagacagttttcaccacatttagctgcaaagatgaggccaccaataacggtgtttgtcatattcttttctgcagttagctgtatactctggttgacctcatgcagtcttctcacagtcctctgggcactcctcattgctctatttgcaactgtgctccatgcaagcttcagaacaccaaatctgaaagcacgtctgaatacattcagagaggaattccgggctgtctggcggaattatagtgagctttaaggtctcatttgtttctctcatgttcattgtggtaaggaaaggtgtctagtgcagaaacgtccatgctgtttgtgagttgcactaggagatctagttgaaggtgaaacgccattggacactactacatggattatgggaggtgggatttgggttcggttggccgaatgcgatgttatgccttagcacgtgatccctcaagaacaataatttttctttcaggcttctccctaaccgaacattggagaggacagcatgtaaagaaatgtaaaaatgtaccggttctcgatcaaaacttatgttgtttgtagaaatttttactaattcgtattgcatcatcttttgaactatttgtttggtgactacaattttgcttgagcatttgtgtcaagttgagttacagcgagtagataatttctatgcttccttc

SEQ ID NO: 59726 - DNA, 1188 bp, Zea Mays
cgaacaagccacaatataataaaaaaacctctaattccccagacccggcaagcgacgccatcgcgcaccagcgctgctggaccaccgcccgtctgacgcaaacccagccgtccagaaccgtcgtcgccgccgcagcccgtccttccaccacgctcgcgccgttgcgcgctcttagggttccgcagggtcgggatcgccggagatggactggagcgcggtgacggcggaggacctggtggacgcgctgcgggaggtggactggtccacgccgccgcggactgtctcggagttcttctcccggttcaccgtcccacgctcctattccaagtggaccagccgcctcaagtgcaacctctactactacaggacaaactatttcatcttgatcatgttcatccttgggatgggcttcctttggaagccagttgctatccttgctgcttttatgactggacttagcatcgcatttctcaatgatagtcactttcaatgagaaagtcacaaggaccgtaagacagttttcaccacatttagctgcaaagatgaggccaccaataacggtgtttgtcatattcttttctgcagttagctgtatactctggttgacctcatgcagtcttctcacagtcctctgggcactcctcattgctctatttgcaactgtgctccatgcaagcttcagaacaccaaatctgaaagcacgtctgaatacattcagagaggaattccgggctgtctggcggaattatagtgagctttaaggtctcatttgtttctctcatgttcattgtggtaaggaaaggtgtctagtgcagaaacgtccatgctgtttgtgagttgcactaggagatctagttgaaggtgaaacgccattggacactactacatggattatgggaggtgggatttgggttcggttggccgaatgcgatgttatgccttagcacgtgatccctcaagaacaataatttttctttcaggcttctccctaaccgaacattggagaggacagcatgtaaagaaatgtaaaaatgtaccggttctcgatcaaaacttatgttgtttgtagaaatttttactaattcgtattgcatcatcttttgaactatttgtttggtgactacaattttgcttgagcatttgtgtcaagttgagttacagcgagtagataatttctatgcttccttc

SEQ ID NO: 59727 - DNA, 875 bp, Zea Mays
cgaacaagccacaatataataaaaaaacctctaattccccagacccggcaagcgacgccatcgcgcaccagcgctgctggaccaccgcccgtctgacgcaaacccagccgtccagaaccgtcgtcgccgccgcagcccgtccttccaccacgctcgcgccgttgcgcgctcttagggttccgcagggtcgggatcgccggagatggactggagcgcggtgacggcggaggacctggtggacgcgctgcgggaggtggactggtccacgccgccgcggactgtctcggagttcttctcccggttcaccgtcccacgctcctattccaagtggaccagccgcctcaagtgcaacctctactactacaggacaaactatttcatcttgatcatgttcatccttgggatgggcttcctttggaagccagttgctatccttgctgcttttatgactggacttagcatcgcatttctcaatgatagttttgcagtcactttcaatgagaaagtcacaaggaccgtaagacagttttcaccacatttagctgcaaagatgaggccaccaataacacctgttcttcgtggtcgaccaaactcgaagagatcaattcatatttgtgggcgacctcgcagggtgtttgtcatattcttttctgcagttagctgtatactctggttgacctcatgcagtcttctcacagtcctctgggcactcctcattgctctatttgcaactgtgctccatgcaagcttcagaacaccaaatctgaaagcacgtctgaatacattcagagaggaattccgggctgtctggcggaattatagtgagctttaaggtctcatttgtttctctcatgatcatggcccgcgagtttgaa

SEQ ID NO: 59728 - DNA, 1529 bp, Zea Mays
aaaaaatgaaaaccatatagaacgtcgttcgcgaccccaccgtatccccctccctcgccccctcactgctctcgctttcgctcgccatccgccgtcccgctccgcacaccggccctgcccgatgccttcgcccgccgcggccgcggcggcgcctttccaccgcatcgcatgcgcgcgtcagcacctccctcaaacccgtctcttcttcctcccatcccgcgcgctgctcaaatccgaccgcctcaccgtcccggctccgctgcgcgtccacgcgctgaggctgcctccgacggtgccacgggcggcaagccacgatgccgccacgggcgtgagatcgcccacatctggcggccagatgctggtgttcgtcccgccgcacccgctcataaagcattgggtctccgtgctgcgcaacgaacagacaccctgcgtcatcttcagtgagtgcttctgagtggcttagtataggttggatatagtagcaattgaacaccactgtgtgggtattattagttggtggaccgaattttgtttgatcattgttggtactgtgggtgaagtcatagctaaataaacgaggcaataaatgagctcatgataggatttcactgagcttttgttcgatgctgtgatagagagtgccatggcagagcttggtcggctgctcatatacgaagcatccagagattggttgcctacaatcacaggagagattgagacacctgtagctgtagctagcgtagaatttattgatccaagagagcctgttctgcatgtctaacaggttattccaatactgagagctggtcttgcactagctgaacttgcttcatcagttctgccagccaccaagacttaccacctcggctttcgtagggatgaagaaacgcttcaaccttcaatatacctgaacaacctgccagacaagattccagagggtactcgtgtgctagttgttgacccaatgctggccactggtgggacaatggttgctgctattgacttgttaatcgagtgcggagttactagcaagcagattaaagttatatctgctattgcatcacctcctgccctgcaaaagctcaataacaagttccctgggctccacgtgtacacaggaatgattgatccagaagtaaatgagaaaggttttatagttccaggactgggggatgctggcgacagaagctttgccacataatcagactgcccaatttgattgggtcagtgttcgacctgcgagaatctttgcttgagtttcacagaaacggagcgactgccagtagcagtgtttattgctgtagattactttcgtttgagattttgttccttttttcagtgttatcagctgcctaccattttgtagcacccattctgtatgattgtgtagaatacaaggctagttcaaatgtccccagatggtaaaatgctcgagagaacaaggttccgttcaaaatgacggattattgaagtttctgctctctaatattttgccagtcgatggaataaacatacgtcattgtgcttaa

SEQ ID NO: 59729 - DNA, 1835 bp, Zea Mays
aaaaaatgaaaaccatatagaacgtcgttcgcgaccccaccgtatccccctccctcgccccctcactgctctcgctttcgctcgccatccgccgtcccgctccgcacaccggccctgcccgatgccttcgcccgccgcggccgcggcggcgcctttccaccgcatcgcatgcgcgcgtcagcacctccctcaaacccgtctcttcttcctcccatcccgcgcgctgctcaaatccgaccgcctcaccgtcccggctccgctgcgcgtccacgcgctgaggctgcctccgacggtgccacgggcggcaagccacgatgccgccacgggcgtgagatcgcccacatctggcggccagatgctggtgttcgtcccgccgcacccgctcataaagcattgggtctccgtgctgcgcaacgaacagacaccctgcgtcatcttcaagagtgccatggcagagcttggtcggctgctcatatacgaagcatccagagattggttggtaagttgaaatcttttgcctggttgatcatttttctgttattcttctttctcttctaatgttaacattaagctgtgctagtgaagtcggagtaaagctaagctgtaacatggtatgggcaattatatttgtagggaagaatattgagtgtaatatatgaatcaaaattcatcacaattttttagaagtcttcatggtcacttcttagtttcctcatgtactttaatcaaacatgtagctatgtatcgtttctgagaatactgaccacaacaccaaggcatgaacatgtttcctcatctttctatatcacgaacaatgtgttgcgccataaaaagatgtttggatcagtcattattagacagggcaatcaactcaatgaatagaacaccaggaatcgtgataaaccgttctgaacccttgcagcctacaatcacaggagagattgagacacctgtagctgtagctagcgtagaatttattgatccaagagagcctgttctggtaagtctgtttcttaacactagatattgtacatgtcatttgtagtgtatctacaattatatttagtctttctactagcatgtctaacaggttattccaatactgagagctggtcttgcactagctgaacttgcttcatcagttctgccagccaccaagacttaccacctcggctttcgtagggatgaagaaacgcttcaaccttcaatatacctgaacaacctgccagacaagattccagagggtactcgtgtgctagttgttgacccaatgctggccactggtgggacaatggttgctgctattgacttgttaatcgagtgcggagttactagcaagcagattaaagttatatctgctattgcatcacctcctgccctgcaaaagctcaataacaagttccctgggctccacgtgtacacaggaatgattgatccagaagtaaatgagaaaggttttatagttccaggactgggggatgctggcgacagaagctttgccacataatcagactgcccaatttgattgggtcagtgttcgacctgcgagaatctttgcttgagtttcacagaaacggagcgactgccagtagcagtgtttattgctgtagattactttcgtttgagattttgttccttttttcagtgttatcagctgcctaccattttgtagcacccattctgtatgattgtgtagaatacaaggctagttcaaatgtccccagatggtaaaatgctcgagagaacaaggttccgttcaaaatgacggattattgaagtttctgctctctaatattttgccagtcgatggaataaacatacgtcattgtgcttaa

SEQ ID NO: 59730 - DNA, 1320 bp, Zea Mays
aaaaaatgaaaaccatatagaacgtcgttcgcgaccccaccgtatccccctccctcgccccctcactgctctcgctttcgctcgccatccgccgtcccgctccgcacaccggccctgcccgatgccttcgcccgccgcggccgcggcggcgcctttccaccgcatcgcatgcgcgcgtcagcacctccctcaaacccgtctcttcttcctcccatcccgcgcgctgctcaaatccgaccgcctcaccgtcccggctccgctgcgcgtccacgcgctgaggctgcctccgacggtgccacgggcggcaagccacgatgccgccacgggcgtgagatcgcccacatctggcggccagatgctggtgttcgtcccgccgcacccgctcataaagcattgggtctccgtgctgcgcaacgaacagacaccctgcgtcatcttcaagtgccatggcagagcttggtcggctgctcatatacgaagcatccagagattggttgcctacaatcacaggagagattgagacacctgtagctgtagctagcgtagaatttattgatccaagagagcctgttctggttattccaatactgagagctggtcttgcactagctgaacttgcttcatcagttctgccagccaccaagacttaccacctcggctttcgtagggatgaagaaacgcttcaaccttcaatatacctgaacaacctgccagacaagattccagagggtactcgtgtgctagttgttgacccaatgctggccactggtgggacaatggttgctgctattgacttgttaatcgagtgcggagttactagcaagcagattaaagttatatctgctattgcatcacctcctgccctgcaaaagctcaataacaagttccctgggctccacgtgtacacaggaatgattgatccagaagtaaatgagaaaggttttatagttccaggactgggggatgctggcgacagaagctttgccacataatcagactgcccaatttgattgggtcagtgttcgacctgcgagaatctttgcttgagtttcacagaaacggagcgactgccagtagcagtgtttattgctgtagattactttcgtttgagattttgttccttttttcagtgttatcagctgcctaccattttgtagcacccattctgtatgattgtgtagaatacaaggctagttcaaatgtccccagatggtaaaatgctcgagagaacaaggttccgttcaaaatgacggattattgaagtttctgctctctaatattttgccagtcgatggaataaacatacgtcattgtgcttaa

SEQ ID NO: 59731 - DNA, 1540 bp, Zea Mays
cgctgctgcaacaatcaggcattcactagggcgcaaccagatcacgcacaggctggtcgctcgaccacccccacgctttgctctctcgctgcctgccccctcccaggacccaggtccagcgagcgggcctctgctccttccgcccgctgaatctagggagcgcgagctcttcttaaacgggcgcacgccgcgtgcgcgcccgacccgcttgccccgcgctcggacgcgtcccgatgcgcctccgccggccggaaaaaccctactagtcctagggctcgcctcgccgccctgatggggggccggccggggtacctcaccctgccgatcttttccgtggtcgcggcgatcgggtacgtctactacaccacggtgttcgtggccgtgccgcggtggctgggcctgtccacggctgcgggggtagccaacgccgccgcgttcacagcgctagcagctgcctgcctcgccacctacgccgtcgccgttcgcagggaccccgggcgggtgcccccgggtttcgtgcccgacgtcgaggacgccgagagcaccgtccacgagatcaagcgcaagggtggtgacttgagatattgccagaaatgttgccactataaacctccacgtgcacaccattgccgtgtttgcaagagatgtgttctgaaaatggaccatcattgcatttggattaataactgtgttggacatgagaactacaagattttcttggtctttgtattatatgctgtggttgcaagcttctatgcattgggagcgttttgcatagtgttcctaaagatgagcagccaggcagcgattcttctcgaacatccatttaccatgaaggagttagagcgatgtggttggcagaaaaaggtggagacctctatcatcatccatatgaccttggtgtctatgagaatcttatttcagttcttgggcctaacatattttgctggctctgccctgtattgaatactgttggaaatggccttcggtaccgtacatcctatgatattccggtatctacaccaccaaaaaaaatagcagcacattcacaataggtagtagttgctaatttgtgaaaggatttcccattaagctgctagaacgtgtttggtctgaacgattccgaaggcaggtcgtgtaactctgcaacatacaggagatgatgactaccacagcctctcgccaggtgtttgtcctgaatcgagacatgaactcttaaccttgttttttatttcattcttgacatacttgataatgtctcgcttgtaatctggagtaggctgttcttaccaaaaagaaaaaaaaactgcaattctgttgtaaagttagttcgtatgtttgggggccatgtaatgtagccaagggccatgaaaccgattttcccagagtatttgtgtacatttgtttaaaatgaaatgtaacatctggtgtacttttgcgcgcctaggcatacgtaggtaaccactgagagctacttcagggctttcggttatctccatcgaggagattggtatgaattggaagaaattttgacttatta

SEQ ID NO: 59732 - DNA, 1480 bp, Zea Mays
cgctttgctctctcgctgcctgccccctcccaggacccaggtccagcgagcgggcctctgctccttccgcccgctgaatctagggagcgcgagctcttcttaaacgggcgcacgccgcgtgcgcgcccgacccgcttgccccgcgctcggacgcgtcccgatgcgcctccgccggccggaaaaaccctactagtcctagggctcgcctcgccgccctgatggggggccggccggggtacctcaccctgccgatcttttccgtggtcgcggcgatcgggtacgtctactacaccacggtgttcgtggccgtgccgcggtggctgggcctgtccacggctgcgggggtagccaacgccgccgcgttcacagcgctagcagctgcctgcctcgccacctacgccgtcgccgttcgcagggaccccgggcgggtgcccccgggtttcgtgcccgacgtcgaggacgccgagagcaccgtccacgagatcaagcgcaagggtggtgacttgagatattgccagaaatgttgccactataaacctccacgtgcacaccattgccgtgtttgcaagagatgtgttctgaaaatggaccatcattgcatttggattaataactgtgttggacatgagaactacaagattttcttggtctttgtattatatgctgtggttgcaagcttctatgcattgattctgatcgtagggagcgttttgcatagtgttcctaaagatgagcagccaggcagcgattcttctcgaacatccatttaccatgaaggagttagagcgatgtggttggcagaaaaaggtggagacctctatcatcatccatatgaccttggtgtctatgagaatcttatttcagttcttgggcctaacatattttgctggctctgccctgtattgaatactgttggaaatggccttcggtaccgtacatcctatgatattccggtatctacaccaccaaaaaaaatagcagcacattcacaataggtagtagttgctaatttgtgaaaggatttcccattaagctgctagaacgtgtttggtctgaacgattccgaaggcaggtcgtgtaactctgcaacatacaggagatgatgactaccacagcctctcgccaggtgtttgtcctgaatcgagacatgaactcttaaccttgttttttatttcattcttgacatacttgataatgtctcgcttgtaatctggagtaggctgttcttaccaaaaagaaaaaaaaactgcaattctgttgtaaagttagttcgtatgtttgggggccatgtaatgtagccaagggccatgaaaccgattttcccagagtatttgtgtacatttgtttaaaatgaaatgtaacatctggtgtacttttgcgcgcctaggcatacgtaggtaaccactgagagctacttcagggctttcggttatctccatcgaggagattggtatgaattggaagaaattttgacttatta

SEQ ID NO: 59733 - DNA, 1125 bp, Zea Mays
cttcctcaaagcttagaaaatgcgattctgatgcagcttgggtggtgacttgagatattgccagaaatgttgccactataaacctccacgtgcacaccattgccgtgtttgcaagagatgtgttctgaaaatggaccatcattgcatttggattaataactgtgttggacatgagaactacaagattttcttggtctttgtattatatgctgtggttgcaagcttctatgcattgattctgatcgtagggagcgttttgcatagtgttcctaaagatgagcagccaggcagcgattcttctcgaacatccattattatctgtggggtcattctttctccattagcgttagcgctggcagtgctcttaggttggcatatttacctcatattacagaataaaactacaattgagtaccatgaaggagttagagcgatgtggttggcagaaaaaggtggagacctctatcatcatccatatgaccttggtgtctatgagaatcttatttcagttcttgggcctaacatattttgctggctctgccctgtattgaatactgttggaaatggccttcggtaccgtacatcctatgatattccggtatctacaccaccaaaaaaaatagcagcacattcacaataggtagtagttgctaatttgtgaaaggatttcccattaagctgctagaacgtgtttggtctgaacgattccgaaggcaggtcgtgtaactctgcaacatacaggagatgatgactaccacagcctctcgccaggtgtttgtcctgaatcgagacatgaactcttaaccttgttttttatttcattcttgacatacttgataatgtctcgcttgtaatctggagtaggctgttcttaccaaaaagaaaaaaaaactgcaattctgttgtaaagttagttcgtatgtttgggggccatgtaatgtagccaagggccatgaaaccgattttcccagagtatttgtgtacatttgtttaaaatgaaatgtaacatctggtgtacttttgcgcgcctaggcatacgtaggtaaccactgagagctacttcagggctttcggttatctccatcgaggagattggtatgaattggaagaaattttgacttatta

SEQ ID NO: 59734 - DNA, 3636 bp, Zea Mays
atgcagggacatgcgtacagccgcctgggtagcttcggcgccgcggcgttcccgccgccgccgccttcatccccggggccggctggggccggcgctggcgggggcagctggacgcccgcgaaggcgggttcggcgaggcgtggcggcggtgtagcgcggagggtggccagggcggtgctcgcgacactgctgcggcggcaggcggtgttcctcttcgcgccgctgctatacgtcgccgcgatgctgctatacatgggatcgctcccgctcgacgccgtgccgcggataatcgcgcgccaaccgctcgggtcggtgtaccgcagcccgcaactgtacaggcggctccgcgccgacatggacgccgacaactccaccggcgcgctagcaactgtatggaggcacacttacataggtggcacatggaggccctgcataaacaacatgacaaatggtttacctgaatcaaatggctacatatacgttgaggcaaatggcggtttaaatcaacaaaggacatcgatatgcaatgcagtcgccattgctggttttctgaatgctactcttatcattccaaattttcatttccatagcatttggagggatcctagcaaattcagtgatatctatgataaagatcactttgtacaacgtctacaaaatgatgttcgagtagttgacaaaattccagattttataatggagcagtttggtcataatctgagcaatgtgttcaatttcaagataaaggcttgggcacgcattcgatattacaacgatgttgttcttccaaaattagttgaagaaaggcgagtttaaatacagttcagttactactttgtggtttctgttgggtttcaactctagcttgctccaacttgtttgggactaaggaggtgtttggcacggctccagagcaaaattccaaagaagagctggctagagccaaccaaacatctcaactccagagttacaaactttatggggttttgggagctgcagtacaaatttttggaataccacatttgctgctccgaaatccaaaaaaacttcagagctgctccatcctggagttttagagcagagttgctctgggttaaagcggagccatgccaaacaccccgtaaaaggctttgttgttattgtacttgaattcttctagtatatggcaccaaaaaacaattccttcgatggcaaccttaaaaacagtaggaggatttgggattgtggcacctgtggttggtttttgggtagttgcagtggttggcagcccatcgagttgggtctgagcagagccaggttacaatgcagctccatagggtgaagcggggctcagaagttttatcggttggtttgacttacattgtttctcggagtaaagactgtgggggcggtcttcccccattggccaagtattatatgagttcatgttatattcagccatccgttgcttacattccatatgattactaatccaaatgttatagctttattaattggtaacagaacctctgtatctgattactatcatttactgtagaatagagagcacttgtagtatgttggatatgaatttgatattaaacttaacatggaaatctgtaaaaacaaatatgatatatttgtgactactacaacctttttattggacttgctatgatattgatatatagtcgacgtaggatatcctatattaaaaatacattagtgatgtttggagcatctcttcagctatatcctcttaaatttattctagaagcataatacccctttattcctgaaacttatctgcagccaccattttctctgacctgatcaattatttcattctttgccatcaaaagtttctgtgacctgttgcttgtggaagctgattatcgaggactactgaattgttgacactccctttaatgatggaattagattcatcaggatttctccttttgccaatcgactctcatttgatgcaccttttgctgttcaacggttgagatgcctggcaaactttgaagccttaaaattttctaaaccaattgtatctttgtctgaaaccttaatttctcgaatgagagagagaagtgttgaaagtgatggaaaatatatctcagtgcatcttcgttttgaggaggatatgattgccttctcatgttgtgtatatgatggtggtgatgaggagaagaaggaaatggatgcagccagagaaataggttggagagggaaatttactaagagaggacgtgtaataaggccaggaattattagaatgaatggaaaatgtcctcttacacctttggaggttgggttaatgcttcgtggaatgggtttcagcaataagactgcaatctttttggcatctggaaagatttacaaagcagagaagaacatggcttctcttcttgaaatgtttcctctcctacagacaaaagagacactggcatcagaagaggaacttgctccatttaagaatttctcctcaaggatggctgctgttgactatagtatttgtgcccaaagtgaagtttttgtgaccacacaaggtggaaatttcccgcattttcttatgggtcacaggagatacttgtatggtgggcattcaaaaacaattaaaccagacaaaagaaggcttgctgtactcttggataatccacgtatagggtggaaggcattgaagcggcacttgcttaatatgagagcacacagtgatgccaaggggatcgaaatgaaaagaccaaacgaatctatatataccttcccgtgtcctgactgcatgtgccgcttgaacagaacagaacactcgaaatccaaacagagtagatagtatctcgtagttgcatttccagactaaccctattctttctgacatccagtttagtttgttcattcttcatatgccgtgcggcttttcatcacttcatctgccagcatacttgccagttctcacagcattgaaagcaatctgttctcccaatgtagcggtttttcccttgtattattgtatagcatatgctgctagaatggaaactccagattcctccgtggagtattagaccaatttgtgatgctaagttgctaactacatcaactgactataatcctcaacaacggatctgactccagtaggatactatccattgtcaatgaagtatcaaatggttttgggtggtattactgttgtacatggttcattagcagactgtcatcatgtacaaattttgaatggaagtcagccattgtaaaaaaaaatctcctcttgcccaaaaatgggcattgtttacaatagcctccctgtattcttttagctaggttgtctgttcacaattctaagaatgaaagctgcccagtagaacatgattcttgcttcatcagtatagaggcattgtatctgcttatttgcaatgatgtgtccaaaagctgcttgttgtagataaaaatgtgatgaaccaaaaccgttgaacgcagaatacagatatataagcaagtatcttccccttccaacttcatcctctctttccctgatggtgtgcagcgacggacggacgtgcgacaaaggtggcgcaggcgcgcgacaggggcacgtcccacggcggcgctcggccggtgcgtgtctccgcagcgccgatggcaacgctggtgcgctcg

SEQ ID NO: 59735 - DNA, 2604 bp, Zea Mays
atgcagggacatgcgtacagccgcctgggtagcttcggcgccgcggcgttcccgccgccgccgccttcatccccggggccggctggggccggcgctggcgggggcagctggacgcccgcgaaggcgggttcggcgaggcgtggcggcggtgtagcgcggagggtggccagggcggtgctcgcgacactgctgcggcggcaggcggtgttcctcttcgcgccgctgctatacgtcgccgcgatgctgctatacatgggatcgctcccgctcgacgccgtgccgcggataatcgcgcgccaaccgctcgggtcggtgtaccgcagcccgcaactgtacaggcggctccgcgccgacatggacgccgacaactccaccggcgcgagaaaacaaatgaatctcaaatgatacgatgcaaaaatgtgggtgaatggaccaagacactgaattctaaatgagccacaagctagcaactgtatggaggcacacttacataggtggcacatggaggccctgcataaacaacatgacaaatggtttacctgaatcaaatggctacatatacgttgaggcaaatggcggtttaaatcaacaaaggacatcgatatgcaatgcagtcgccattgctggttttctgaatgctactcttatcattccaaattttcatttccatagcatttggagggatcctagcaaattcagtgatatctatgataaagatcactttgtacaacgtctacaaaatgatgttcgagtagttgacaaaattccagattttataatggagcagtttggtcataatctgagcaatgtgttcaatttcaagataaaggcttgggcacgcattcgatattacaacgatgttgttcttccaaaattagttgaagaaagattcatcaggatttctccttttgccaatcgactctcatttgatgcaccttttgctgttcaacggttgagatgcctggcaaactttgaagccttaaaattttctaaaccaattgtatctttgtctgaaaccttaatttctcgaatgagagagagaagtgttgaaagtgatggaaaatatatctcagtgcatcttcgttttgaggaggatatgattgccttctcatgttgtgtatatgatggtggtgatgaggagaagaaggaaatggatgcagccagagaaataggttggagagggaaatttactaagagaggacgtgtaataaggccaggaattattagaatgaatggaaaatgtcctcttacacctttggaggttgggttaatgcttcgtggaatgggtttcagcaataagactgcaatctttttggcatctggaaagatttacaaagcagagaagaacatggcttctcttcttgaaatgtttcctctcctacagacaaaagagacactggcatcagaagaggaacttgctccatttaagaatttctcctcaaggatggctgctgttgactatagtatttgtgcccaaagtgaagtttttgtgaccacacaaggtggaaatttcccgcattttcttatgggtcacaggagatacttgtatggtgggcattcaaaaacaattaaaccagacaaaagaaggcttgctgtactcttggataatccacgtatagggtggaaggcattgaagcggcacttgcttaatatgagagcacacagtgatgccaaggggatcgaaatgaaaagaccaaacgaatctatatataccttcccgtgtcctgactgcatgtgccgcttgaacagaacagaacactcgaaatccaaacagagtagatagtatctcgtagttgcatttccagactaaccctattctttctgacatccagtttagtttgttcattcttcatatgccgtgcggcttttcatcacttcatctgccagcatacttgccagttctcacagcattgaaagcaatctgttctcccaatgtagcggtttttcccttgtattattgtatagcatatgctgctagaatggaaactccagattcctccgtggagtattagaccaatttgtgatgctaagttgctaactacatcaactgactataatcctcaacaacggatctgactccagtaggatactatccattgtcaatgaagtatcaaatggttttgggtggtattactgttgtacatggttcattagcagactgtcatcatgtacaaattttgaatggaagtcagccattgtaaaaaaaaatctcctcttgcccaaaaatgggcattgtttacaatagcctccctgtattcttttagctaggttgtctgttcacaattctaagaatgaaagctgcccagtagaacatgattcttgcttcatcagtatagaggcattgtatctgcttatttgcaatgatgtgtccaaaagctgcttgttgtagataaaaatgtgatgaaccaaaaccgttgaacgcagaatacagatatataagcaagtatcttccccttccaacttcatcctctctttccctgatggtgtgcagcgacggacggacgtgcgacaaaggtggcgcaggcgcgcgacaggggcacgtcccacggcggcgctcggccggtgcgtgtctccgcagcgccgatggcaacgctggtgcgctcg

SEQ ID NO: 59736 - DNA, 3661 bp, Zea Mays
atgcagggacatgcgtacagccgcctgggtagcttcggcgccgcggcgttcccgccgccgccgccttcatccccggggccggctggggccggcgctggcgggggcagctggacgcccgcgaaggcgggttcggcgaggcgtggcggcggtgtagcgcggagggtggccagggcggtgctcgcgacactgctgcggcggcaggcggtgttcctcttcgcgccgctgctatacgtcgccgcgatgctgctatacatgggatcgctcccgctcgacgccgtgccgcggataatcgcgcgccaaccgctcgggtcggtgtaccgcagcccgcaactgtacaggcggctccgcgccgacatggacgccgacaactccaccggcgcgctagcaactgtatggaggcacacttacataggtggcacatggaggccctgcataaacaacatgacaaatggtttacctgaatcaaatggctacatatacgttgaggcaaatggcggtttaaatcaacaaaggacatcgatatgcaatgcagtcgccattgctggttttctgaatgctactcttatcattccaaattttcatttccatagcatttggagggatcctagcaaattcagtgatatctatgataaagatcactttgtacaacgtctacaaaatgatgttcgagtagttgacaaaattccagattttataatggagcagtttggtcataatctgagcaatgtgttcaatttcaagataaaggcttgggcacgcattcgatattacaacgatgttgttcttccaaaattagttgaagaaaggcgagtttaaatacagttcagttactactttgtggtttctgttgggtttcaactctagcttgctccaacttgtttgggactaaggaggtgtttggcacggctccagagcaaaattccaaagaagagctggctagagccaaccaaacatctcaactccagagttacaaactttatggggttttgggagctgcagtacaaatttttggaataccacatttgctgctccgaaatccaaaaaaacttcagagctgctccatcctggagttttagagcagagttgctctgggttaaagcggagccatgccaaacaccccgtaaaaggctttgttgttattgtacttgaattcttctagtatatggcaccaaaaaacaattccttcgatggcaaccttaaaaacagtaggaggatttgggattgtggcacctgtggttggtttttgggtagttgcagtggttggcagcccatcgagttgggtctgagcagagccaggttacaatgcagctccatagggtgaagcggggctcagaagttttatcggttggtttgacttacattgtttctcggagtaaagactgtgggggcggtcttcccccattggccaagtattatatgagttcatgttatattcagccatccgttgcttacattccatatgattactaatccaaatgttatagctttattaattggtaacagaacctctgtatctgattactatcatttactgtagaatagagagcacttgtagtatgttggatatgaatttgatattaaacttaacatggaaatctgtaaaaacaaatatgatatatttgtgactactacaacctttttattggacttgctatgatattgatatatagtcgacgtaggatatcctatattaaaaatacattagtgatgtttggagcatctcttcagctatatcctcttaaatttattctagaagcataatacccctttattcctgaaacttatctgcagccaccattttctctgacctgatcaattatttcattctttgccatcaaaagtttctgtgacctgttgcttgtggaagctgattatcgaggactactgaattgttgacactccctttaatgatggaattagattcatcaggatttctccttttgccaatcgactctcatttgatgcaccttttgctgttcaacggttgagatgcctggcaaactttgaagccttaaaattttctaaaccaattgtatctttgtctgaaaccttaatttctcgaatgagagagagaagtgttgaaagtgatggaaaatatatctcagtgcatcttcgttttgaggaggatatgattgccttctcatgttgtgtatatgatggtggtgatgaggagaagaaggaaatggatgcagccagagaaataggttggagagggaaatttactaagagaggacgtgtaataaggccaggaattattagaatgaatggaaaatgtcctcttacacctttggaggtatgtcaggatctaaaagcagaaggttgggttaatgcttcgtggaatgggtttcagcaataagactgcaatctttttggcatctggaaagatttacaaagcagagaagaacatggcttctcttcttgaaatgtttcctctcctacagacaaaagagacactggcatcagaagaggaacttgctccatttaagaatttctcctcaaggatggctgctgttgactatagtatttgtgcccaaagtgaagtttttgtgaccacacaaggtggaaatttcccgcattttcttatgggtcacaggagatacttgtatggtgggcattcaaaaacaattaaaccagacaaaagaaggcttgctgtactcttggataatccacgtatagggtggaaggcattgaagcggcacttgcttaatatgagagcacacagtgatgccaaggggatcgaaatgaaaagaccaaacgaatctatatataccttcccgtgtcctgactgcatgtgccgcttgaacagaacagaacactcgaaatccaaacagagtagatagtatctcgtagttgcatttccagactaaccctattctttctgacatccagtttagtttgttcattcttcatatgccgtgcggcttttcatcacttcatctgccagcatacttgccagttctcacagcattgaaagcaatctgttctcccaatgtagcggtttttcccttgtattattgtatagcatatgctgctagaatggaaactccagattcctccgtggagtattagaccaatttgtgatgctaagttgctaactacatcaactgactataatcctcaacaacggatctgactccagtaggatactatccattgtcaatgaagtatcaaatggttttgggtggtattactgttgtacatggttcattagcagactgtcatcatgtacaaattttgaatggaagtcagccattgtaaaaaaaaatctcctcttgcccaaaaatgggcattgtttacaatagcctccctgtattcttttagctaggttgtctgttcacaattctaagaatgaaagctgcccagtagaacatgattcttgcttcatcagtatagaggcattgtatctgcttatttgcaatgatgtgtccaaaagctgcttgttgtagataaaaatgtgatgaaccaaaaccgttgaacgcagaatacagatatataagcaagtatcttccccttccaacttcatcctctctttccctgatggtgtgcagcgacggacggacgtgcgacaaaggtggcgcaggcgcgcgacaggggcacgtcccacggcggcgctcggccggtgcgtgtctccgcagcgccgatggcaacgctggtgcgctcg

SEQ ID NO: 59737 - DNA, 2324 bp, Zea Mays
atgcagggacatgcgtacagccgcctgggtagcttcggcgccgcggcgttcccgccgccgccgccttcatccccggggccggctggggccggcgctggcgggggcagctggacgcccgcgaaggcgggttcggcgaggcgtggcggcggtgtagcgcggagggtggccagggcggtgctcgcgacactgctgcggcggcaggcggtgttcctcttcgcgccgctgctatacgtcgccgcgatgctgctatacatgggatcgctcccgctcgacgccgtgccgcggataatcgcgcgccaaccgctcgggtcggtgtaccgcagcccgcaactgtacaggcggctccgcgccgacatggacgccgacaactccaccggcgcgctagcaactgtatggaggcacacttacataggtggcacatggaggccctgcataaacaacatgacaaatggtttacctgaatcaaatggctacatatacgttgaggcaaatggcggtttaaatcaacaaaggacatcgatatgcaatgcagtcgccattgctggttttctgaatgctactcttatcattccaaattttcatttccatagcatttggagggatcctagattcatcaggatttctccttttgccaatcgactctcatttgatgcaccttttgctgttcaacggttgagatgcctggcaaactttgaagccttaaaattttctaaaccaattgtatctttgtctgaaaccttaatttctcgaatgagagagagaagtgttgaaagtgatggaaaatatatctcagtgcatcttcgttttgaggaggatatgattgccttctcatgttgtgtatatgatggtggtgatgaggagaagaaggaaatggatgcagccagagaaataggttggagagggaaatttactaagagaggacgtgtaataaggccaggaattattagaatgaatggaaaatgtcctcttacacctttggaggttgggttaatgcttcgtggaatgggtttcagcaataagactgcaatctttttggcatctggaaagatttacaaagcagagaagaacatggcttctcttcttgaaatgtttcctctcctacagacaaaagagacactggcatcagaagaggaacttgctccatttaagaatttctcctcaaggatggctgctgttgactatagtatttgtgcccaaagtgaagtttttgtgaccacacaaggtggaaatttcccgcattttcttatgggtcacaggagatacttgtatggtgggcattcaaaaacaattaaaccagacaaaagaaggcttgctgtactcttggataatccacgtatagggtggaaggcattgaagcggcacttgcttaatatgagagcacacagtgatgccaaggggatcgaaatgaaaagaccaaacgaatctatatataccttcccgtgtcctgactgcatgtgccgcttgaacagaacagaacactcgaaatccaaacagagtagatagtatctcgtagttgcatttccagactaaccctattctttctgacatccagtttagtttgttcattcttcatatgccgtgcggcttttcatcacttcatctgccagcatacttgccagttctcacagcattgaaagcaatctgttctcccaatgtagcggtttttcccttgtattattgtatagcatatgctgctagaatggaaactccagattcctccgtggagtattagaccaatttgtgatgctaagttgctaactacatcaactgactataatcctcaacaacggatctgactccagtaggatactatccattgtcaatgaagtatcaaatggttttgggtggtattactgttgtacatggttcattagcagactgtcatcatgtacaaattttgaatggaagtcagccattgtaaaaaaaaatctcctcttgcccaaaaatgggcattgtttacaatagcctccctgtattcttttagctaggttgtctgttcacaattctaagaatgaaagctgcccagtagaacatgattcttgcttcatcagtatagaggcattgtatctgcttatttgcaatgatgtgtccaaaagctgcttgttgtagataaaaatgtgatgaaccaaaaccgttgaacgcagaatacagatatataagcaagtatcttccccttccaacttcatcctctctttccctgatggtgtgcagcgacggacggacgtgcgacaaaggtggcgcaggcgcgcgacaggggcacgtcccacggcggcgctcggccggtgcgtgtctccgcagcgccgatggcaacgctggtgcgctcg

SEQ ID NO: 59738 - DNA, 2218 bp, Zea Mays
cgatgcaaaaatgtgggtgaatggaccaagacactgaattctaaatgagccacaagcaactgtatggaggcacacttacataggtggcacatggaggccctgcataaacaacatgacaaatggtttacctgaatcaaatggctacatatacgttgaggcaaatggcggtttaaatcaacaaaggacatcgatatgcaatgcagtcgccattgctggttttctgaatgctactcttatcattccaaattttcatttccatagcatttggagggatcctagcaaattcagtgatatctatgataaagatcactttgtacaacgtctacaaaatgatgttcgagtagttgacaaaattccagattttataatggagcagtttggtcataatctgagcaatgtgttcaatttcaagataaaggcttgggcacgcattcgatattacaacgatgttgttcttccaaaattagttgaagaaagattcatcaggatttctccttttgccaatcgactctcatttgatgcaccttttgctgttcaacggttgagatgcctggcaaactttgaagccttaaaattttctaaaccaattgtatctttgtctgaaaccttaatttctcgaatgagagagagaagtgttgaaagtgatggaaaatatatctcagtgcatcttcgttttgaggaggatatgattgccttctcatgttgtgtatatgatggtggtgatgaggagaagaaggaaatggatgcagccagagaaataggttggagagggaaatttactaagagaggacgtgtaataaggccaggaattattagaatgaatggaaaatgtcctcttacacctttggaggtatgtcaggatctaaaagcagaaggttgggttaatgcttcgtggaatgggtttcagcaataagactgcaatctttttggcatctggaaagatttacaaagcagagaagaacatggcttctcttcttgaaatgtttcctctcctacagacaaaagagacactggcatcagaagaggaacttgctccatttaagaatttctcctcaaggatggctgctgttgactatagtatttgtgcccaaagtgaagtttttgtgaccacacaaggtggaaatttcccgcattttcttatgggtcacaggagatacttgtatggtgggcattcaaaaacaattaaaccagacaaaagaaggcttgctgtactcttggataatccacgtatagggtggaaggcattgaagcggcacttgcttaatatgagagcacacagtgatgccaaggggatcgaaatgaaaagaccaaacgaatctatatataccttcccgtgtcctgactgcatgtgccgcttgaacagaacagaacactcgaaatccaaacagagtagatagtatctcgtagttgcatttccagactaaccctattctttctgacatccagtttagtttgttcattcttcatatgccgtgcggcttttcatcacttcatctgccagcatacttgccagttctcacagcattgaaagcaatctgttctcccaatgtagcggtttttcccttgtattattgtatagcatatgctgctagaatggaaactccagattcctccgtggagtattagaccaatttgtgatgctaagttgctaactacatcaactgactataatcctcaacaacggatctgactccagtaggatactatccattgtcaatgaagtatcaaatggttttgggtggtattactgttgtacatggttcattagcagactgtcatcatgtacaaattttgaatggaagtcagccattgtaaaaaaaaatctcctcttgcccaaaaatgggcattgtttacaatagcctccctgtattcttttagctaggttgtctgttcacaattctaagaatgaaagctgcccagtagaacatgattcttgcttcatcagtatagaggcattgtatctgcttatttgcaatgatgtgtccaaaagctgcttgttgtagataaaaatgtgatgaaccaaaaccgttgaacgcagaatacagatatataagcaagtatcttccccttccaacttcatcctctctttccctgatggtgtgcagcgacggacggacgtgcgacaaaggtggcgcaggcgcgcgacaggggcacgtcccacggcggcgctcggccggtgcgtgtctccgcagcgccgatggcaacgctggtgcgctcg

SEQ ID NO: 59739 - DNA, 2293 bp, Zea Mays
ctgaattctaaatgagccacaagctagcaactgtatggaggcacacttacataggtggcacatggaggccctgcataaacaacatgacaaatggtttacctgaatcaaatggctacatatacgttgaggcaaatggcggtttaaatcaacaaaggacatcgatatgcaatgcagtcgccattgctggttttctgaatgctactcttatcattccaaattttcatttccatagcatttggagggatcctagcaaattcagtgatatctatgataaagatcactttgtacaacgtctacaaaatgatgttcgagtagttgacaaaattccagattttataatggagcagtttggtcataatctgagcaatgtgttcaatttcaagataaaggcttgggcacgcattcgatattacaacgatgttgttcttccaaaattagttgaagaaagccaccattttctctgacctgatcaattatttcattctttgccatcaaaagtttctgtgacctgttgcttgtggaagctgattatcgaggactactgaattgttgacactccctttaatgatggaattagattcatcaggatttctccttttgccaatcgactctcatttgatgcaccttttgctgttcaacggttgagatgcctggcaaactttgaagccttaaaattttctaaaccaattgtatctttgtctgaaaccttaatttctcgaatgagagagagaagtgttgaaagtgatggaaaatatatctcagtgcatcttcgttttgaggaggatatgattgccttctcatgttgtgtatatgatggtggtgatgaggagaagaaggaaatggatgcagccagagaaataggttggagagggaaatttactaagagaggacgtgtaataaggccaggaattattagaatgaatggaaaatgtcctcttacacctttggaggttgggttaatgcttcgtggaatgggtttcagcaataagactgcaatctttttggcatctggaaagatttacaaagcagagaagaacatggcttctcttcttgaaatgtttcctctcctacagacaaaagagacactggcatcagaagaggaacttgctccatttaagaatttctcctcaaggatggctgctgttgactatagtatttgtgcccaaagtgaagtttttgtgaccacacaaggtggaaatttcccgcattttcttatgggtcacaggagatacttgtatggtgggcattcaaaaacaattaaaccagacaaaagaaggcttgctgtactcttggataatccacgtatagggtggaaggcattgaagcggcacttgcttaatatgagagcacacagtgatgccaaggggatcgaaatgaaaagaccaaacgaatctatatataccttcccgtgtcctgactgcatgtgccgcttgaacagaacagaacactcgaaatccaaacagagtagatagtatctcgtagttgcatttccagactaaccctattctttctgacatccagtttagtttgttcattcttcatatgccgtgcggcttttcatcacttcatctgccagcatacttgccagttctcacagcattgaaagcaatctgttctcccaatgtagcggtttttcccttgtattattgtatagcatatgctgctagaatggaaactccagattcctccgtggagtattagaccaatttgtgatgctaagttgctaactacatcaactgactataatcctcaacaacggatctgactccagtaggatactatccattgtcaatgaagtatcaaatggttttgggtggtattactgttgtacatggttcattagcagactgtcatcatgtacaaattttgaatggaagtcagccattgtaaaaaaaaatctcctcttgcccaaaaatgggcattgtttacaatagcctccctgtattcttttagctaggttgtctgttcacaattctaagaatgaaagctgcccagtagaacatgattcttgcttcatcagtatagaggcattgtatctgcttatttgcaatgatgtgtccaaaagctgcttgttgtagataaaaatgtgatgaaccaaaaccgttgaacgcagaatacagatatataagcaagtatcttccccttccaacttcatcctctctttccctgatggtgtgcagcgacggacggacgtgcgacaaaggtggcgcaggcgcgcgacaggggcacgtcccacggcggcgctcggccggtgcgtgtctccgcagcgccgatggcaacgctggtgcgctcg

SEQ ID NO: 59740 - DNA, 2181 bp, Zea Mays
ggttaggtttacctgaatcaaatggctacatatacgttgaggcaaatggcggtttaaatcaacaaaggacatcgatatgcaatgcagtcgccattgctggttttctgaatgctactcttatcattccaaattttcatttccatagcatttggagggatcctagcaaattcagtgatatctatgataaagatcactttgtacaacgtctacaaaatgatgttcgagtagttgacaaaattccagattttataatggagcagtttggtcataatctgagcaatgtgttcaatttcaagataaaggcttgggcacgcattcgatattacaacgatgttgttcttccaaaattagttgaagaaagtttctgtgacctgttgcttgtggaagctgattatcgaggactactgaattgttgacactccctttaatgatggaattagattcatcaggatttctccttttgccaatcgactctcatttgatgcaccttttgctgttcaacggttgagatgcctggcaaactttgaagccttaaaattttctaaaccaattgtatctttgtctgaaaccttaatttctcgaatgagagagagaagtgttgaaagtgatggaaaatatatctcagtgcatcttcgttttgaggaggatatgattgccttctcatgttgtgtatatgatggtggtgatgaggagaagaaggaaatggatgcagccagagaaataggttggagagggaaatttactaagagaggacgtgtaataaggccaggaattattagaatgaatggaaaatgtcctcttacacctttggaggtatgtcaggatctaaaagcagaaggttgggttaatgcttcgtggaatgggtttcagcaataagactgcaatctttttggcatctggaaagatttacaaagcagagaagaacatggcttctcttcttgaaatgtttcctctcctacagacaaaagagacactggcatcagaagaggaacttgctccatttaagaatttctcctcaaggatggctgctgttgactatagtatttgtgcccaaagtgaagtttttgtgaccacacaaggtggaaatttcccgcattttcttatgggtcacaggagatacttgtatggtgggcattcaaaaacaattaaaccagacaaaagaaggcttgctgtactcttggataatccacgtatagggtggaaggcattgaagcggcacttgcttaatatgagagcacacagtgatgccaaggggatcgaaatgaaaagaccaaacgaatctatatataccttcccgtgtcctgactgcatgtgccgcttgaacagaacagaacactcgaaatccaaacagagtagatagtatctcgtagttgcatttccagactaaccctattctttctgacatccagtttagtttgttcattcttcatatgccgtgcggcttttcatcacttcatctgccagcatacttgccagttctcacagcattgaaagcaatctgttctcccaatgtagcggtttttcccttgtattattgtatagcatatgctgctagaatggaaactccagattcctccgtggagtattagaccaatttgtgatgctaagttgctaactacatcaactgactataatcctcaacaacggatctgactccagtaggatactatccattgtcaatgaagtatcaaatggttttgggtggtattactgttgtacatggttcattagcagactgtcatcatgtacaaattttgaatggaagtcagccattgtaaaaaaaaatctcctcttgcccaaaaatgggcattgtttacaatagcctccctgtattcttttagctaggttgtctgttcacaattctaagaatgaaagctgcccagtagaacatgattcttgcttcatcagtatagaggcattgtatctgcttatttgcaatgatgtgtccaaaagctgcttgttgtagataaaaatgtgatgaaccaaaaccgttgaacgcagaatacagatatataagcaagtatcttccccttccaacttcatcctctctttccctgatggtgtgcagcgacggacggacgtgcgacaaaggtggcgcaggcgcgcgacaggggcacgtcccacggcggcgctcggccggtgcgtgtctccgcagcgccgatggcaacgctggtgcgctcg

SEQ ID NO: 59741 - DNA, 1960 bp, Zea Mays
ctcaactcaaatttgtcttaagtactggaacataccattaactcctcaaattcagtgatatctatgataaagatcactttgtacaacgtctacaaaatgatgttcgagtagttgacaaaattccagattttataatggagcagtttggtcataatctgagcaatgtgttcaatttcaagataaaggcttgggcacgcattcgatattacaacgatgttgttcttccaaaattagttgaagaaagattcatcaggatttctccttttgccaatcgactctcatttgatgcaccttttgctgttcaacggttgagatgcctggcaaactttgaagccttaaaattttctaaaccaattgtatctttgtctgaaaccttaatttctcgaatgagagagagaagtgttgaaagtgatggaaaatatatctcagtgcatcttcgttttgaggaggatatgattgccttctcatgttgtgtatatgatggtggtgatgaggagaagaaggaaatggatgcagccagagaaataggttggagagggaaatttactaagagaggacgtgtaataaggccaggaattattagaatgaatggaaaatgtcctcttacacctttggaggttgggttaatgcttcgtggaatgggtttcagcaataagactgcaatctttttggcatctggaaagatttacaaagcagagaagaacatggcttctcttcttgaaatgtttcctctcctacagacaaaagagacactggcatcagaagaggaacttgctccatttaagaatttctcctcaaggatggctgctgttgactatagtatttgtgcccaaagtgaagtttttgtgaccacacaaggtggaaatttcccgcattttcttatgggtcacaggagatacttgtatggtgggcattcaaaaacaattaaaccagacaaaagaaggcttgctgtactcttggataatccacgtatagggtggaaggcattgaagcggcacttgcttaatatgagagcacacagtgatgccaaggggatcgaaatgaaaagaccaaacgaatctatatataccttcccgtgtcctgactgcatgtgccgcttgaacagaacagaacactcgaaatccaaacagagtagatagtatctcgtagttgcatttccagactaaccctattctttctgacatccagtttagtttgttcattcttcatatgccgtgcggcttttcatcacttcatctgccagcatacttgccagttctcacagcattgaaagcaatctgttctcccaatgtagcggtttttcccttgtattattgtatagcatatgctgctagaatggaaactccagattcctccgtggagtattagaccaatttgtgatgctaagttgctaactacatcaactgactataatcctcaacaacggatctgactccagtaggatactatccattgtcaatgaagtatcaaatggttttgggtggtattactgttgtacatggttcattagcagactgtcatcatgtacaaattttgaatggaagtcagccattgtaaaaaaaaatctcctcttgcccaaaaatgggcattgtttacaatagcctccctgtattcttttagctaggttgtctgttcacaattctaagaatgaaagctgcccagtagaacatgattcttgcttcatcagtatagaggcattgtatctgcttatttgcaatgatgtgtccaaaagctgcttgttgtagataaaaatgtgatgaaccaaaaccgttgaacgcagaatacagatatataagcaagtatcttccccttccaacttcatcctctctttccctgatggtgtgcagcgacggacggacgtgcgacaaaggtggcgcaggcgcgcgacaggggcacgtcccacggcggcgctcggccggtgcgtgtctccgcagcgccgatggcaacgctggtgcgctcg

SEQ ID NO: 59742 - DNA, 2034 bp, Zea Mays
ctcaaatttgtcttaagtactggaacataccattaactcctcaaattcagtgatatctatgataaagatcactttgtacaacgtctacaaaatgatgttcgagtagttgacaaaattccagattttataatggagcagtttggtcataatctgagcaatgtgttcaatttcaagataaaggcttgggcacgcattcgatattacaacgatgttgttcttccaaaattagttgaagaaagtttctgtgacctgttgcttgtggaagctgattatcgaggactactgaattgttgacactccctttaatgatggaattagattcatcaggatttctccttttgccaatcgactctcatttgatgcaccttttgctgttcaacggttgagatgcctggcaaactttgaagccttaaaattttctaaaccaattgtatctttgtctgaaaccttaatttctcgaatgagagagagaagtgttgaaagtgatggaaaatatatctcagtgcatcttcgttttgaggaggatatgattgccttctcatgttgtgtatatgatggtggtgatgaggagaagaaggaaatggatgcagccagagaaataggttggagagggaaatttactaagagaggacgtgtaataaggccaggaattattagaatgaatggaaaatgtcctcttacacctttggaggttgggttaatgcttcgtggaatgggtttcagcaataagactgcaatctttttggcatctggaaagatttacaaagcagagaagaacatggcttctcttcttgaaatgtttcctctcctacagacaaaagagacactggcatcagaagaggaacttgctccatttaagaatttctcctcaaggatggctgctgttgactatagtatttgtgcccaaagtgaagtttttgtgaccacacaaggtggaaatttcccgcattttcttatgggtcacaggagatacttgtatggtgggcattcaaaaacaattaaaccagacaaaagaaggcttgctgtactcttggataatccacgtatagggtggaaggcattgaagcggcacttgcttaatatgagagcacacagtgatgccaaggggatcgaaatgaaaagaccaaacgaatctatatataccttcccgtgtcctgactgcatgtgccgcttgaacagaacagaacactcgaaatccaaacagagtagatagtatctcgtagttgcatttccagactaaccctattctttctgacatccagtttagtttgttcattcttcatatgccgtgcggcttttcatcacttcatctgccagcatacttgccagttctcacagcattgaaagcaatctgttctcccaatgtagcggtttttcccttgtattattgtatagcatatgctgctagaatggaaactccagattcctccgtggagtattagaccaatttgtgatgctaagttgctaactacatcaactgactataatcctcaacaacggatctgactccagtaggatactatccattgtcaatgaagtatcaaatggttttgggtggtattactgttgtacatggttcattagcagactgtcatcatgtacaaattttgaatggaagtcagccattgtaaaaaaaaatctcctcttgcccaaaaatgggcattgtttacaatagcctccctgtattcttttagctaggttgtctgttcacaattctaagaatgaaagctgcccagtagaacatgattcttgcttcatcagtatagaggcattgtatctgcttatttgcaatgatgtgtccaaaagctgcttgttgtagataaaaatgtgatgaaccaaaaccgttgaacgcagaatacagatatataagcaagtatcttccccttccaacttcatcctctctttccctgatggtgtgcagcgacggacggacgtgcgacaaaggtggcgcaggcgcgcgacaggggcacgtcccacggcggcgctcggccggtgcgtgtctccgcagcgccgatggcaacgctggtgcgctcg

SEQ ID NO: 59743 - DNA, 3722 bp, Zea Mays
ctcaccaccccgcctctcgagcgtcaccacctcactcgctctcgctaatccacatccaccctcgagtgctcgctcactcgaacagtggcggcgagatgcggagacagatccctcccgtctcctgcctcgtacccatcgcggtggcgttcgcgctgctcgctgcggcatctgcagcttcgccggcgccggtcaacgtcacggccgtgctctcggcgttcccggacctcaacgacttcacgcggctgctggcgtccagccccgtgctggcggagctcgcagggcggtcgtcgctgacgcttctcgccgtgccgaacggcaacctcccgcagtcgccgtcggcgttcgcggccgcgtcgggcgccgacctcgccgacgttctccgctaccacgtcctcctggagtacctcgcccccgccgacctccgccgcttgcccgcctccgggaagctcgtgaccacgctgttccagaccaccggccgcgcccccgcggacctcggcgccgtgaacgtcaccgcagcgggcgcctccctcgccgtggtccgctcgccggcaccgttcccgggctcgaacgccaccgtcctcggcgccattaccgcggtgccgtacaacctgagcgtgctggcggtgaacggcctcatcgtcccgtccgggttcgacctcgcggcgtccgagtcccgcccgcccgcggccgtcaacatcacccgcgtcctcgccgacgcgcgcgccttcaacgtggcggcgtccatgctcgaggcctcgggcgtcgcggccgagttcgaggacgacgagcgcggggcggggatcacggtgttcgcccccaccgacgacgccttcgcgggcctcccggcgggcgaccgcctccagtccctccccgccgaccgcaaggccgtggtgctccgcttccacgtgctccactcctactacccgctgggatcgctcgagtcgatcgtgaaccccgtccagcccacactggccaccgagttcagcaatgccggccgcttcaccctcaatatcacccgcgccaacggttcggtcgccatcgacaccggcgtcgtgcaggcgaccatcacgcggaccgtcttcgaccagaatcccgtcgccgtgttcgccgtctccaaggtcctcctgcccaaggagatgttcacccgcacaggcggcggcggcgacgacgactcctccatcgtggtcgccgccgccgccgcgtcctcccccccgccagccgcaacagccccggaggcctccgagagcgcgcagacgccgccgacaaagctctcctccccgcctgcactccgcggcggcgagcacgactacgacacggcgtcggcgcaagggatcggaatcggatggtggtgtatagcattggtgtatctacttccacatctcgtgtgagatccgggactcggatttcaagatccaaatggggccgcacatttttcacggcgaggacagaggaaaggagccgctcctcttgggacccggccgcggacgagcggcccacaaccacaagctcgtcagcttgtagctatacaggtaactagtgtcctcataacagttgctctacttactgtctgttatgttatggtaattgattattgattgttcacggtcgggtcattggagtgagatcgatcataaatgggttctatgattggacggagtgtgatttcatgatgaggaacgagctgtgtgtttgattgcggaaatcattcagttcggagcgaaaataaatgcggaaatcattggtaagtataataaaatgatgtagatggactgtaagagatgtcacatcagatttatagtagttgtgctcacgaacttcaatatactagcttgtgaggggaagggatagactaaatgtacaacttatattataacaaagttatcatatgactaatcttttagttggttattgaaagggaaatgaccttaaccactttctataaatcgattttggtgtttgacgtccatcataaattttatggactaactagtttgcctagtttgattatttctcatgtgcataagttcatctacaaatattctaagtccgctgtccggaataccgtagactattcctgacagaagaagttttttggaaaatcacctatgcgcggaccgtccgcgacaccagggtgagcctcgaacaggaacactaaaaaaacacgcgttaacattacgggttgtccgaaagagaagcgagcaccgtccgagaccaagcacggaccgtccggcctcaggcgtggaccgtccgaccgttgaaaaacaaaaaacccgaaggtgacgggttcggtaaaatgcatttttagcgtcctcacggaccgtccagggtgcacgaccggaccgtccgcgactgctctatctgacatctgacgatgcattaaatgtacttgtagccgttgatatagctgttattgctgaccgttgcgatttcagccgttgatgtataggacggaccgtccgcagtcggcagaaaaggagcaacaactagaaagtgattgatggctataaatacaacctcaatcatctccattcatcacatccaatcattctactcatacacattcaatacaagacctaggaatccattccaagacacattcaaagcttacaatctctccaagtcccacaattaagacaagtgatcattagtgtttagtgacttgagagagtgtgatccgtgtttcatttgttgctcttgttgcttgattttcttaatcgtgctttcttcatctcattctaagttctctagtgacttataaagctagcaagagacatctaagtgtgtggtggtccttgcggggtcttaatgatccttgaaattaagaagaagcactcaaccggtctaagtgatcgattgagagagggaaatggttgaaaaagacccggccttcgtggcctcctcaacggggagtatgttcattagaaccaaacctcgggaaacaaatcattgtgttcatttgtgttgatcattgacttacgatttgattcttcctctcccctctctctaaagttctcttgctcacaatattttgagttagctcccaaagttatctgcattaattgatcaactcatagcaagaagaactctcttccgcactctatattcattattatttgtttctaattctagtcccggatggagttcgtgtttaaaatttgtaattataggtttcggctactcacaaccttaggcgactttcagttatgtataacatgataatattataaaccaattgttctctaagatgtgaggtcgttttgtttctggtacaatagatctactcttaatttgagtcatatagatcagttatatagatttatccgtaggttgagttataaatcaatagtataagaatatgtatcaatttagcgattctagttatatagtatatcatttgaaagattaaactatgtataaaatatagagacgttattttgaggatagaacactaacggtcatatatgatttttaacatggtaatcggagatgctacttagactcaagaattcagtcaatcataattatgtgactaaactctttagcagcatattttctagtttgttatattgttatcgagaagcttaacaagatgaaccatggcttatggaaaggcaaagattttagccgtggtgtcagcacgtctaaaatatcacattaatggagcatcactagcgccacaagcaccacaagctatgataaaggtacaacaggataacacatat

SEQ ID NO: 59744 - DNA, 546 bp, Zea Mays
tcgtcggtagccgtcggttcacttctccaggtaaggaaagggttcgtactcatggcgccgccgcagccaaagtcgggccttttcgttggcatcaacaagggtcatgtcgtcaccaagcgcgagctgcctccccgcccgtgccaccgcaaggggaaatcaacgaagagggtgtctatggtcaggggagcttctgaaggttggcaaggacaagcgtgccctgaagcttgctaagagaaagcttggaactcacaagagggcaaagaagaagagagaggagatggcgggcgtcctcaggaagatgaggtcggctggtacgcacactgacaaaaagaaatagagagcatttcaagttcatggagctggctgccagagattatgttccagtgtctgattttccatacatgtagaacctaatagacatgtcaaagtattatgtatcgaaccagctcatgggattttgctccttccaatgcatccagggtttatgtatcgaaccaatttatgggatcttgctcttattctaatgcatccatggtttgtgaatct

SEQ ID NO: 59745 - DNA, 541 bp, Zea Mays
tcgtcggtagccgtcggttcacttctccaggaaagggttcgtactcatggcgccgccgcagccaaagtcgggccttttcgttggcatcaacaagggtcatgtcgtcaccaagcgcgagctgcctccccgcccgtgccaccgcaaggggaaatcaacgaagagggtgtctatggtcaggggagcttctgaaggttggcaaggacaagcgtgccctgaagcttgctaagagaaagcttggaactcacaagagggcaaagaagaagagagaggagatggcgggcgtcctcaggaagatgaggtcggctggtacgcacactgacaaaaagaaatagagagcatttcaagttcatggagctggctgccagagattatgttccagtgtctgattttccatacatgtagaacctaatagacatgtcaaagtattatgtatcgaaccagctcatgggattttgctccttccaatgcatccagggtttatgtatcgaaccaatttatgggatcttgctcttattctaatgcatccatggtttgtgaatct

SEQ ID NO: 59746 - DNA, 914 bp, Zea Mays
taaatctccagcctgttgccttcttccaaagctgctctcgcccccataaataaagcagctcctccgggggcggcgaactactcctcgtcgccaaaaccctagccctgcttctttgccatggcgagcagcgctagccaggcgagcctcctgctccagaagcagctcaaggatcttgcgaagaaccccgtggatgggttctccgccgggcttgtagacgacagcaacatcttcgagtggcaggtcaccatcatcggaccgcctgacaccctatatgatggaggctacttcaatgcaataatgaccttcccccagaactatcccaacagcccgccatcagtaagatttacttctgagatgtggcatccgaatgtttatcctgatggacgtgtttgcatttctattcttcatccacctggtgaagatcccaatggttatgagcttgcaagcgaacgatggacaccagtgcacacggttgaaagtatagttctgagcatcatttcgatgctctctagtccaaatgacgagtctccagcgaatatcgaagctgccgattggagagaaaagcgggatgagttcaagaaaaaggtaaggcaatgtgtccgcaaatctcaggaaatgctctgaaggagaaacatatggggagttgaacgagtgctgcaacttcacaaccagttacctagccagcattcttttgcttttcccctgtatattttccattcagtgtcattcgtatggtggtgttgggtctctttagacaaactggggactgttgcttatcctaaaaattcgattgtattgtgtggcatgaaatgatcgatgtcaaagaatattttgaacatgctgccacctaattatacttttcatatgaacatcataaagaagtgatgtttgcattatgtgttctgccctcggaa

SEQ ID NO: 59747 - DNA, 288 bp, Zea Mays
ttccaaagctgctctcgcccccataaataaagcagctcctccgggggcggcgaactactcctcgtcgccaaaaccctagccctgcttctttgccatggcgagcagcgctagccaggcgagcctcctgctccagaagcagctcaaggatcttgcgaagaaccccgtggatgggttctccgccgggcttgtagacgacagcaacatcttcgagtggcaggtcaccatcatcggaccgcctgacaccctatagtacatacaaagaaaagaaaccgattgttgcatgagagg

SEQ ID NO: 59748 - DNA, 661 bp, Zea Mays
ccaccctgccgccctgctttcttctgttccagcgctccccgccaccctctgttatcgctgctgggtctactcctcgctcttccccagtgctgcacttttcgggagtttcaccccgtcgttctcaagggttcaggcgaggtgcggacgccggagggaatggcggcggccggagcgaggagattctcttttgcttcgtggagcggtggaggccgaggacgaaggtggcggcgatttatgcatgggagagcggcgggcggacctggcggctcaacttccatagattccaccgcctggaggcgcgcaggagaggtcggcgcgggggcttctggactcccttggcgtgctagggagatgatttctgcttgacaaaagagcctatgcacaggaattaaggcctatgcacaagatgacctttttgatgtcatcactcatcacgaacttcttgctactcatgttcaaggctggattggccaagttagagctaccaatgtaagtgacctgtattatatgtgacataagctaatttagtaatttcactgatagatcacatccatgtgatgtgcatggtgtagggcagtatgcatctgatgaacttaataactccaaacaactttctgtctaaaaaaaatcttcagatatatatagtgaccaaatgacaaag

SEQ ID NO: 59749 - DNA, 916 bp, Zea Mays
ccaccctgccgccctgctttcttctgttccagcgctccccgccaccctctgttatcgctgctgggtctactcctcgctcttccccagtgctgcacttttcgggagtttcaccccgtcgttctcaagggttcaggcgaggtgcggacgccggagggaatggcggcggccggagcgaggagattctcttttgcttcgtggagcggtggaggccgaggacgaaggtggcggcgatttatgcatgggagagcggcgggcggacctggcggctcaacttccatagattccaccgcctggaggcgcgcaggagagggagatgatttctgcttgacaaaagagcctatgcacaggaattaaggcctatgcacaagatgacctttttgatgtcatcactcatcacgaacttcttgctactcatgttcaaggctggattggccaagttagagctaccaatgtaaggaaggaccaaatcgtctctaattagcactatatttaccgcacaatatattggagggtcgtttaaagtaactgttggggcgaaggcgaagatgctacccttcgctccaggccttcgtcgatctcgctgcaccaacggaggcaaaacgaccgacggagtccacccttcggcctctacactacaagacgaaggactacgacgaggtcgtcccgtcccacgccctcacccaacctgtaggcccacgtaggattcggcccattgtaacaggccccgcacggagaagtgtgttacgggcccgatttgtaatgacttttctgtaatgacagtctgtaaccctcctttatgagaatattccggggacagtccaggtgcctgagggcacatgcgtccttacatcaagacgttggacactcaggcacctataaatacccccgtacagtgcccttgagaggcgggattaag

SEQ ID NO: 59750 - DNA, 871 bp, Zea Mays
gttaagtcatagcgtctaagtcatctgcgtaaattatcgttggcataaagctttattatttgatacttcctcgtctcatctctcctataagttgtaaggcgatctgtgaaccctaaatcctgcatgaagatgaaggagagtcgcaagtcgcaacaaaggaaaaacacaatgaacaatgagaaaaaagaacataaaacaaccgaatcagtaaatagtgggttttttttttcaaatccaccaaacattatacaaatatttaacttgcaatgtgtaggttcaaattaacgtgctaatgttgatgaagttattacaggtaaggaaggaccaaatcgtctctaattaggtacttttatatttatcaaattcgttgtatttttagatgctgaattgacataaatactatcttagtttatgtttatggtatattttgttttagcactatatttaccgcacaatatattggagggtcgtttaaagtaactgttggggcgaaggcgaagatgctacccttcgctccaggccttcgtcgatctcgctgcaccaacggaggcaaaacgaccgacggagtccacccttcggcctctacactacaagacgaaggactacgacgaggtcgtcccgtcccacgccctcacccaacctgtaggcccacgtaggattcggcccattgtaacaggccccgcacggagaagtgtgttacgggcccgatttgtaatgacttttctgtaatgacagtctgtaaccctcctttatgagaatattccggggacagtccaggtgcctgagggcacatgcgtccttacatcaagacgttggacactcaggcacctataaatacccccgtacagtgcccttgagaggcgggattaag

SEQ ID NO: 59751 - DNA, 4749 bp, Zea Mays
ccacctcgtccccgtccccggccccggccccggccccgcatctctctctcgccctgccgtctccggagtctggagctgctctcacaaccccacacgcgcgcactcgaccccgacccccgacctcgtccaccacccgcttggcgcgcgcgcagtccttacagatttcctcgcccggggtggcggtgaggcctcgcaccgatgagctcggggaccgtcgcggcctcggaccctgggggtggcgagacgaagctggtggcgggagatgacgtcacaatatcggaagctgcgggcgatatgcctgcgttcgccgccgatttgaaagtggaggagaaggctacgttgacgatggatgtggctcatgaaaggggagatatggcggtgagcgacccactctacgcgactgagtcggctgggatggttggtaccgaagggcacggagatgagcccgtggaggacgtggatgcggtgaacggagaggacggtggcgaggaggggacgcaagaagcaggagctggtggtctgctgactgagacggagaggaagccggttctagtggtagatgtgcctgctgctgctggttctgccgctcctgaacatgctgaagccgcctattgcatttcagaatccaacaaagtcgaagaaaatcatgtaaatgcggagcctgggagaaagaataatgaaagtgatcatggtgtagtgccttctgataaggaaatacagaacaatgtgcctggtgacatggaggaaagctccgaggaacatgaaggtgatggagcacctgtagttgaccagcccaataacacatctgaaatgctcccacaaacaggagagcagtttcctgacagtggaaatagcccagacagcaacttagaggctgctagtctggggaatgttgatcagggtgctagataccgcctcccacctcttgataaaggcaggtttcaagttgctgatcttgtctggggtaaagtgaaaagtcatccttggtggcctggtgaaatttttgatccaacagatgcatctgaattggcgctgaagcatcggaaaaagggcagccacttggtagcttattttggtgacagtacttttgcatggtgcgatgaatcccagttgaagccttttgtaacaaattattcacaaatggagaagcagagcagttcagatggctttgttgggtcagttaataatgcacttgaagaactgtcaaggcgggtactgtcaggtttgagctgctcttgtttggcagaagagcttgctgataatggtatgtcatatacggttgataatgctgggctcaaggatggagttacttgttctgcagttaatcggcctgagatcttgaactgtttcagtccagaaaaccttcttaattatattaaggagttagctctatttcctggccagggaggtgatctattggagttagtgatagcgtgttctcaacttacatctttctatcgatctaagggatgtcctgaacttgcatcatttcaaactagtgatgcgtgggttgaggatgatctggatggtatagacactttgtccacccagaatgtaatggtggaggaacctgtgattaacgaagtgcagcctactcaagataagcccaaaaggggcagggggagacctcggaaacaaaaggctggtcatgaccaggtggtgatggagaaaaggagcacatctaatcaggtcaatgatactagctacaatgagaagaaaagaaacctcaaatcatttgaagattcagagaagtcatcagctccaactggtggtggttctttcaagattggtgagtgtattcggcgagctgcaagccagctgacaggatcttcatctattatgaaggctcagaatgaaccaacagtctataataacgctgctgaaggagagaatggggaatttgatgtctctagtgatgatgctggtgatgaacttactgtggagaaacgagcaaaaaggaggcgtctgcacataaatcacgctgcagatcccagggaattactgtcacaactatgcttggttgcaacagagccaatgaatggatatagtttctcagcaatgataatcggttacttcaacgattacagaaactatattgtttctactactactgaagcaaacattgttgataaaggtacatctagaagagggaggaagagaaaagaagttataccttctcctgaggtagagacaacggatcatatgcaggactcgtattggtccggattgagcttgtataatcacccagttcatgacctaaaaagagagagtccgactacaaggccaagacggaaacggagatcctcaagacatgcatatatacctttgtcggaacttggggagccggttcctaaaaaacagatacaagtgatggaaagatctatcatccatgtcgatgagaagatggttgatgagttgaagcccactgcacttgttttgacctttggcaggtcagcgtctattccttcagaactggatcttgttaagatgttcagtctctatggtccactgaaagaaagggggacaaaagtacatagggaaacaaatactgttaaggttgtcttcaagaaacgtgtcgatgctgaaagggcttttagtgctgcaggcaagtatagcacttttggaccttcgcttcgaagttaccgtcttgtcagtatgccactttctccagagacacaatcagcaaataatcctgaaaatcatggcttggagattccaggtttgaatatgtccgaagctcctaaggattccatggaagttgacctggtgcagaaaacagataaagtaaaagttacaggagaactgtcatctgaagaagttgagactgtaaggcaaacatgtctagtggaagctgcagacagtacatttgtcagtgaagttgacaggcttgagaaagcaggaaatattgatgctgagctaattgtccatgtgaatcagattggggaaggtgcagaagctgcatctgtatctgaagagtcatctcagcaagtgggtgacattgagcaagcttacactcaaaaggcagcgtcagtcagtgatctacccacagagatagaaaccttacattctgatgctataataaaagagttgcctcagaaggctccagataatatgcaaactgatatagccacggccccaaaacagagtcacaatccaggagataatgctgtatttgaagctgtcactgaagtgccaagtactgcacaagatcatagtgaggatgatgttggggatgaagttccagaagagcacactgtatttcctgtgttacaaagtcaaacccctggtgagaagctagtggggcaatctgaaactgaacaaaaagtgggacctgaagatccaaagtcacaagctgaaaatttgactgttgaacctgtcgtacaaggtgcagtcgagcaagtagaaattgaactggaatccaaaactactgttgaagtgtcatgcgaacaaggctatagtattgagcagactgttaacatggaagctgtaattgaagcatcaggtggacaacttgaggtgggaagacgaatttcagaagatgaatctatggctgatgcaaatattgagcactctatggtcatggttgatgaaactgtggaggcaaaagtagtaccactcgaggagagtacagagaataatgctgctaccataggagtagttgaggagacagctgaaggtgaaactaaggaggaagcaccagacgagaaggggaaaatagaaaataatgaagatgctgacaaattagctggagagaccagggcaggtgaaattacagttgaggcaccagatgagaaaacagaaattaaagcagatgctgacacaccagctggtgagaccaaagaatgtgaaattacagtagaggcaccagatgagaaaatagcaaacaaaggtattgttgaaccaataatcagggagataactgaagatcaaactgcagctggagaaccagatgaagaagctacaacaactgaggaaacggtagaggatgttaaggtgctagatgataagtctacagcagatgggaaacctgtagagaatgccacagtcgcgacaaatgaggattcaacaacagttgagaatactctgaaggatgcaatggttgcgccaccaggtacaaataccaccaacgccgaagaaactgctctgggtgccacagttaaagcactagatgaggatgctctagcagtggagaagactatagaggatacctcggttgaggcatcagatgtacaagcaggcaggtgcaagtgagtaaaccagcttatcgaaccttgcgttcctgtcagtttctgttgatatcgacgtagtttgctcaactgattctctcatctagaactttagatgatgtgttctgtatagaaaacctgaaactactttagcatcataaggccattaggtattgacaactagggcatctatatccttctcccccttttttgctctataaacttcacctagttgtattgggcgcgtacgtgttggtgttgtcataaacacaatttcctcctatatgtcagttcaatgctcaggtgatcagtgactgagtgaaagccttgaatcaatagggggaaggcatgttcattactacatttaacggttaggcttgcgagtctttagattatctacttggatcaaatgattcttgtatcatttgccatttgtaaccaactgtgttctggaatccttttatcatattacgtagaatatttagataattctatcttctcattggtcatcgagaagtctgca

SEQ ID NO: 59752 - DNA, 4362 bp, Zea Mays
gtccccggccccggccccggccccgcatctctctctcgccctgccgtctccggagtctggagctgctctcacaaccccacacgcgcgcactcgaccccgacccccgacctcgtccaccacccgcttggcgcgcgcgcagtccttacagatttcctcgcccggggtggcggtgaggcctcgcaccgatgagctcggggaccgtcgcggcctcggaccctgggggtggcgagacgaagctggtggcgggagatgacgtcacaatatcggaagctgcgggcgatatgcctgcgttcgccgccgatttgaaagtggaggagaaggctacgttgacgatggatgtggctcatgaaaggggagatatggcggtgagcgacccactctacgcgactgagtcggctgggatggttggtaccgaagggcacggagatgagcccgtggaggacgtggatgcggtgaacggagaggacggtggcgaggaggggacgcaagaagcaggagctggtggtctgctgactgagacggagaggaagccggttctagtggtagatgtgcctgctgctgctggttctgccgctcctgaacatgctgaagccggagagcagtttcctgacagtggaaatagcccagacagcaacttagaggctgctagtctggggaatgttgatcagggtgctagataccgcctcccacctcttgataaaggcaggtttcaagttgctgatcttgtctggggtaaagtgaaaagtcatccttggtggcctggtgaaatttttgatccaacagatgcatctgaattggcgctgaagcatcggaaaaagggcagccacttggtagcttattttggtgacagtacttttgcatggtgcgatgaatcccagttgaagccttttgtaacaaattattcacaaatggagaagcagagcagttcagatggctttgttgggtcagttaataatgcacttgaagaactgtcaaggcgggtactgtcaggtttgagctgctcttgtttggcagaagagcttgctgataatggtatgtcatatacggttgataatgctgggctcaaggatggagttacttgttctgcagttaatcggcctgagatcttgaactgtttcagtccagaaaaccttcttaattatattaaggagttagctctatttcctggccagggaggtgatctattggagttagtgatagcgtgttctcaacttacatctttctatcgatctaagggatgtcctgaacttgcatcatttcaaactagtgatgcgtgggttgaggatgatctggatggtatagacactttgtccacccagaatgtaatggtggaggaacctgtgattaacgaagtgcagcctactcaagataagcccaaaaggggcagggggagacctcggaaacaaaaggctggtcatgaccaggtggtgatggagaaaaggagcacatctaatcaggtcaatgatactagctacaatgagaagaaaagaaacctcaaatcatttgaagattcagagaagtcatcagctccaactggtggtggttctttcaagattggtgagtgtattcggcgagctgcaagccagctgacaggatcttcatctattatgaaggctcagaatgaaccaacagtctataataacgctgctgaaggagagaatggggaatttgatgtctctagtgatgatgctggtgatgaacttactgtggagaaacgagcaaaaaggaggcgtctgcacataaatcacgctgcagatcccagggaattactgtcacaactatgcttggttgcaacagagccaatgaatggatatagtttctcagcaatgataatcggttacttcaacgattacagaaactatattgtttctactactactgaagcaaacattgttgataaaggtacatctagaagagggaggaagagaaaagaagttataccttctcctgaggtagagacaacggatcatatgcaggactcgtattggtccggattgagcttgtataatcacccagttcatgacctaaaaagagagagtccgactacaaggccaagacggaaacggagatcctcaagacatgcatatatacctttgtcggaacttggggagccggttcctaaaaaacagatacaagtgatggaaagatctatcatccatgtcgatgagaagatggttgatgagttgaagcccactgcacttgttttgacctttggcaggcaagtatagcacttttggaccttcgcttcgaagttaccgtcttgtcagtatgccactttctccagagacacaatcagcaaataatcctgaaaatcatggcttggagattccaggtttgaatatgtccgaagctcctaaggattccatggaagttgacctggtgcagaaaacagataaagtaaaagttacaggagaactgtcatctgaagaagttgagactgtaaggcaaacatgtctagtggaagctgcagacagtacatttgtcagtgaagttgacaggcttgagaaagcaggaaatattgatgctgagctaattgtccatgtgaatcagattggggaaggtgcagaagctgcatctgtatctgaagagtcatctcagcaagtgggtgacattgagcaagcttacactcaaaaggcagcgtcagtcagtgatctacccacagagatagaaaccttacattctgatgctataataaaagagttgcctcagaaggctccagataatatgcaaactgatatagccacggccccaaaacagagtcacaatccaggagataatgctgtatttgaagctgtcactgaagtgccaagtactgcacaagatcatagtgaggatgatgttggggatgaagttccagaagagcacactgtatttcctgtgttacaaagtcaaacccctggtgagaagctagtggggcaatctgaaactgaacaaaaagtgggacctgaagatccaaagtcacaagctgaaaatttgactgttgaacctgtcgtacaaggtgcagtcgagcaagtagaaattgaactggaatccaaaactactgttgaagtgtcatgcgaacaaggctatagtattgagcagactgttaacatggaagctgtaattgaagcatcaggtggacaacttgaggtgggaagacgaatttcagaagatgaatctatggctgatgcaaatattgagcactctatggtcatggttgatgaaactgtggaggcaaaagtagtaccactcgaggagagtacagagaataatgctgctaccataggagtagttgaggagacagctgaaggtgaaactaaggaggaagcaccagacgagaaggggaaaatagaaaataatgaagatgctgacaaattagctggagagaccagggcaggtgaaattacagttgaggcaccagatgagaaaacagaaattaaagcagatgctgacacaccagctggtgagaccaaagaatgtgaaattacagtagaggcaccagatgagaaaatagcaaacaaaggtattgttgaaccaataatcagggagataactgaagatcaaactgcagctggagaaccagatgaagaagctacaacaactgaggaaacggtagaggatgttaaggtgctagatgataagtctacagcagatgggaaacctgtagagaatgccacagtcgcgacaaatgaggattcaacaacagttgagaatactctgaaggatgcaatggttgcgccaccaggtacaaataccaccaacgccgaagaaactgctctgggtgccacagttaaagcactagatgaggatgctctagcagtggagaagactatagaggatacctcggttgaggcatcagatgtacaagcaggcaggtgcaagtgagtaaaccagcttatcgaaccttgcgttcctgtcagtttctgttgatatcgacgtagtttgctcaactgattctctcatctagaactttagatgatgtgttctgtatagaaaacctgaaactactttagcatcataaggccattaggtattgacaactagggcatctatatccttctcccccttttttgctctataaacttcacctagttgtattgggcgcgtacgtgttggtgttgtcataaacacaatttcctcctatatgtcagttcaatgctcaggtgatcagtgactgagtgaaagccttgaatcaatagggggaaggcatgttcattactacatttaacggttaggcttgcgagtctttagattatctacttggatcaaatgattcttgtatcatttgccatttgtaaccaactgtgttctggaatccttttatcatattacgtagaatatttagataattctatcttctcattggtcatcgagaagtctgca

SEQ ID NO: 59753 - DNA, 4715 bp, Zea Mays
ggccccggccccggccccgcatctctctctcgccctgccgtctccggagtctggagctgctctcacaaccccacacgcgcgcactcgaccccgacccccgacctcgtccaccacccgcttggcgcgcgcgcagtccttacagatttcctcgcccggggtggcggtgaggcctcgcaccgatgagctcggggaccgtcgcggcctcggaccctgggggtggcgagacgaagctggtggcgggagatgacgtcacaatatcggaagctgcgggcgatatgcctgcgttcgccgccgatttgaaagtggaggagaaggctacgttgacgatggatgtggctcatgaaaggggagatatggcggtgagcgacccactctacgcgactgagtcggctgggatggttggtaccgaagggcacggagatgagcccgtggaggacgtggatgcggtgaacggagaggacggtggcgaggaggggacgcaagaagcaggagctggtggtctgctgactgagacggagaggaagccggttctagtggtagatgtgcctgctgctgctggttctgccgctcctgaacatgctgaagccgaatccaacaaagtcgaagaaaatcatgtaaatgcggagcctgggagaaagaataatgaaagtgatcatggtgtagtgccttctgataaggaaatacagaacaatgtgcctggtgacatggaggaaagctccgaggaacatgaaggtgatggagcacctgtagttgaccagcccaataacacatctgaaatgctcccacaaacaggagagcagtttcctgacagtggaaatagcccagacagcaacttagaggctgctagtctggggaatgttgatcagggtgctagataccgcctcccacctcttgataaaggcaggtttcaagttgctgatcttgtctggggtaaagtgaaaagtcatccttggtggcctggtgaaatttttgatccaacagatgcatctgaattggcgctgaagcatcggaaaaagggcagccacttggtagcttattttggtgacagtacttttgcatggtgcgatgaatcccagttgaagccttttgtaacaaattattcacaaatggagaagcagagcagttcagatggctttgttgggtcagttaataatgcacttgaagaactgtcaaggcgggtactgtcaggtttgagctgctcttgtttggcagaagagcttgctgataatggtatgtcatatacggttgataatgctgggctcaaggatggagttacttgttctgcagttaatcggcctgagatcttgaactgtttcagtccagaaaaccttcttaattatattaaggagttagctctatttcctggccagggaggtgatctattggagttagtgatagcgtgttctcaacttacatctttctatcgatctaagggatgtcctgaacttgcatcatttcaaactagtgatgcgtgggttgaggatgatctggatggtatagacactttgtccacccagaatgtaatggtggaggaacctgtgattaacgaagtgcagcctactcaagataagcccaaaaggggcagggggagacctcggaaacaaaaggctggtcatgaccaggtggtgatggagaaaaggagcacatctaatcaggtcaatgatactagctacaatgagaagaaaagaaacctcaaatcatttgaagattcagagaagtcatcagctccaactggtggtggttctttcaagattggtgagtgtattcggcgagctgcaagccagctgacaggatcttcatctattatgaaggctcagaatgaaccaacagtctataataacgctgctgaaggagagaatggggaatttgatgtctctagtgatgatgctggtgatgaacttactgtggagaaacgagcaaaaaggaggcgtctgcacataaatcacgctgcagatcccagggaattactgtcacaactatgcttggttgcaacagagccaatgaatggatatagtttctcagcaatgataatcggttacttcaacgattacagaaactatattgtttctactactactgaagcaaacattgttgataaaggtacatctagaagagggaggaagagaaaagaagttataccttctcctgaggtagagacaacggatcatatgcaggactcgtattggtccggattgagcttgtataatcacccagttcatgacctaaaaagagagagtccgactacaaggccaagacggaaacggagatcctcaagacatgcatatatacctttgtcggaacttggggagccggttcctaaaaaacagatacaagtgatggaaagatctatcatccatgtcgatgagaagatggttgatgagttgaagcccactgcacttgttttgacctttggcaggtcagcgtctattccttcagaactggatcttgttaagatgttcagtctctatggtccactgaaagaaagggggacaaaagtacatagggaaacaaatactgttaaggttgtcttcaagaaacgtgtcgatgctgaaagggcttttagtgctgcaggcaagtatagcacttttggaccttcgcttcgaagttaccgtcttgtcagtatgccactttctccagagacacaatcagcaaataatcctgaaaatcatggcttggagattccaggtttgaatatgtccgaagctcctaaggattccatggaagttgacctggtgcagaaaacagataaagtaaaagttacaggagaactgtcatctgaagaagttgagactgtaaggcaaacatgtctagtggaagctgcagacagtacatttgtcagtgaagttgacaggcttgagaaagcaggaaatattgatgctgagctaattgtccatgtgaatcagattggggaaggtgcagaagctgcatctgtatctgaagagtcatctcagcaagtgggtgacattgagcaagcttacactcaaaaggcagcgtcagtcagtgatctacccacagagatagaaaccttacattctgatgctataataaaagagttgcctcagaaggctccagataatatgcaaactgatatagccacggccccaaaacagagtcacaatccaggagataatgctgtatttgaagctgtcactgaagtgccaagtactgcacaagatcatagtgaggatgatgttggggatgaagttccagaagagcacactgtatttcctgtgttacaaagtcaaacccctggtgagaagctagtggggcaatctgaaactgaacaaaaagtgggacctgaagatccaaagtcacaagctgaaaatttgactgttgaacctgtcgtacaaggtgcagtcgagcaagtagaaattgaactggaatccaaaactactgttgaagtgtcatgcgaacaaggctatagtattgagcagactgttaacatggaagctgtaattgaagcatcaggtggacaacttgaggtgggaagacgaatttcagaagatgaatctatggctgatgcaaatattgagcactctatggtcatggttgatgaaactgtggaggcaaaagtagtaccactcgaggagagtacagagaataatgctgctaccataggagtagttgaggagacagctgaaggtgaaactaaggaggaagcaccagacgagaaggggaaaatagaaaataatgaagatgctgacaaattagctggagagaccagggcaggtgaaattacagttgaggcaccagatgagaaaacagaaattaaagcagatgctgacacaccagctggtgagaccaaagaatgtgaaattacagtagaggcaccagatgagaaaatagcaaacaaaggtattgttgaaccaataatcagggagataactgaagatcaaactgcagctggagaaccagatgaagaagctacaacaactgaggaaacggtagaggatgttaaggtgctagatgataagtctacagcagatgggaaacctgtagagaatgccacagtcgcgacaaatgaggattcaacaacagttgagaatactctgaaggatgcaatggttgcgccaccaggtacaaataccaccaacgccgaagaaactgctctgggtgccacagttaaagcactagatgaggatgctctagcagtggagaagactatagaggatacctcggttgaggcatcagatgtacaagcaggcaggtgcaagtgagtaaaccagcttatcgaaccttgcgttcctgtcagtttctgttgatatcgacgtagtttgctcaactgattctctcatctagaactttagatgatgtgttctgtatagaaaacctgaaactactttagcatcataaggccattaggtattgacaactagggcatctatatccttctcccccttttttgctctataaacttcacctagttgtattgggcgcgtacgtgttggtgttgtcataaacacaatttcctcctatatgtcagttcaatgctcaggtgatcagtgactgagtgaaagccttgaatcaatagggggaaggcatgttcattactacatttaacggttaggcttgcgagtctttagattatctacttggatcaaatgattcttgtatcatttgccatttgtaaccaactgtgttctggaatccttttatcatattacgtagaatatttagataattctatcttctcattggtcatcgagaagtctgca

SEQ ID NO: 59754 - DNA, 4015 bp, Zea Mays
cgcatctctctctcgccctgccgtctccggagtctggagctgctctcacaaccccacacgcgcgcactcgaccccgacccccgacctcgtccaccacccgcttggcgcgcgcgcagtccttacagatttcctcgcccggggtggcggtgaggcctcgcaccgatgagctcggggaccgtcgcggcctcggaccctgggggtggcgagacgaagctggtggcgggagatgacgtcacaatatcggaagctgcgggcgatatgcctgcgttcgccgccgatttgaaagtggaggagaaggctacgttgacgatggatgtggctcatgaaaggggagatatggcggtgagcgacccactctacgcgactgagtcggctgggatggttggtaccgaagggcacggagatgagcccgtggaggacgtggatgcggtgaacggagaggacggtggcgaggaggggacgcaagaagcaggagctggtggtctgctgactgagacggagaggaagccggttctagtggtagatgtgcctgctgctgctggttctgccgctcctgaacatgctgaagccggagagcagtttcctgacagtggaaatagcccagacagcaacttagaggctgctagtctggggaatgttgatcagggtgctagataccgcctcccacctcttgataaaggcaggtttcaagttgctgatcttgtctggggtaaagtgaaaagtcatccttggtggcctggtgaaatttttgatccaacagatgcatctgaattggcgctgaagcatcggaaaaagggcagccacttggtagcttattttggtgacagtacttttgcatggtgcgatgaatcccagttgaagccttttgtaacaaattattcacaaatggagaagcagagcagttcagatggctttgttgggtcagttaataatgcacttgaagaactgtcaaggcgggtactgtcaggtttgagctgctcttgtttggcagaagagcttgctgataatggtatgtcatatacggttgataatgctgggctcaaggatggagttacttgttctgcagttaatcggcctgagatcttgaactgtttcagtccagaaaaccttcttaattatattaaggagttagctctatttcctggccagggaggtgatctattggagttagtgatagcgtgttctcaacttacatctttctatcgatctaagggatgtcctgaacttgcatcatttcaaactagtgatgcgtgggttgaggatgatctggatggtatagacactttgtccacccagaatgtaatggtggaggaacctgtgattaacgaagtgcagcctactcaagataagcccaaaaggggcagggggagacctcggaaacaaaaggctggtcatgaccaggtggtgatggagaaaaggagcacatctaatcaggtcaatgatactagctacaatgagaagaaaagaaacctcaaatcatttgaagattcagagaagtcatcagctccaactggtggtggttctttcaagattggtgagtgtattcggcgagctgcaagccagctgacaggatcttcatctattatgaaggctcagaatgaaccaacagtctataataacgctgctgaaggagagaatggggaatttgatgtctctagtgatgatgctggtgatgaacttactgtggagaaacgagcaaaaaggaggcgtctgcacataaatcacgctgcagatcccagggaattactgtcacaactatgcttggttgcaacagagccaatgaatggatatagtttctcagcaatgataatcggttacttcaacgattacagaaactatattgtttctactactactgaagcaaacattgttgataaaggtacatctagaagagggaggaagagaaaagaagttataccttctcctgaggtagagacaacggatcatatgcaggactcgtattggtccggattgagcttgtataatcacccagttcatgacctaaaaagagagagtccgactacaaggccaagacggaaacggagatcctcaagacatgcatatatacctttgtcggaacttggggagccggttcctaaaaaacagatacaagtgatggaaagatctatcatccatgtcgatgagaagatggttgatgagttgaagcccactgcacttgttttgacctttggcaggtcagcgtctattccttcagaactggatcttgttaagatgttcagtctctatggtccactgaaagaaagggggacaaaagtacatagggaaacaaatactgttaaggttgtcttcaagaaacgtgtcgatgctgaaagggcttttagtgctgcaggcaagtatagcacttttggaccttcgcttcgaagttaccgtcttgtcagtatgccactttctccagagacacaatcagcaaataatcctgaaaatcatggcttggagattccaggtttgaatatgtccgaagctcctaaggattccatggaagttgacctggtgcagaaaacagataaagtaaaagttacaggagaactgtcatctgaagaagttgagactgtaaggcaaacatgtctagtggaagctgcagacagtacatttgtcagtgaagttgacaggcttgagaaagcaggaaatattgatgctgagctaattgtccatgtgaatcagattggggaaggtgcagaagctgcatctgtatctgaagagtcatctcagcaagtgggtgacattgagcaagcttacactcaaaaggcagcgtcagtcagtgatctacccacagagatagaaaccttacattctgatgctataataaaagagttgcctcagaaggctccagataatatgcaaactgatatagccacggccccaaaacagagtcacaatccaggagataatgctgtatttgaagctgtcactgaagtgccaagtactgcacaagatcatagtgaggatgatgttggggatgaagttccagaagagcacactgtatttcctgtgttacaaagtcaaacccctggtgagaagctagtggggcaatctgaaactgaacaaaaagtgggacctgaagatccaaagtcacaagctgaaaatttgactgttgaacctgtcgtacaaggtgcagtcgagcaagtagaaattgaactggaatccaaaactactgttgaagtgtcatgcgaacaaggctatagtattgagcagactgttaacatggaagctgtaattgaagcatcaggtggacaacttgaggtgggaagacgaatttcagaagatgaatctatggctgatgcaaatattgagcactctatggtcatggttgatgaaactgtggaggcaaaagtagtaccactcgaggagagtacagagaataatgctgctaccataggagtagttgaggagacagctgaaggtgaaactaaggaggaagcaccagacgagaaggggaaaatagaaaataatgaagatgctgacaaattagctggagagaccagggcaggtgaaattacagttgaggcaccagatgagaaaacagaaattaaagcagatgctgacacaccagctggtgagaccaaagaatgtgaaattacagtagaggcaccagatgagaaaatagcaaacaaaggtattgttgaaccaataatcagggagataactgaagatcaaactgcagctggagaaccagatgaagaagctacaacaactgaggaaacggtagaggatgttaaggtgctagatgataagtctacagcagatgggaaacctgtagagaatgccacagtcgcgacaaatgaggattcaacaacagttgagaatactctgaaggatgcaatggttgcgccaccaggtacaaataccaccaacgccgaagaaactgctctgggtgccacagttaaagcactagatgaggatgctctagcagtggagaagactatagaggatacctcggttgaggcatcagatgtacaagcaggcaggtgcaatgccgagttaaaggtgaagcgtg

SEQ ID NO: 59755 - DNA, 4676 bp, Zea Mays
ctccggagtctggagctgctctcacaaccccacacgcgcgcactcgaccccgacccccgacctcgtccaccacccgcttggcgcgcgcgcagtccttacagatttcctcgcccggggtggcggtgaggcctcgcaccgatgagctcggggaccgtcgcggcctcggaccctgggggtggcgagacgaagctggtggcgggagatgacgtcacaatatcggaagctgcgggcgatatgcctgcgttcgccgccgatttgaaagtggaggagaaggctacgttgacgatggatgtggctcatgaaaggggagatatggcggtgagcgacccactctacgcgactgagtcggctgggatggttggtaccgaagggcacggagatgagcccgtggaggacgtggatgcggtgaacggagaggacggtggcgaggaggggacgcaagaagcaggagctggtggtctgctgactgagacggagaggaagccggttctagtggtagatgtgcctgctgctgctggttctgccgctcctgaacatgctgaagccgagaatccaacaaagtcgaagaaaatcatgtaaatgcggagcctgggagaaagaataatgaaagtgatcatggtgtagtgccttctgataaggaaatacagaacaatgtgcctggtgacatggaggaaagctccgaggaacatgaaggtgatggagcacctgtagttgaccagcccaataacacatctgaaatgctcccacaaacaggagagcagtttcctgacagtggaaatagcccagacagcaacttagaggctgctagtctggggaatgttgatcagggtgctagataccgcctcccacctcttgataaaggcaggtttcaagttgctgatcttgtctggggtaaagtgaaaagtcatccttggtggcctggtgaaatttttgatccaacagatgcatctgaattggcgctgaagcatcggaaaaagggcagccacttggtagcttattttggtgacagtacttttgcatggtgcgatgaatcccagttgaagccttttgtaacaaattattcacaaatggagaagcagagcagttcagatggctttgttgggtcagttaataatgcacttgaagaactgtcaaggcgggtactgtcaggtttgagctgctcttgtttggcagaagagcttgctgataatggtatgtcatatacggttgataatgctgggctcaaggatggagttacttgttctgcagttaatcggcctgagatcttgaactgtttcagtccagaaaaccttcttaattatattaaggagttagctctatttcctggccagggaggtgatctattggagttagtgatagcgtgttctcaacttacatctttctatcgatctaagggatgtcctgaacttgcatcatttcaaactagtgatgcgtgggttgaggatgatctggatggtatagacactttgtccacccagaatgtaatggtggaggaacctgtgattaacgaagtgcagcctactcaagataagcccaaaaggggcagggggagacctcggaaacaaaaggctggtcatgaccaggtggtgatggagaaaaggagcacatctaatcaggtcaatgatactagctacaatgagaagaaaagaaacctcaaatcatttgaagattcagagaagtcatcagctccaactggtggtggttctttcaagattggtgagtgtattcggcgagctgcaagccagctgacaggatcttcatctattatgaaggctcagaatgaaccaacagtctataataacgctgctgaaggagagaatggggaatttgatgtctctagtgatgatgctggtgatgaacttactgtggagaaacgagcaaaaaggaggcgtctgcacataaatcacgctgcagatcccagggaattactgtcacaactatgcttggttgcaacagagccaatgaatggatatagtttctcagcaatgataatcggttacttcaacgattacagaaactatattgtttctactactactgaagcaaacattgttgataaaggtacatctagaagagggaggaagagaaaagaagttataccttctcctgaggtagagacaacggatcatatgcaggactcgtattggtccggattgagcttgtataatcacccagttcatgacctaaaaagagagagtccgactacaaggccaagacggaaacggagatcctcaagacatgcatatatacctttgtcggaacttggggagccggttcctaaaaaacagatacaagtgatggaaagatctatcatccatgtcgatgagaagatggttgatgagttgaagcccactgcacttgttttgacctttggcaggtcagcgtctattccttcagaactggatcttgttaagatgttcagtctctatggtccactgaaagaaagggggacaaaagtacatagggaaacaaatactgttaaggttgtcttcaagaaacgtgtcgatgctgaaagggcttttagtgctgcaggcaagtatagcacttttggaccttcgcttcgaagttaccgtcttgtcagtatgccactttctccagagacacaatcagcaaataatcctgaaaatcatggcttggagattccaggtttgaatatgtccgaagctcctaaggattccatggaagttgacctggtgcagaaaacagataaagtaaaagttacaggagaactgtcatctgaagaagttgagactgtaaggcaaacatgtctagtggaagctgcagacagtacatttgtcagtgaagttgacaggcttgagaaagcaggaaatattgatgctgagctaattgtccatgtgaatcagattggggaaggtgcagaagctgcatctgtatctgaagagtcatctcagcaagtgggtgacattgagcaagcttacactcaaaaggcagcgtcagtcagtgatctacccacagagatagaaaccttacattctgatgctataataaaagagttgcctcagaaggctccagataatatgcaaactgatatagccacggccccaaaacagagtcacaatccaggagataatgctgtatttgaagctgtcactgaagtgccaagtactgcacaagatcatagtgaggatgatgttggggatgaagttccagaagagcacactgtatttcctgtgttacaaagtcaaacccctggtgagaagctagtggggcaatctgaaactgaacaaaaagtgggacctgaagatccaaagtcacaagctgaaaatttgactgttgaacctgtcgtacaaggtgcagtcgagcaagtagaaattgaactggaatccaaaactactgttgaagtgtcatgcgaacaaggctatagtattgagcagactgttaacatggaagctgtaattgaagcatcaggtggacaacttgaggtgggaagacgaatttcagaagatgaatctatggctgatgcaaatattgagcactctatggtcatggttgatgaaactgtggaggcaaaagtagtaccactcgaggagagtacagagaataatgctgctaccataggagtagttgaggagacagctgaaggtgaaactaaggaggaagcaccagacgagaaggggaaaatagaaaataatgaagatgctgacaaattagctggagagaccagggcaggtgaaattacagttgaggcaccagatgagaaaacagaaattaaagcagatgctgacacaccagctggtgagaccaaagaatgtgaaattacagtagaggcaccagatgagaaaatagcaaacaaaggtattgttgaaccaataatcagggagataactgaagatcaaactgcagctggagaaccagatgaagaagctacaacaactgaggaaacggtagaggatgttaaggtgctagatgataagtctacagcagatgggaaacctgtagagaatgccacagtcgcgacaaatgaggattcaacaacagttgagaatactctgaaggatgcaatggttgcgccaccaggtacaaataccaccaacgccgaagaaactgctctgggtgccacagttaaagcactagatgaggatgctctagcagtggagaagactatagaggatacctcggttgaggcatcagatgtacaagcaggcaggtgcaagtgagtaaaccagcttatcgaaccttgcgttcctgtcagtttctgttgatatcgacgtagtttgctcaactgattctctcatctagaactttagatgatgtgttctgtatagaaaacctgaaactactttagcatcataaggccattaggtattgacaactagggcatctatatccttctcccccttttttgctctataaacttcacctagttgtattgggcgcgtacgtgttggtgttgtcataaacacaatttcctcctatatgtcagttcaatgctcaggtgatcagtgactgagtgaaagccttgaatcaatagggggaaggcatgttcattactacatttaacggttaggcttgcgagtctttagattatctacttggatcaaatgattcttgtatcatttgccatttgtaaccaactgtgttctggaatccttttatcatattacgtagaatatttagataattctatcttctcattggtcatcgagaagtctgca

SEQ ID NO: 59756 - DNA, 913 bp, Zea Mays
caacaagaagtgatttcaggtaattgtagcgtaaaatgcatgctaagcagttgcaagacaattgtttcagattttacagtaagacataagagataattatccctgtactcaactatgataatgtcgtgtttacagtttagatgttggttcatacacgcaagactgtttcaccataacaccactgttaacataaaactgagtagaaaagactcttcccgctttcgtaacgtggagaaaaccattgaaatccatatctgcaaacataacatgaactgttgatatgatctttccttgttactatgatcatcttttccagcttgttatgaccaacataacctacagtctaaacggaatgcaaacttgatttagaagataagattaccaaaagaaaaatctattgatatgatatgactataaacatgactacaaagatcatgttaacaattatgcagtaacattataaaccctagtaatctaaaccaatgatataaacatgacacctggagaaatgcaagaatctcttgatatgatgccaacaaagaaccaccaacatccaataggcctagagtaataggtcaaaactacgtttttagccaactatggtagctatatgcctatattgtgggcctcttttcccactcattagattttaggaaattacaagaataagtttttgtgctgcctatagtaagttggtcaataatatttggtgatagtattggtgctttaccgacaacactatctagttattcctaagatcataaattataatcagtgaatagagaaattaggatacatgttcttaacttttttctttttaaaatatagctatttgttgctttgacctctgcatcatcccaaagagggtggcgaccattgcatagcggtgtcttgtagtgtcatcagattgttg

SEQ ID NO: 59757 - DNA, 2047 bp, Zea Mays
cgagcaacagccaacagccaagaactacgactacggtacggccgtccaccgctctaggactacgacaacaagtcctaaccctagccccggtagccgccaccgccaggctctacgactacggcccggccgtccaccgctcggccgtccaccggtccaccgctctacgcgacggctccatcgctcggctgctccaggctccagcgccctccaggctccagcagatcccggaagcaccgaccacggtccacggcgagtcggcgagcagacagcacaggcgcacaacagtgacggcgagcagacagcacaggcgcacagcctccgcgcatccgcggtccgcgtccggccgtgcagccgcgcagatttgccgagtatcaatccgggtccccatttgttggtggttgaagctcgatttctccatggcgcttcgtgcagcttcatgaatccaggttctcaagtgtatttgatcatgattctataaacaaccatcttatattactaatctgtatgagtttttttacatgttggtggttcaagctgaaaaaattaacttaggacaaagctagattgtcttttacatttgtgattggaaggagtaaccgttttcagtatccagtggcagttataaacagttgttgcgcttgtgcagcttcaaatattttgggatgttgccatgttaaggtattagctttttgttgtttcagtatactggcttcctaaaggatcaatgtcggctatctctgatcagaagaaacgcaccttggaagcccttcagcaacagtatactgctgcaaaagctaagaaattgcaagatgaacaggttaagagtcagaagaagagcaattttaatacccctaagcctaaatgtgatgcaccaaggggaagcaaaggtccagaaatcactcctcgacgaacatatgcccaaccttctcataaaggtgtagcattttctagttctaattgtcaacaaaagccttccacgtcctcaggtgaagaaatcaatcctgtgtatgctgaactttcttgtgcttttcatgacactttgtccaaaggtgttgtctcggatttggatggcacagaggttgttcacaatgttatatatgacataattcagaaaggtggagatgctgggaaaattacaaagggtgccaaaaagttgaaactggaaaaagggatccttttggataattatgttcagaggggttctagattagtggattcccaagcaagatctttgttgattcattcaaagcgatcaaaaaggcacatgtctctaaaacaacataagaaatgtggttcatttgatttagatggtacattccacaagtacgacctctataagccaatgcatgagatgtggaaggactatatcagagagcttatggatctgagcccgaaaaagaaatttactgagaaccttctttcagcagatcttcatggggcccttctaatagtggcagaatgcaaagctgcttcatataaaggtgtaaacggcatcatgattcgggatactgcagagacgtttggaattatatccgaggacaaccgcttccgagttgtaccaaaagctggttcagtgttcgtacttcaagcagatcgctggaagttcacactgattggcgacaagctctcgcccagggagaagttgaaggaggatcagcgtcaacaacgtgcacaatcgctaatcagatagtttccaatgtgccagctgttctctcaaaatttttgctccacgaaatacttgcttttgtttagctgttttaccctttttagtttgcctctaacattgaaggtagataatgggtgtctgtttttgcaactattgattttattttacacagcaagatgtaactgcaacggccacgccgtcattgtttaactgtcattcatgctctccatgataaatatatagagttaataggaatgggaatgaggttgacctactaatttgtcactacagaatctgccttcagcggtccactaaaactttagtattgtacatatagggtctgattggtttactgcgtccacacatacagtctcacgtgag

SEQ ID NO: 59758 - DNA, 1959 bp, Zea Mays
gcaacagccaacagccaagaactacgactacggtacggccgtccaccgctctaggactacgacaacaagtcctaaccctagccccggtagccgccaccgccaggctctacgactacggcccggccgtccaccgctcggccgtccaccggtccaccgctctacgcgacggctccatcgctcggctgctccaggctccagcgccctccaggctccagcagatcccggaagcaccgaccacggtccacggcgagtcggcgagcagacagcacaggcgcacaacagtgacggcgagcagacagcacaggcgcacagcctccgcgcatccgcggtccgcgtccggccgtgcagccgcgcagtatactggcttcctaaaggatcaatgtcggctatctctgatcagaagaaacgcaccttggaagcccttcagcaacagtatactgctgcaaaagctaagaaattgcaagatgaacaggttaagagtcagaagaagagcaattttaatacccctaagcctaaatgtgatgcaccaaggggaagcaaaggtccagaaatcactcctcgacgaacatatgcccaaccttctcataaaggtgtagcattttctagttctaattgtcaacaaaagccttccacgtcctcaggtgaagaaatcaatcctgtgtatgctgaactttcttgtgcttttcatgacactttgtccaaaggtgttgtctcggatttggatggcacagaggttgttcacaatgttatatatgacataattcagaaaggtggagatgctgggaaaattacaaagggtgccaaaaagttgaaactggaaaaagggatccttttggataattatgttcagaggggttctagattagtggattcccaagcaagatctttgttgattcattcaaagcgatcaaaaaggcacatgtctctaaaacaacataagaaatgtggttcatttgatttagatggtacattccacaagtacgacctctataagccaatgcatgagatgtggaaggactatatcagagagcttatggatctgagcccgaaaaagaaatttactgagaaccttctttcagcagatcttcatggggcccttctaatagagacgtttggaattatatccgaggacaaccgcttccgagttgtaccaaaagctggttcagtgttcgtacttcaagcagatcgctggaagttcacactgattggcgacaagctctcgcccagggagaagttgaaggaggatcagcgtcaacaacgtgcacaatcgctaatcagatagtttccaatgtgccagctgttctctcaaaatttttgctccacgaaatacttgcttttgtttagctgttttaccctttttagtttgcctctaacattgaaggtagataatgggtgtctgtttttgcaactattgattttattttacacagcaagatgtaactgcaacggccacgccgtcattgtttaactgtcattcatgctctccatgataaatatatagagttaataggaatgggaatgaggttgacctactaatttgtcactacagaatctgccttcagcggtccactaaaactttagtattgtacatatagggtctgattggtttactgcgtccacacatacagtctcacgtgagcctggtcggtcagacaaccaaacaaactcttacccaaagtcaacgcacatgctgattcaggatggaatggtgcgggcaaccaatcatgtggatattcttcaactagatccaggctcgagactagaaaccagctccaggatctgtgagaagtactacactagcattctggcccacagcagtgaggcactgtgggccgctccttcggtagtgtcatatccatggtgtcatgctataagaaaaacaaatagatgaaggcaaagcgattatccgaatggtcaacacaccttaagcaagacattaggttgaagatctacaagaat

SEQ ID NO: 59759 - DNA, 2109 bp, Zea Mays
gcaacagccaacagccaagaactacgactacggtacggccgtccaccgctctaggactacgacaacaagtcctaaccctagccccggtagccgccaccgccaggctctacgactacggcccggccgtccaccgctcggccgtccaccggtccaccgctctacgcgacggctccatcgctcggctgctccaggctccagcgccctccaggctccagcagatcccggaagcaccgaccacggtccacggcgagtcggcgagcagacagcacaggcgcacaacagtgacggcgagcagacagcacaggcgcacagcctccgcgcatccgcggtccgcgtccggccgtgcagccgcgcagatttgccgagtatcaatccgggtccccatttgttggtggttgaagctcgatttctccatggcgcttcgtgcagcttcatgaatccagtatactggcttcctaaaggatcaatgtcggctatctctgatcagaagaaacgcaccttggaagcccttcagcaacagtatactgctgcaaaagctaagaaattgcaagatgaacaggttaagagtcagaagaagagcaattttaatacccctaagcctaaatgtgatgcaccaaggggaagcaaaggtccagaaatcactcctcgacgaacatatgcccaaccttctcataaaggtgtagcattttctagttctaattgtcaacaaaagccttccacgtcctcaggtgaagaaatcaatcctgtgtatgctgaactttcttgtgcttttcatgacactttgtccaaaggtgttgtctcggatttggatggcacagaggttgttcacaatgttatatatgacataattcagaaaggtggagatgctgggaaaattacaaagggtgccaaaaagttgaaactggaaaaagggatccttttggataattatgttcagaggggttctagattagtggattcccaagcaagatctttgttgattcattcaaagcgatcaaaaaggcacatgtctctaaaacaacataagaaatgtggttcatttgatttagatggtacattccacaagtacgacctctataagccaatgcatgagatgtggaaggactatatcagagagcttatggatctgagcccgaaaaagaaatttactgagaaccttctttcagcagatcttcatggggcccttctaatagtggcagaatgcaaagctgcttcatataaaggtgtaaacggcatcatgattcgggatactgcagagacgtttggaattatatccgaggacaaccgcttccgagttgtaccaaaagctggttcagtgttcgtacttcaagcagatcgctggaagttcacactgattggcgacaagctctcgcccagggagaagttgaaggaggatcagcgtcaacaacgtgcacaatcgctaatcagatagtttccaatgtgccagctgttctctcaaaatttttgctccacgaaatacttgcttttgtttagctgttttaccctttttagtttgcctctaacattgaaggtagataatgggtgtctgtttttgcaactattgattttattttacacagcaagatgtaactgcaacggccacgccgtcattgtttaactgtcattcatgctctccatgataaatatatagagttaataggaatgggaatgaggttgacctactaatttgtcactacagaatctgccttcagcggtccactaaaactttagtattgtacatatagggtctgattggtttactgcgtccacacatacagtctcacgtgagcctggtcggtcagacaaccaaacaaactcttacccaaagtcaacgcacatgctgattcaggatggaatggtgcgggcaaccaatcatgtggatattcttcaactagatccaggctcgagactagaaaccagctccaggatctgtgagaagtactacactagcattctggcccacagcagtgaggcactgtgggccgctccttcggtagtgtcatatccatggtgtcatgctataagaaaaacaaatagatgaaggcaaagcgattatccgaatggtcaacacaccttaagcaagacattaggttgaagatctacaagaat

SEQ ID NO: 59760 - DNA, 1702 bp, Zea Mays
caacagccaacagccaagaactacgactacggtacggccgtccaccgctctaggactacgacaacaagtcctaaccctagccccggtagccgccaccgccaggctctacgactacggcccggccgtccaccgctcggccgtccaccggtccaccgctctacgcgacggctccatcgctcggctgctccaggctccagcgccctccaggctccagcagatcccggaagcaccgaccacggtccacggcgagtcggcgagcagacagcacaggcgcacagcctccgcgcatccgcggtccgcgtccggccgtgcagccgcgcagtatactggcttcctaaaggatcaatgtcggctatctctgatcagaagaaacgcaccttggaagcccttcagcaacagtatactgctgcaaaagctaagaaattgcaagatgaacaggttaagagtcagaagaagagcaattttaatacccctaagcctaaatgtgatgcaccaaggggaagcaaaggtccagaaatcactcctcgacgaacatatgcccaaccttctcataaaggtgtagcattttctagttctaattgtcaacaaaagccttccacgtcctcaggtgaagaaatcaatcctgtgtatgctgaactttcttgtgcttttcatgacactttgtccaaaggtgttgtctcggatttggatggcacagaggttgttcacaatgttatatatgacataattcagaaaggtggagatgctgggaaaattacaaagggtgccaaaaagttgaaactggaaaaagggatccttttggataattatgttcagaggggttctagattagtggattcccaagcaagatctttgttgattcattcaaagcgatcaaaaaggcacatgtctctaaaacaacataagaaatgtggttcatttgatttagatggtacattccacaagtacgacctctataagccaatgcatgagatgtggaaggactatatcagagagcttatggatctgagcccgaaaaagaaatttactgagaaccttctttcagcagatcttcatggggcccttctaatagtggcagaatgcaaagctgcttcatataaaggtgtaaacggcatcatgattcgggatactgcagagacgtttggaattatatccgaggacaaccgcttccgagttgtaccaaaagctggttcagtgttcgtacttcaagcagatcgctggaagttcacactgattggcgacaagctctcgcccagggagaagttgaaggaggatcagcgtcaacaacgtgcacaatcgctaatcagatagtttccaatgtgccagctgttctctcaaaatttttgctccacgaaatacttgcttttgtttagctgttttaccctttttagtttgcctctaacattgaaggtagataatgggtgtctgtttttgcaactattgattttattttacacagcaagatgtaactgcaacggccacgccgtcattgtttaactgtcattcatgctctccatgataaatatatagagttaataggaatgggaatgaggttgacctactaatttgtcactacagaatctgccttcagcggtccactaaaactttagtattgtacatatagggtctgattggtttactgcgtccacacatacagtctcacgtgagcctggtcggtcagacaaccaaacaaactcttacc

SEQ ID NO: 59761 - DNA, 1713 bp, Zea Mays
agaactacgactacggtacggccgtccaccgctctaggactacgacaacaagtcctaaccctagccccggtagccgccaccgccaggctctacgactacggcccggccgtccaccgctcggccgtccaccggtccaccgctctacgcgacggctccatcgctcggctgctccaggctccagcgccctccaggctccagcagatcccggaagcaccgaccacggtccacggcgagtcggcgagcagacagcacaggcgcacaacagtgacggcgagcagacagcacaggcgcacagcctccgcgcatccgcggtccgcgtccggccgtgcagccgcgcagtatactggcttcctaaaggatcaatgtcggctatctctgatcagaagaaacgcaccttggaagcccttcagcaacagtatactgctgcaaaagctaagaaattgcaagatgaacaggttaagagtcagaagaagagcaattttaatacccctaagcctaaatgtgatgcaccaaggggaagcaaaggtccagaaatcactcctcgacgaacatatgcccaaccttctcataaaggtgtagcattttctagttctaattgtcaacaaaagccttccacgtcctcaggtgaagaaatcaatcctgtgtatgctgaactttcttgtgcttttcatgacactttgtccaaaggtgttgtctcggatttggatggcacagaggttgttcacaatgttatatatgacataattcagaaaggtggagatgctgggaaaattacaaagggtgccaaaaagttgaaactggaaaaagggatccttttggataattatgttcagaggggttctagattagtggattcccaagcaagatctttgttgattcattcaaagcgatcaaaaaggcacatgtctctaaaacaacataagaaatgtggttcatttgatttagatggtacattccacaagtacgacctctataagccaatgcatgagatgtggaaggactatatcagagagcttatggatctgagcccgaaaaagaaatttactgagaaccttctttcagcagatcttcatggggcccttctaatagaatgcaaagctgcttcatataaaggtgtaaacggcatcatgattcgggatactgcagagacgtttggaattatatccgaggacaaccgcttccgagttgtaccaaaagctggttcagtgttcgtacttcaagcagatcgctggaagttcacactgattggcgacaagctctcgcccagggagaagttgaaggaggatcagcgtcaacaacgtgcacaatcgctaatcagatagtttccaatgtgccagctgttctctcaaaatttttgctccacgaaatacttgcttttgtttagctgttttaccctttttagtttgcctctaacattgaaggtagataatgggtgtctgtttttgcaactattgattttattttacacagcaagatgtaactgcaacggccacgccgtcattgtttaactgtcattcatgctctccatgataaatatatagagttaataggaatgggaatgaggttgacctactaatttgtcactacagaatctgccttcagcggtccactaaaactttagtattgtacatatagggtctgattggtttactgcgtccacacatacagtctcacgtgagcctggtcggtcagacaaccaaacaaactcttacc

SEQ ID NO: 59762 - DNA, 1493 bp, Zea Mays
ctacgactacggtacggccgtccaccgctctaggactacgacaacaagtcctaaccctagccccggtagccgccaccgccaggctctacgactacggcccggccgtccaccgctcggccgtccaccggtccaccgctctacgcgacggctccatcgctcggctgctccaggctccagcgccctccaggctccagcagatcccggaagcaccgaccacggtccacggcgagtcggcgagcagacagcacaggcgcacaacagtgacggcgagcagacagcacaggcgcacagcctccgcgcatccgcggtccgcgtccggccgtgcagccgcgcagtatactggcttcctaaaggatcaatgtcggctatctctgatcagaagaaacgcaccttggaagcccttcagcaacagtatactgctgcaaaagctaagaaattgcaagatgaacaggttaagagtcagaagaagagcaattttaatacccctaagcctaaatgtgatgcaccaaggggaagcaaaggtccagaaatcactcctcgacgaacatatgcccaaccttctcataaaggtgtagcattttctagttctaattgtcaacaaaagccttccacgtcctcagaaaggtggagatgctgggaaaattacaaagggtgccaaaaagttgaaactggaaaaagggatccttttggataattatgttcagaggggttctagattagtggattcccaagcaagatctttgttgattcattcaaagcgatcaaaaaggcacatgtctctaaaacaacataagaaatgtggttcatttgatttagatggtacattccacaagtacgacctctataagccaatgcatgagatgtggaaggactatatcagagagcttatggatctgagcccgaaaaagaaatttactgagaaccttctttcagcagatcttcatggggcccttctaatagagacgtttggaattatatccgaggacaaccgcttccgagttgtaccaaaagctggttcagtgttcgtacttcaagcagatcgctggaagttcacactgattggcgacaagctctcgcccagggagaagttgaaggaggatcagcgtcaacaacgtgcacaatcgctaatcagatagtttccaatgtgccagctgttctctcaaaatttttgctccacgaaatacttgcttttgtttagctgttttaccctttttagtttgcctctaacattgaaggtagataatgggtgtctgtttttgcaactattgattttattttacacagcaagatgtaactgcaacggccacgccgtcattgtttaactgtcattcatgctctccatgataaatatatagagttaataggaatgggaatgaggttgacctactaatttgtcactacagaatctgccttcagcggtccactaaaactttagtattgtacatatagggtctgattggtttactgcgtccacacatacagtctcacgtgag

SEQ ID NO: 59763 - DNA, 1575 bp, Zea Mays
ggactacgacaacaagtcctaaccctagccccggtagccgccaccgccaggctctacgactacggcccggccgtccaccgctcggccgtccaccggtccaccgctctacgcgacggctccatcgctcggctgctccaggctccagcgccctccaggctccagcagatcccggaagcaccgaccacggtccacggcgagtcggcgagcagacagcacaggcgcacaacagtgacggcgagcagacagcacaggcgcacagcctccgcgcatccgcggtccgcgtccggccgtgcagccgcgcagtatactggcttcctaaaggatcaatgtcggctatctctgatcagaagaaacgcaccttggaagcccttcagcaacagtatactgctgcaaaagctaagaaattgcaagatgaacaggttaagagtcagaagaagagcaattttaatacccctaagcctaaatgtgatgcaccaaggggaagcaaaggtccagaaatcactcctcgacgaacatatgcccaaccttctcataaaggtgtagcattttctagttctaattgtcaacaaaagccttccacgtcctcaggatttggatggcacagaggttgttcacaatgttatatatgacataattcagaaaggtggagatgctgggaaaattacaaagggtgccaaaaagttgaaactggaaaaagggatccttttggataattatgttcagaggggttctagattagtggattcccaagcaagatctttgttgattcattcaaagcgatcaaaaaggcacatgtctctaaaacaacataagaaatgtggttcatttgatttagatggtacattccacaagtacgacctctataagccaatgcatgagatgtggaaggactatatcagagagcttatggatctgagcccgaaaaagaaatttactgagaaccttctttcagcagatcttcatggggcccttctaatagtggcagaatgcaaagctgcttcatataaaggtgtaaacggcatcatgattcgggatactgcagagacgtttggaattatatccgaggacaaccgcttccgagttgtaccaaaagctggttcagtgttcgtacttcaagcagatcgctggaagttcacactgattggcgacaagctctcgcccagggagaagttgaaggaggatcagcgtcaacaacgtgcacaatcgctaatcagatagtttccaatgtgccagctgttctctcaaaatttttgctccacgaaatacttgcttttgtttagctgttttaccctttttagtttgcctctaacattgaaggtagataatgggtgtctgtttttgcaactattgattttattttacacagcaagatgtaactgcaacggccacgccgtcattgtttaactgtcattcatgctctccatgataaatatatagagttaataggaatgggaatgaggttgacctactaatttgtcactacagaatctgccttcagcggtccactaaaactttagtattgtacatatagggtctgattggtttactgcgtccacacatacagtctcacgtgag

SEQ ID NO: 59764 - DNA, 1721 bp, Zea Mays
caacaagtcctaaccctagccccggtagccgccaccgccaggctctacgactacggcccggccgtccaccgctcggccgtccaccggtccaccgctctacgcgacggctccatcgctcggctgctccaggctccagcgccctccaggctccagcagatcccggaagcaccgaccacggtccacggcgagtcggcgagcagacagcacaggcgcacaacagtgacggcgagcagacagcacaggcgcacagcctccgcgcatccgcggtccgcgtccggccgtgcagccgcgcagatttgccgagtatcaatccgggtccccatttgttggtggttgaagctcgatttctccatggcgcttcgtgcagcttcatgaatccagtatactggcttcctaaaggatcaatgtcggctatctctgatcagaagaaacgcaccttggaagcccttcagcaacagtatactgctgcaaaagctaagaaattgcaagatgaacaggttaagagtcagaagaagagcaattttaatacccctaagcctaaatgtgatgcaccaaggggaagcaaaggtccagaaatcactcctcgacgaacatatgcccaaccttctcataaaggtgtagcattttctagttctaattgtcaacaaaagccttccacgtcctcaggtgaagaaatcaatcctgtgtatgctgaactttcttgtgcttttcatgacactttgtccaaaggtgttgtctcggatttggatggcacagaggttgttcacaatgttatatatgacataattcagaaaggtggagatgctgggaaaattacaaagggtgccaaaaagttgaaactggaaaaagggatccttttggataattatgttcagaggggttctagattagtggattcccaagcaagatctttgttgattcattcaaagcgatcaaaaaggcacatgtctctaaaacaacataagaaatgtggttcatttgatttagatggtacattccacaagtacgacctctataagccaatgcatgagatgtggaaggactatatcagagagcttatggatctgagcccgaaaaagaaatttactgagaaccttctttcagcagatcttcatggggcccttctaatagaatgcaaagctgcttcatataaaggtgtaaacggcatcatgattcgggatactgcagagacgtttggaattatatccgaggacaaccgcttccgagttgtaccaaaagctggttcagtgttcgtacttcaagcagatcgctggaagttcacactgattggcgacaagctctcgcccagggagaagttgaaggaggatcagcgtcaacaacgtgcacaatcgctaatcagatagtttccaatgtgccagctgttctctcaaaatttttgctccacgaaatacttgcttttgtttagctgttttaccctttttagtttgcctctaacattgaaggtagataatgggtgtctgtttttgcaactattgattttattttacacagcaagatgtaactgcaacggccacgccgtcattgtttaactgtcattcatgctctccatgataaatatatagagttaataggaatgggaatgaggttgacctactaatttgtcactacagaatctgccttcagcggtccactaaaactttagtattgtacatatagggtctgattggtttactgcgtccacacatacagtctcacgtgag

SEQ ID NO: 59765 - DNA, 1376 bp, Zea Mays
ctccctcaacacttcaacaactaacacttgagcaagtatactggcttcctaaaggatcaatgtcggctatctctgatcagaagaaacgcaccttggaagcccttcagcaacagtatactgctgcaaaagctaagaaattgcaagatgaacaggttaagagtcagaagaagagcaattttaatacccctaagcctaaatgtgatgcaccaaggggaagcaaaggtccagaaatcactcctcgacgaacatatgcccaaccttctcataaaggtgtagcattttctagttctaattgtcaacaaaagccttccacgtcctcaggtgaagaaatcaatcctgtgtatgctgaactttcttgtgcttttcatgacactttgtccaaaggtgttgtctcggatttggatggcacagaggttgttcacaatgttatatatgacataattcagaaaggtggagatgctgggaaaattacaaagggtgccaaaaagttgaaactggaaaaagggatccttttggataattatgttcagaggggttctagattagtggattcccaagcaagatctttgttgattcattcaaagcgatcaaaaaggcacatgtctctaaaacaacataagaaatgtggttcatttgatttagatggtacattccacaagtacgacctctataagccaatgcatgagatgtggaaggactatatcagagagcttatggatctgagcccgaaaaagaaatttactgagaaccttctttcagcagatcttcatggggcccttctaatagaatgcaaagctgcttcatataaaggtgtaaacggcatcatgattcgggatactgcagagacgtttggaattatatccgaggacaaccgcttccgagttgtaccaaaagctggttcagtgttcgtacttcaagcagatcgctggaagttcacactgattggcgacaagctctcgcccagggagaagttgaaggaggatcagcgtcaacaacgtgcacaatcgctaatcagatagtttccaatgtgccagctgttctctcaaaatttttgctccacgaaatacttgcttttgtttagctgttttaccctttttagtttgcctctaacattgaaggtagataatgggtgtctgtttttgcaactattgattttattttacacagcaagatgtaactgcaacggccacgccgtcattgtttaactgtcattcatgctctccatgataaatatatagagttaataggaatgggaatgaggttgacctactaatttgtcactacagaatctgccttcagcggtccactaaaactttagtattgtacatatagggtctgattggtttactgcgtccacacatacagtctcacgtgag

SEQ ID NO: 59766 - DNA, 1469 bp, Zea Mays
ctccctcaacacttcaacaactaacacttgagcaagatttgccgagtatcaatccgggtccccatttgttggtggttgaagctcgatttctccatggcgcttcgtgcagcttcatgaatccagtatactggcttcctaaaggatcaatgtcggctatctctgatcagaagaaacgcaccttggaagcccttcagcaacagtatactgctgcaaaagctaagaaattgcaagatgaacaggttaagagtcagaagaagagcaattttaatacccctaagcctaaatgtgatgcaccaaggggaagcaaaggtccagaaatcactcctcgacgaacatatgcccaaccttctcataaaggtgtagcattttctagttctaattgtcaacaaaagccttccacgtcctcaggtgaagaaatcaatcctgtgtatgctgaactttcttgtgcttttcatgacactttgtccaaaggtgttgtctcggatttggatggcacagaggttgttcacaatgttatatatgacataattcagaaaggtggagatgctgggaaaattacaaagggtgccaaaaagttgaaactggaaaaagggatccttttggataattatgttcagaggggttctagattagtggattcccaagcaagatctttgttgattcattcaaagcgatcaaaaaggcacatgtctctaaaacaacataagaaatgtggttcatttgatttagatggtacattccacaagtacgacctctataagccaatgcatgagatgtggaaggactatatcagagagcttatggatctgagcccgaaaaagaaatttactgagaaccttctttcagcagatcttcatggggcccttctaatagtggcagaatgcaaagctgcttcatataaaggtgtaaacggcatcatgattcgggatactgcagagacgtttggaattatatccgaggacaaccgcttccgagttgtaccaaaagctggttcagtgttcgtacttcaagcagatcgctggaagttcacactgattggcgacaagctctcgcccagggagaagttgaaggaggatcagcgtcaacaacgtgcacaatcgctaatcagatagtttccaatgtgccagctgttctctcaaaatttttgctccacgaaatacttgcttttgtttagctgttttaccctttttagtttgcctctaacattgaaggtagataatgggtgtctgtttttgcaactattgattttattttacacagcaagatgtaactgcaacggccacgccgtcattgtttaactgtcattcatgctctccatgataaatatatagagttaataggaatgggaatgaggttgacctactaatttgtcactacagaatctgccttcagcggtccactaaaactttagtattgtacatatagggtctgattggtttactgcgtccacacatacagtctcacgtgag

SEQ ID NO: 59767 - DNA, 1382 bp, Zea Mays
ctccctcaacacttcaacaactaacacttgagcaagtatactggcttcctaaaggatcaatgtcggctatctctgatcagaagaaacgcaccttggaagcccttcagcaacagtatactgctgcaaaagctaagaaattgcaagatgaacaggttaagagtcagaagaagagcaattttaatacccctaagcctaaatgtgatgcaccaaggggaagcaaaggtccagaaatcactcctcgacgaacatatgcccaaccttctcataaaggtgtagcattttctagttctaattgtcaacaaaagccttccacgtcctcaggtgaagaaatcaatcctgtgtatgctgaactttcttgtgcttttcatgacactttgtccaaaggtgttgtctcggatttggatggcacagaggttgttcacaatgttatatatgacataattcagaaaggtggagatgctgggaaaattacaaagggtgccaaaaagttgaaactggaaaaagggatccttttggataattatgttcagaggggttctagattagtggattcccaagcaagatctttgttgattcattcaaagcgatcaaaaaggcacatgtctctaaaacaacataagaaatgtggttcatttgatttagatggtacattccacaagtacgacctctataagccaatgcatgagatgtggaaggactatatcagagagcttatggatctgagcccgaaaaagaaatttactgagaaccttctttcagcagatcttcatggggcccttctaatagtggcagaatgcaaagctgcttcatataaaggtgtaaacggcatcatgattcgggatactgcagagacgtttggaattatatccgaggacaaccgcttccgagttgtaccaaaagctggttcagtgttcgtacttcaagcagatcgctggaagttcacactgattggcgacaagctctcgcccagggagaagttgaaggaggatcagcgtcaacaacgtgcacaatcgctaatcagatagtttccaatgtgccagctgttctctcaaaatttttgctccacgaaatacttgcttttgtttagctgttttaccctttttagtttgcctctaacattgaaggtagataatgggtgtctgtttttgcaactattgattttattttacacagcaagatgtaactgcaacggccacgccgtcattgtttaactgtcattcatgctctccatgataaatatatagagttaataggaatgggaatgaggttgacctactaatttgtcactacagaatctgccttcagcggtccactaaaactttagtattgtacatatagggtctgattggtttactgcgtccacacatacagtctcacgtgag

SEQ ID NO: 59768 - DNA, 1724 bp, Zea Mays
ctccctcaacacttcaacaactaacacttgagcaagatttgccgagtatcaatccgggtccccatttgttggtggttgaagctcgatttctccatggcgcttcgtgcagcttcatgaatccaggttctcaagtgtatttgatcatgattctataaacaaccatcttatattactaatctgtatgagtttttttacatgttggtggttcaagctgaaaaaattaacttaggacaaagctagattgtcttttacatttgtgattggaaggagtaaccgttttcagtatccagtggcagttataaacagttgttgcgcttgtgcagcttcaaatattttgggatgttgccatgttaaggtattagctttttgttgtttcagtatactggcttcctaaaggatcaatgtcggctatctctgatcagaagaaacgcaccttggaagcccttcagcaacagtatactgctgcaaaagctaagaaattgcaagatgaacaggttaagagtcagaagaagagcaattttaatacccctaagcctaaatgtgatgcaccaaggggaagcaaaggtccagaaatcactcctcgacgaacatatgcccaaccttctcataaaggtgtagcattttctagttctaattgtcaacaaaagccttccacgtcctcaggtgaagaaatcaatcctgtgtatgctgaactttcttgtgcttttcatgacactttgtccaaaggtgttgtctcggatttggatggcacagaggttgttcacaatgttatatatgacataattcagaaaggtggagatgctgggaaaattacaaagggtgccaaaaagttgaaactggaaaaagggatccttttggataattatgttcagaggggttctagattagtggattcccaagcaagatctttgttgattcattcaaagcgatcaaaaaggcacatgtctctaaaacaacataagaaatgtggttcatttgatttagatggtacattccacaagtacgacctctataagccaatgcatgagatgtggaaggactatatcagagagcttatggatctgagcccgaaaaagaaatttactgagaaccttctttcagcagatcttcatggggcccttctaatagtggcagaatgcaaagctgcttcatataaaggtgtaaacggcatcatgattcgggatactgcagagacgtttggaattatatccgaggacaaccgcttccgagttgtaccaaaagctggttcagtgttcgtacttcaagcagatcgctggaagttcacactgattggcgacaagctctcgcccagggagaagttgaaggaggatcagcgtcaacaacgtgcacaatcgctaatcagatagtttccaatgtgccagctgttctctcaaaatttttgctccacgaaatacttgcttttgtttagctgttttaccctttttagtttgcctctaacattgaaggtagataatgggtgtctgtttttgcaactattgattttattttacacagcaagatgtaactgcaacggccacgccgtcattgtttaactgtcattcatgctctccatgataaatatatagagttaataggaatgggaatgaggttgacctactaatttgtcactacagaatctgccttcagcggtccactaaaactttagtattgtacatatagggtctgattggtttactgcgtccacacatacagtctcacgtgag

SEQ ID NO: 59769 - DNA, 1788 bp, Zea Mays
aaaccccccccccccccaagtggcctcggccttcctcacacagtccgatccagcccaaccgaacccaaaagtctagcatatgggaacctgagccctcaaaccccgccccttggcctcccctaccgtccacgccgaacacccgccgttctcaaaactgggctcctccccttttgtgattggacttaagtgggattcatatatcaggagtttggattcttctctttcctctgctggtgaggacgtcgatcttcttctttttgtgttgtttcccccctttatcttcacattcagcgatcttcaaattcaatctgttgtctgtcggattggcgctctagtctggtgggtttgctttcagatttgccgagtatcaatccgggtccccatttgttggtggttgaagctcgatttctccatggcgcttcgtgcagcttcatgaatccagtatactggcttcctaaaggatcaatgtcggctatctctgatcagaagaaacgcaccttggaagcccttcagcaacagtatactgctgcaaaagctaagaaattgcaagatgaacaggttaagagtcagaagaagagcaattttaatacccctaagcctaaatgtgatgcaccaaggggaagcaaaggtccagaaatcactcctcgacgaacatatgcccaaccttctcataaaggtgtagcattttctagttctaattgtcaacaaaagccttccacgtcctcaggtgaagaaatcaatcctgtgtatgctgaactttcttgtgcttttcatgacactttgtccaaaggtgttgtctcggatttggatggcacagaggttgttcacaatgttatatatgacataattcagaaaggtggagatgctgggaaaattacaaagggtgccaaaaagttgaaactggaaaaagggatccttttggataattatgttcagaggggttctagattagtggattcccaagcaagatctttgttgattcattcaaagcgatcaaaaaggcacatgtctctaaaacaacataagaaatgtggttcatttgatttagatggtacattccacaagtacgacctctataagccaatgcatgagatgtggaaggactatatcagagagcttatggatctgagcccgaaaaagaaatttactgagaaccttctttcagcagatcttcatggggcccttctaatagtggcagaatgcaaagctgcttcatataaaggtgtaaacggcatcatgattcgggatactgcagagacgtttggaattatatccgaggacaaccgcttccgagttgtaccaaaagctggttcagtgttcgtacttcaagcagatcgctggaagttcacactgattggcgacaagctctcgcccagggagaagttgaaggaggatcagcgtcaacaacgtgcacaatcgctaatcagatagtttccaatgtgccagctgttctctcaaaatttttgctccacgaaatacttgcttttgtttagctgttttaccctttttagtttgcctctaacattgaaggtagataatgggtgtctgtttttgcaactattgattttattttacacagcaagatgtaactgcaacggccacgccgtcattgtttaactgtcattcatgctctccatgataaatatatagagttaataggaatgggaatgaggttgacctactaatttgtcactacagaatctgccttcagcggtccactaaaactttagtattgtacatatagggtctgattggtttactgcgtccacacatacagtctcacgtgag

SEQ ID NO: 59770 - DNA, 1439 bp, Zea Mays
cgtcgctgattccttttgggagatgggagacgtgttgattccaagcctacggtgtgggaacttatctgtgacgatatgcgtccgtgtttctcggttttgggacttttctgatcctcaggatgatgcaaggctgttacactgtgatatggtgttgctcgacgaagagggaaatagcatacatgctacgatatacccacccttcatagagaaattcaggccactcataaaagaaggtagcgtgtacaacatgacatactttcgagttcgagcatcaaacaacttgtacaagccagttccaaatgatatcatgattaccttcacgaattggaaaaagttagagcaagttattgagattcctcctgcatttcctacacttacatactccctcactcacatagaccagatccattcgcgcatcgaccataaagactactatacagatgccattgggatagttacttcagtctcgaatgtttcgccacatcgctcaaaaggacagcaagcttccagcttgaagaggaacatttccatatgcagtgcaagcagaggtgcttcggtcaatgtcgtgttgtggggtgcccaagccaccctattcccaggagagcgcatatacgagaatgggcagaattccccacagattgtgctatttgttggcacgctcgtcaaaaaatatgcagatggtctttgtctgactggaagctcaccatgtaagtggtacatcaatccatccattcctgaggcagaaacccttatgtccagcgcacgcggtgatcataaaccagtgaagtggaatgcaactgtcacttcgagccagcttatatctcctgttgctgaggagcaaaaggtgtcgtatatcaagtatctccatccctttgaaaacaagggaaaggagttcttggttactgtcactataaggaaaattgacaacaagtggtggtataactcatgcagaaaatgtgcctgcacagctgtcactcacggagactcttacaaatgcacaaaccgtgattgcgctaacattgctatgcccgtccaaaggagacgagacagctgacacagacttcattctctttgggcgcgtggctcaaagaattgtcaaaagaccttgcgatatgctcatagcgaacactccatcaggcttcattccagatgcaatcacgaagctgcttgaaaggacgttcgtttggaacgttagcttctctgggcacacaattaactctggaaacgtctgcttccaggtcaatgctaccataaaggaactaggcaatcagaatgttgacatttcaacgtcaaccgcagggacacaacagtcttcgtttatgttctcacagggtgcaagcagcagcatgaaagacactcctcacaagacagacaccttgtcttcacctctgacacctttgacgcctcagggtagcatcgccactacaaagtatttggta

SEQ ID NO: 59771 - DNA, 1458 bp, Zea Mays
gtcgctgattccttttgggagatgggagacgtgttgattccaagcctacggtgtgggaacttatctgtgacgatatgcgtccgtgtttctcggttttgggacttttctgatcctcaggatgatgcaaggctgttacactgtgatatggtgttgctcgacgaagagggaaatagcatacatgctacgatatacccacccttcatagagaaattcaggccactcataaaagaaggtagcgtgtacaacatgacatactttcgagttcgagcatcaaacaacttgtacaagccagttccaaatgatatcatgattaccttcacgaattggaaaaagttagagcaagttattgagattcctcctgcatttcctacacttacatactccctcactcacatagaccagatccattcgcgcatcgaccataaagactactatacagatgccattgggatagttacttcagtctcgaatgtttcgccacatcgctcaaaaggacagcaagcttccagcttgaagaggaacatttccatatgcagtgcaagaggtgcttcggtcaatgtcgtgttgtggggtgcccaagccaccctattcccaggagagcgcatatacgagaatgggcagaattccccacagattgtgctatttgttggcacgctcgtcaaaaaatatgcagatggtctttgtctgactggaagctcaccatgtaagtggtacatcaatccatccattcctgaggcagaaacccttatgtccagcgcacgcggtgatcataaaccagtgaagtggaatgcaactgtcacttcgagccagcttatatctcctgttgctgaggagcaaaaggtgtcgtatatcaagtatctccatccctttgaaaacaagggaaaggagttcttggttactgtcactataaggaaaattgacaacaagtggtggtataactcatgcagaaaatgtgcctgcacagctgtcactcacggagactcttacaaatgcacaaaccgtgattgcgctaacattgctatgcccgtccaaaggtataaaatacttgtcatcgcaggagacgagacagctgacacagacttcattctctttgggcgcgtggctcaaagaattgtcaaaagaccttgcgatatgctcatagcgaacactccatcaggcttcattccagatgcaatcacgaagctgcttgaaaggacgttcgtttggaacgttagcttctctgggcacacaattaactctggaaacgtctgcttccaggtcaatgctaccataaaggaactaggcaatcagaatgttgacatttcaacgtcaaccgcagggacacaacagtcttcgtttatgttctcacagggtgcaagcagcagcatgaaagacactcctcacaagacagacaccttgtcttcacctctgacacctttgacgcctcagggtagcatcgccactacaaagtatttggta

SEQ ID NO: 59772 - DNA, 1422 bp, Zea Mays
ctgattccttttgggagatgggagacgtgttgattccaagcctacggtgtgggaacttatctgtgacgatatgcgtccgtgtttctcggttttgggacttttctgatcctcaggatgatgcaaggctgttacactgtgatatggtgttgctcgacgaagagggaaatagcatacatgctacgatatacccacccttcatagagaaattcaggccactcataaaagaaggtagcgtgtacaacatgacatactttcgagttcgagcatcaaacaacttgtacaagccagttccaaatgatatcatgattaccttcacgaattggaaaaagttagagcaagttattgagattcctcctgcatttcctacacttacatactccctcactcacatagaccagatccattcgcgcatcgaccataaagactactatacagatgccattgggatagttacttcagtctcgaatgtttcgccacatcgctcaaaaggacagcaagcttccagcttgaagaggaacatttccatatgcagtgcaagcagaggtgcttcggtcaatgtcgtgttgtggggtgcccaagccaccctattcccaggagagcgcatatacgagaatgggcagaattccccacagattgtgctatttgttggcacgctcgtcaaaaaatatgcagtggtacatcaatccatccattcctgaggcagaaacccttatgtccagcgcacgcggtgatcataaaccagtgaagtggaatgcaactgtcacttcgagccagcttatatctcctgttgctgaggagcaaaaggtgtcgtatatcaagtatctccatccctttgaaaacaagggaaaggagttcttggttactgtcactataaggaaaattgacaacaagtggtggtataactcatgcagaaaatgtgcctgcacagctgtcactcacggagactcttacaaatgcacaaaccgtgattgcgctaacattgctatgcccgtccaaaggtataaaatacttgtcatcgcaggagacgagacagctgacacagacttcattctctttgggcgcgtggctcaaagaattgtcaaaagaccttgcgatatgctcatagcgaacactccatcaggcttcattccagatgcaatcacgaagctgcttgaaaggacgttcgtttggaacgttagcttctctgggcacacaattaactctggaaacgtctgcttccaggtcaatgctaccataaaggaactaggcaatcagaatgttgacatttcaacgtcaaccgcagggacacaacagtcttcgtttatgttctcacagggtgcaagcagcagcatgaaagacactcctcacaagacagacaccttgtcttcacctctgacacctttgacgcctcagggtagcatcgccactacaaagtatttggta

SEQ ID NO: 59773 - DNA, 1435 bp, Zea Mays
cccaaccctgcaaccacggaaacagaattcaaaaccgcaaaaacaacaccgcaacagccaggcagccaccaggcaccagcaaacagcagcgagccagcaaggatccccaccccccacgcacaacaaattccccatctccccgtccccgtagcacgcgcgtccttctgccttcgccatggcctctgcacccactccgccgcccctcctcccggtgacaaaccccgcccccggatcgtccccggccgccgccggaggctccgacgcgccgatcgctacgccggcattccggctcttactgagccggctctccgacacggcgcggcgctcgctgtccgatcgccggccgtggggagagctcctcgaccgttcggcgttctcgaagccggactctctctccgacgccacctcccgtctgcgccgcaacctcgcctacttccgcgtcaactacgccgccgtggtcgccttcgcgctgggggcctcgctgctggcgcaccctttctcgctcctcatcctcctgggcctcctcgccgcctggtgcttcctctacctcttccgcgcgtccgaccagcctgtcgccctcttcggccgagccttctccgaccgcgagacgctgctggggctcgtcggcgcgtccttcgtcctgctgttcttcacctccgtcgcgtcgctcatcatctccgggctgctcgtcggcggggccctcgtcgcggcgcacggcgcgttccgcgtgcccgaggacctcttcctcgacgagcccaacgcggcccccggcaacagcgcggcccaagggctgctttcattccttggcgcacccggatctggggtttgaggcggcggacggcaagatctgatctactggcttagtgctggtttcgattgatgcaccggcttctgcgaagatcagcaaattcatcgagattttaacatatggttgagtttagtgccaagtatacgagtttgtggtgtcagactttcaatatggattgtatcttcattcgcaagcattgatgatacgttaatatgcttcattcgttcaatgttcgattagtatttctttttgctatacttggtatatgtttgtggaaactcatgataatttctgaccatgagttctgaggggtggcttgcgatgatgcattgattttacctcatacatgttgttagatggtgtatgtcttctctttaaaatcatactggagtatgataaattgtttgatcatctactattgcttcaactttgccttgttaactgctgatgttgtctgaaataagattttaagcaagaatggacaatcagttctaacagatctcaatcggttttcgtccaagttagagctggtcgttaatctaatgagctggctcggttcagcatgttaaattaacgagctacaaaattagctcgctcatttacgagttcgagccggctcgtttaatt

SEQ ID NO: 59774 - DNA, 923 bp, Zea Mays
agcacgcgcgtccttctgccttcgccatggcctctgcacccactccgccgcccctcctcccggtgacaaaccccgcccccggatcgtccccggccgccgccggaggctccgacgcgccgatcgctacgccggcattccggctcttactgagccggctctccgacacggcgcggcgctcgctgtccgatcgccggccgtggggagagctcctcgaccgttcggcgttctcgaagccggactctctctccgacgccacctcccgtctgcgccgcaacctcgcctacttccgcgtcaactacgccgccgtggtcgccttcgcgctgggggcctcgctgctggcgcaccctttctcgctcctcatcctcctgggcctcctcgccgcctggtgcttcctctacctcttccgcgcgtccgaccagcctgtcgccctcttcggccgagccttctccgaccgcgagacgctgctggggctcgtcggcgcgtccttcgtcctgctgttcttcacctccgtcgcgtcgctcatcatctccgggctgctcgtcggcggggccctcgtcgcggcgcacggcgcgttccgcgtgcccgaggacctcttcctcgacgagcccaacgcggcccccggcaacagcgcggcccaagggctgctttcattccttggcgcacccggatctggggtttgaggcggcggacggcaagatctggtagggtccttgggctcgactagttcgtattaagctggaaattttgtggatctagtcttgtagctgtagcttattgcttgccctgttcctcttcatgtgcctacagatctactggcttagtgctggtttcgattgatgcaccggcttctgcgaagatcagcaaattcatcgagattttaacatatggaggcgctagcgttggcatcattcatcgacgacgag

SEQ ID NO: 59775 - DNA, 3728 bp, Zea Mays
ccccacttgcttacgcgagacgcgacaccaatacgccatccactgatccacctcgccttctgcttccttcagcggttccgcccatcgactcgacagatccttgttcacgacctcaccctattcagatcccaagcggccacgcccaagcccaaaccctacccacccatctcaagttctcaaccagcgatgatggcagcggagccctcgccgtcggttccctccaccgccgctgaagacatggaaaccctcgccctcgactcatcctcgtcgtccgccgccgctacggcctccgcctccgaccccctccttcggccacctacctccccgaccgccgccgcgagcgacgaccccttcgtcatcgacgacttcctcgacgaggacgacttcaccgccccgccgcccagcgtcgccggcccgccgcccgccgtgcttggcgatgcggcgtccccagtgttccccaagatcaccgtatccgatcccaagaagcacgccgagcctagcggcgggggtgctgccggtgtgatcccagggtccggcagctacttttcttacctcatcaccacacgttttgcgggcggcggtggggaagtccgcgtgcggcggcgcttccgcgacgtggtggccctcgcggacggccttgccgcagctcaccgcggcctatttgtcccggcccggcccgacaaaagcgtcctcgaggggcaggtcttgcaacgccacaacttcgtgagccagcggtgcgctgcgctccagcgttacctctgccgccttgccgcgcaccccatcgtcggccagagccctggtctccgcacgttcctcacggagcctggtgccatccccgccttccagagtgaggcaccgcggtactggacaaccacggtgaatgctgctgctccgatggttcagatgaaagctgggagggacttgtttgggatgtttaagggtctcaagcagacgatggtgaatgggatggttgcaacaaagcctccacctgtggagcaggagacagatacagagttcctggcgcacaaggccaggttcgaggacttacaacagcagcttaccacaacatcacagcaggctgaagcgctcgttaaagcccaagatggttatagagaaactacaggtcacttgggaatgacattgattaagctggcaaaatttgaaagagagcaggcaacatgtaactccctaagaagacggtctggtgaaatccataactttgcaaattctgttttgaagatgagcaggtcacagataaaattgaactctgaaattgtgaaacacctgggtagtatccatgaatatttggagatgatgatatcagttcatcatgcatttacagatcgctctaatgctttacattacgtgcaaattctgtcagcagatttgttttccttgcatatcagggcaaggagacttgaatcgtcgtcagcaagagatatggggcacgagtggtcaacatatcagaaagtagaggggttgaaagaaacaataagatcagcggaagcagccaaaagtgatgcagttagagaatatgaaagtattaagatatggcaaattcagcataagggcagacctagtaccggaggctccagaggcttggggtctggagaagggataaattgaggaaaacaacaagattgaaataaaaagatttgacaaggaaagacgccacgatttcatcgagatgctgaaaggttttgtgataactcaggtgtcttattcagaccattttgctaacatgtggacaaaggtaacggaggaaacagaagtatatgcaaacaggagcagctgatgtacgtatagggagtgtagaatagttgattttgatctatttaatttgctccaacatccaacgacaacaatcattcttattcttccccagttttgtcaccttgagttggttgtaaacttgtaatgccacatgagtcatgtgcagtcgtgaaattgggtcccggcagatgagcttctgtgctacccgagaactggcatgtgtatgtgagaaccatacgcaaacgtggtttaggttgaaaaataatggcgatactagaaatttgacagcgtagttctgtaaaggaaggctcgcaggtccggctgttgcaaacgccaaaaagttctctctagagccagatgtttctcagagagtgatcaggggcgatatggtaggcaagatagtttgtttctcgaagaacttctttgtttcgtactggccagcagccagcagccagctatgtgctctggtatgttcgtccagtatactcgtgctccgtgcatgagaaagaggtgtcatcacgctgtgatgactagccacgtgtgcatggatactaatgcacgtggcatctattccaggagctgtctgcgcgtatatagggagcgcacttatctccacttctgtctgtgcgacaagcgactttatttcaagaagacagaagaagggagagtcgtactgaggtgtaagaatggcgagtgcacaggcagtggggcaaggagaacgaggccacttcgttctgaagagcggacacaccattccggccgttggtctaggcacttggagggccggctcagataccgctcactctgttcggaccgccatcgccgaggtcggtagaggacttaaagctgcgatggagggcgggatcaacaggaaagatttgtttgtgacgtcgaagctatggtgcaccgagctggctcctgatagggttcggccagcactcgagaaaacactcaaggacttgcagctggattacctggatctctaccttatccactggcccttcaggctgaaagacggggcgcacatgcccccggaagccggggaggtgctggagttcgatatggaaggggtgtggagggagatggaaggcctcgtgaaagacgggctcgtcaaggatataggtgtctgcaattacacggtcgccaagctcaaccgcctgatgcggtcagcgaatgttccaccggcagtgtgccagatggaaatgcaccctgggtggaagaacgacaggatctttgaggcatgcaagaagcatgggatccatgttactgcttactctccgctgggttcgtcagagaagaacctagcgcacgacccgctcgtcgaaaaggtagccaacaaactggacaagaccccggggcaggtgctcctcaggtgggcgctccagagggggacaagcgtcatccctaaatcgaccagggacgaaaggatcaaagagaacatccaggtgttcgggtgggagatccctgaggaggacttcagggccctgtgcggcatcaaagatgagaagcgcgtgctgaccggagaggagctcttcgtcaacaagacccacgggccgtacaagagcgcaaccgaggtgtgggaccacgaggactgagctgagctgccgtgccgccggatgcctcccactcccacctgatgaaccagaataaaggataccgacgcacctgtcagtcacctccttccccgtgccttgtgagagcggcagcctctcgcacagggaagatgctctgtgagagcagcagcctcgcacgagaaagatgtagaagagtgtgtgcgcaacacactcctgtactgtacgatagactgaataataaagaagaaaacgatccacatctcatgcaaactgcaatctgcagagtgcaacgcagcgccggccgaaccaagtttttgtaggatcgaaatgtgctgtctcgcctcgcgcaccaaagcactatgtttggaccactgaaaaaac

SEQ ID NO: 59776 - DNA, 3979 bp, Zea Mays
ccccacttgcttacgcgagacgcgacaccaatacgccatccactgatccacctcgccttctgcttccttcagcggttccgcccatcgactcgacagatccttgttcacgacctcaccctattcagatcccaagcggccacgcccaagcccaaaccctacccacccatctcaagttctcaaccagcgatgatggcagcggagccctcgccgtcggttccctccaccgccgctgaagacatggaaaccctcgccctcgactcatcctcgtcgtccgccgccgctacggcctccgcctccgaccccctccttcggccacctacctccccgaccgccgccgcgagcgacgaccccttcgtcatcgacgacttcctcgacgaggacgacttcaccgccccgccgcccagcgtcgccggcccgccgcccgccgtgcttggcgatgcggcgtccccagtgttccccaagatcaccgtatccgatcccaagaagcacgccgagcctagcggcgggggtgctgccggtgtgatcccagggtccggcagctacttttcttacctcatcaccacacgttttgcgggcggcggtggggaagtccgcgtgcggcggcgcttccgcgacgtggtggccctcgcggacggccttgccgcagctcaccgcggcctatttgtcccggcccggcccgacaaaagcgtcctcgaggggcaggtcttgcaacgccacaacttcgtgagccagcggtgcgctgcgctccagcgttacctctgccgccttgccgcgcaccccatcgtcggccagagccctggtctccgcacgttcctcacggagcctggtgccatccccgccttccagagtgaggcaccgcggtactggacaaccacggtgaatgctgctgctccgatggttcagatgaaagctgggagggacttgtttgggatgtttaagggtctcaagcagacgatggtgaatgggatggttgcaacaaagcctccacctgtggagcaggagacagatacagagttcctggcgcacaaggccaggttcgaggacttacaacagcagcttaccacaacatcacagcaggctgaagcgctcgttaaagcccaagatggttatagagaaactacaggtcacttgggaatgacattgattaagctggcaaaatttgaaagagagcaggcaacatgtaactccctaagaagacggtctggtgaaatccataactttgcaaattctgttttgaagatgagcaggtcacagataaaattgaactctgaaattgtgaaacacctgggtagtatccatgaatatttggagatgatgatatcagttcatcatgcatttacagatcgctctaatgctttacattacgtgcaaattctgtcagcagatttgttttccttgcatatcagggcaaggagacttgaatcgtcgtcagcaagagatatggggcacgagtggtcaacatatcagaaagtagaggggttgaaagaaacaataagatcagcggaagcagccaaaagtgatgcagttagagaatatgaaagtattaaggttagttgcctgaaacaatgtaataataatgttccataaaaaactaaggagcttgaacttacctaggaaaattacgtaaacatacaccgaatggtattaggtgccgaaaaagaagtgtgcacctcttaccttctattgttgttgtgccatgattttaatctttacatcaaattagcagatatggcaaattcagcataagggcagacctagtaccggaggctccagaggcttggggtctggagaagggataaattgaggaaaacaacaagattgaaataaaaagatttgacaaggaaagacgccacgatttcatcgagatgctgaaaggttttgtgataactcaggtgtcttattcagaccattttgctaacatgtggacaaaggtaacggaggaaacagaagtatatgcaaacaggagcagctgatgtacgtatagggagtgtagaatagttgattttgatctatttaatttgctccaacatccaacgacaacaatcattcttattcttccccagttttgtcaccttgagttggttgtaaacttgtaatgccacatgagtcatgtgcagtcgtgaaattgggtcccggcagatgagcttctgtgctacccgagaactggcatgtgtatgtgagaaccatacgcaaacgtggtttaggttgaaaaataatggcgatactagaaatttgacagcgtagttctgtaaaggaaggctcgcaggtccggctgttgcaaacgccaaaaagttctctctagagccagatgtttctcagagagtgatcaggggcgatatggtaggcaagatagtttgtttctcgaagaacttctttgtttcgtactggccagcagccagcagccagctatgtgctctggtatgttcgtccagtatactcgtgctccgtgcatgagaaagaggtgtcatcacgctgtgatgactagccacgtgtgcatggatactaatgcacgtggcatctattccaggagctgtctgcgcgtatatagggagcgcacttatctccacttctgtctgtgcgacaagcgactttatttcaagaagacagaagaagggagagtcgtactgaggtgtaagaatggcgagtgcacaggcagtggggcaaggagaacgaggccacttcgttctgaagagcggacacaccattccggccgttggtctaggcacttggagggccggctcagataccgctcactctgttcggaccgccatcgccgaggctggatataggcacgtggacacagctgcccaatacggagtagagaaagaggtcggtagaggacttaaagctgcgatggagggcgggatcaacaggaaagatttgtttgtgacgtcgaagctatggtacctacactacacgcagggagtgcaccgagctggctcctgatagggttcggccagcactcgagaaaacactcaaggacttgcagctggattacctggatctctaccttatccactggcccttcaggctgaaagacggggcgcacatgcccccggaagccggggaggtgctggagttcgatatggaaggggtgtggagggagatggaaggcctcgtgaaagacgggctcgtcaaggatataggtgtctgcaattacacggtcgccaagctcaaccgcctgatgcggtcagcgaatgttccaccggcagtgtgccagatggaaatgcaccctgggtggaagaacgacaggatctttgaggcatgcaagaagcatgggatccatgttactgcttactctccgctgggttcgtcagagaagaacctagcgcacgacccgctcgtcgaaaaggtagccaacaaactggacaagaccccggggcaggtgctcctcaggtgggcgctccagagggggacaagcgtcatccctaaatcgaccagggacgaaaggatcaaagagaacatccaggtgttcgggtgggagatccctgaggaggacttcagggccctgtgcggcatcaaagatgagaagcgcgtgctgaccggagaggagctcttcgtcaacaagacccacgggccgtacaagagcgcaaccgaggtgtgggaccacgaggactgagctgagctgccgtgccgccggatgcctcccactcccacctgatgaaccagaataaaggataccgacgcacctgtcagtcacctccttccccgtgccttgtgagagcggcagcctctcgcacagggaagatgctctgtgagagcagcagcctcgcacgagaaagatgtagaagagtgtgtgcgcaacacactcctgtactgtacgatagactgaataataaagaagaaaacgatccacatctcatgcaaactgcaatctgcagagtgcaacgcagcgccggccgaaccaagtttttgtaggatcgaaatgtgctgtctcgcctcgcgcaccaaagcactatgtttggaccactgaaaaaac

SEQ ID NO: 59777 - DNA, 3700 bp, Zea Mays
ccccacttgcttacgcgagacgcgacaccaatacgccatccactgatccacctcgccttctgcttccttcagcggttccgcccatcgactcgacagatccttgttcacgacctcaccctattcagatcccaagcggccacgcccaagcccaaaccctacccacccatctcaagttctcaaccagcgatgatggcagcggagccctcgccgtcggttccctccaccgccgctgaagacatggaaaccctcgccctcgactcatcctcgtcgtccgccgccgctacggcctccgcctccgaccccctccttcggccacctacctccccgaccgccgccgcgagcgacgaccccttcgtcatcgacgacttcctcgacgaggacgacttcaccgccccgccgcccagcgtcgccggcccgccgcccgccgtgcttggcgatgcggcgtccccagtgttccccaagatcaccgtatccgatcccaagaagcacgccgagcctagcggcgggggtgctgccggtgtgatcccagggtccggcagctacttttcttacctcatcaccacacgttttgcgggcggcggtggggaagtccgcgtgcggcggcgcttccgcgacgtggtggccctcgcggacggccttgccgcagctcaccgcggcctatttgtcccggcccggcccgacaaaagcgtcctcgaggggcaggtcttgcaacgccacaacttcgtgagccagcggtgcgctgcgctccagcgttacctctgccgccttgccgcgcaccccatcgtcggccagagccctggtctccgcacgttcctcacggagcctggtgccatccccgccttccagagtgaggcaccgcggtactggacaaccacggtgaatgctgctgctccgatggttcagatgaaagctgggagggacttgtttgggatgtttaagggtctcaagcagacgatggtgaatgggatggttgcaacaaagcctccacctgtggagcaggagacagatacagagttcctggcgcacaaggccaggttcgaggacttacaacagcagcttaccacaacatcacagcaggctgaagcgctcgttaaagcccaagatggttatagagaaactacaggtcacttgggaatgacattgattaagctggcaaaatttgaaagagagcaggcaacatgtaactccctaagaagacggtctggtgaaatccataactttgcaaattctgttttgaagatgagcaggtcacagataaaattgaactctgaaattgtgaaacacctgggtagtatccatgaatatttggagatgatgatatcagttcatcatgcatttacagatcgctctaatgctttacattacgtgcaaattctgtcagcagatttgttttccttgcatatcagggcaaggagacttgaatcgtcgtcagcaagagatatggggcacgagtggtcaacatatcagaaagtagaggggttgaaagaaacaataagatcagcggaagcagccaaaagtgatgcagttagagaatatgaaagtattaaggaaaacaacaagattgaaataaaaagatttgacaaggaaagacgccacgatttcatcgagatgctgaaaggttttgtgataactcaggtgtcttattcagaccattttgctaacatgtggacaaaggtaacggaggaaacagaagtatatgcaaacaggagcagctgatgtacgtatagggagtgtagaatagttgattttgatctatttaatttgctccaacatccaacgacaacaatcattcttattcttccccagttttgtcaccttgagttggttgtaaacttgtaatgccacatgagtcatgtgcagtcgtgaaattgggtcccggcagatgagcttctgtgctacccgagaactggcatgtgtatgtgagaaccatacgcaaacgtggtttaggttgaaaaataatggcgatactagaaatttgacagcgtagttctgtaaaggaaggctcgcaggtccggctgttgcaaacgccaaaaagttctctctagagccagatgtttctcagagagtgatcaggggcgatatggtaggcaagatagtttgtttctcgaagaacttctttgtttcgtactggccagcagccagcagccagctatgtgctctggtatgttcgtccagtatactcgtgctccgtgcatgagaaagaggtgtcatcacgctgtgatgactagccacgtgtgcatggatactaatgcacgtggcatctattccaggagctgtctgcgcgtatatagggagcgcacttatctccacttctgtctgtgcgacaagcgactttatttcaagaagacagaagaagggagagtcgtactgaggtgtaagaatggcgagtgcacaggcagtggggcaaggagaacgaggccacttcgttctgaagagcggacacaccattccggccgttggtctaggcacttggagggccggctcagataccgctcactctgttcggaccgccatcgccgaggctggatataggcacgtggacacagctgcccaatacggagtagagaaagaggtcggtagaggacttaaagctgcgatggagggcgggatcaacaggaaagatttgtttgtgacgtcgaagctatggtgcaccgagctggctcctgatagggttcggccagcactcgagaaaacactcaaggacttgcagctggattacctggatctctaccttatccactggcccttcaggctgaaagacggggcgcacatgcccccggaagccggggaggtgctggagttcgatatggaaggggtgtggagggagatggaaggcctcgtgaaagacgggctcgtcaaggatataggtgtctgcaattacacggtcgccaagctcaaccgcctgatgcggtcagcgaatgttccaccggcagtgtgccagatggaaatgcaccctgggtggaagaacgacaggatctttgaggcatgcaagaagcatgggatccatgttactgcttactctccgctgggttcgtcagagaagaacctagcgcacgacccgctcgtcgaaaaggtagccaacaaactggacaagaccccggggcaggtgctcctcaggtgggcgctccagagggggacaagcgtcatccctaaatcgaccagggacgaaaggatcaaagagaacatccaggtgttcgggtgggagatccctgaggaggacttcagggccctgtgcggcatcaaagatgagaagcgcgtgctgaccggagaggagctcttcgtcaacaagacccacgggccgtacaagagcgcaaccgaggtgtgggaccacgaggactgagctgagctgccgtgccgccggatgcctcccactcccacctgatgaaccagaataaaggataccgacgcacctgtcagtcacctccttccccgtgccttgtgagagcggcagcctctcgcacagggaagatgctctgtgagagcagcagcctcgcacgagaaagatgtagaagagtgtgtgcgcaacacactcctgtactgtacgatagactgaataataaagaagaaaacgatccacatctcatgcaaactgcaatctgcagagtgcaacgcagcgccggccgaaccaagtttttgtaggatcgaaatgtgctgtctcgcctcgcgcaccaaagcactatgtttggaccactgaaaaaac

SEQ ID NO: 59778 - DNA, 1296 bp, Zea Mays
tagaggaagtatcaaattgttaactagagcacttgattggttctagttgcccgtaaggctgtagacagtgcgtagcatcgtttcccacggtcagaacaagcacgattagctgtaaatgctggatataggcacgtggacacagctgcccaatacggagtagagaaagaggtcggtagaggacttaaagctgcgatggagggcgggatcaacaggaaagatttgtttgtgacgtcgaagctatggtgcaccgagctggctcctgatagggttcggccagcactcgagaaaacactcaaggacttgcagctggattacctggatctctaccttatccactggcccttcaggctgaaagacggggcgcacatgcccccggaagccggggaggtgctggagttcgatatggaaggggtgtggagggagatggaaggcctcgtgaaagacgggctcgtcaaggatataggtgtctgcaattacacggtcgccaagctcaaccgcctgatgcggtcagcgaatgttccaccggcagtgtgccagatggaaatgcaccctgggtggaagaacgacaggatctttgaggcatgcaagaagcatgggatccatgttactgcttactctccgctgggttcgtcagagaagaacctagcgcacgacccgctcgtcgaaaaggtagccaacaaactggacaagaccccggggcaggtgctcctcaggtgggcgctccagagggggacaagcgtcatccctaaatcgaccagggacgaaaggatcaaagagaacatccaggtgttcgggtgggagatccctgaggaggacttcagggccctgtgcggcatcaaagatgagaagcgcgtgctgaccggagaggagctcttcgtcaacaagacccacgggccgtacaagagcgcaaccgaggtgtgggaccacgaggactgagctgagctgccgtgccgccggatgcctcccactcccacctgatgaaccagaataaaggataccgacgcacctgtcagtcacctccttccccgtgccttgtgagagcggcagcctctcgcacagggaagatgctctgtgagagcagcagcctcgcacgagaaagatgtagaagagtgtgtgcgcaacacactcctgtactgtacgatagactgaataataaagaagaaaacgatccacatctcatgcaaactgcaatctgcagagtgcaacgcagcgccggccgaaccaagtttttgtaggatcgaaatgtgctgtctcgcctcgcgcaccaaagcactatgtttggaccactgaaaaaac

SEQ ID NO: 59779 - DNA, 1208 bp, Zea Mays
aacagtccgaacaactcactttataatcggctggatataggcacgtggacacagctgcccaatacggagtagagaaagaggtcggtagaggacttaaagctgcgatggagggcgggatcaacaggaaagatttgtttgtgacgtcgaagctatggtgcaccgagctggctcctgatagggttcggccagcactcgagaaaacactcaaggacttgcagctggattacctggatctctaccttatccactggcccttcaggctgaaagacggggcgcacatgcccccggaagccggggaggtgctggagttcgatatggaaggggtgtggagggagatggaaggcctcgtgaaagacgggctcgtcaaggatataggtgtctgcaattacacggtcgccaagctcaaccgcctgatgcggtcagcgaatgttccaccggcagtgtgccagatggaaatgcaccctgggtggaagaacgacaggatctttgaggcatgcaagaagcatgggatccatgttactgcttactctccgctgggttcgtcagagaagaacctagcgcacgacccgctcgtcgaaaaggtagccaacaaactggacaagaccccggggcaggtgctcctcaggtgggcgctccagagggggacaagcgtcatccctaaatcgaccagggacgaaaggatcaaagagaacatccaggtgttcgggtgggagatccctgaggaggacttcagggccctgtgcggcatcaaagatgagaagcgcgtgctgaccggagaggagctcttcgtcaacaagacccacgggccgtacaagagcgcaaccgaggtgtgggaccacgaggactgagctgagctgccgtgccgccggatgcctcccactcccacctgatgaaccagaataaaggataccgacgcacctgtcagtcacctccttccccgtgccttgtgagagcggcagcctctcgcacagggaagatgctctgtgagagcagcagcctcgcacgagaaagatgtagaagagtgtgtgcgcaacacactcctgtactgtacgatagactgaataataaagaagaaaacgatccacatctcatgcaaactgcaatctgcagagtgcaacgcagcgccggccgaaccaagtttttgtaggatcgaaatgtgctgtctcgcctcgcgcaccaaagcactatgtttggaccactgaaaaaac

SEQ ID NO: 59780 - DNA, 1292 bp, Zea Mays
acacgacgcgccaagcagcagccttcgaagaggagggcaggtatggggaacagcctccggtgctgcctggcgtgcatgctcccgtgcggcgcgctggacgtggtccgcgtggtgcacctcagcgggcgcgtcgacgagctgggctgcccgctcaccgcggccgacgtgctcgcggcgcaccccagccacgcgctcacggacgcgtggtccgcggccggcgcggcccgcaaggtcgtcgtcctggcgcccgactccgagctcaagcgcggccgcatctacttcctcgtgccctcctccgcgtgctccacgcccgccgccgccgccgccgacgagaggacgaagaagcgcaggagccgcgccagcagcaggaagaagcacggccaccggaagggcggtggcgcctctgtggcgccgtcgctgatgagcgcggcggagcaggacaactacctgcgcgagctcctgtcggagaagcgggaggcgagcctggtgagccaccggcggcggcggagcggcgcccgccccggcgtctggcgcccgcggctggagagcatagctgaggagccgtcagagtagctctggttcacgagttcttgtctctctgttttttttttctctttcgatcttccgatgtgaatactaagaatcaggggccgatgaggaagcgttttgggttcggtcgatggccttcctgtctctgtgtaaagcatctccaggactggcgggctgcttcagcgctctttgcctcggaagtcgagtggaaactggagagagaagcgattgtaagatccaaaccaatctgtacaaacacaattagttttgagttccgctggctttttctttatctgcaactgcaagttgcttgccatttcatgggtcgttgactcattgttcttgtgcacttgtgctctgtattctcttcctgaaagtgcaagtgctggtctgctggagcccaggagtaccgcactactgttcgccatgacgccgtggatcacgactcgcagccaaacttaaacccccccatgacatgctgtcctgcactggtctggcggaggcctcaaaccgtgcatcggcttctgaactgcactgcactgcgccggcggcgacgtgtcgactgcagcagcgacggatccgaaatctgcgacaggtttatgccgggccagctgtcaagaatctctcgccttcagtatgtctgactttctgagcaaaagatggtcgcaacccaaaatttgacaattgtgtagagccaagatacatgacctgaatactttatctgttcaaaaatgtattccttg

SEQ ID NO: 59781 - DNA, 2612 bp, Zea Mays
gtacatgagaagaaacaagcgcaaatccctgaagcaaacggcgacgcaagtactcacggccagccgtcaacggataaacccatggaccacccaaaaccgcttgctataaacccaaaccggcaaaacatcacctcatcatcatctgcagtcctcttacctcttactatacaattccttcgtttccaacgacccaacggagcctttctcgctgccactgccacgcgggtcccggacccgcacgtcatccacgcgcgtcgccgactcaggagtcgataacgccctcgctttctctgctttccttcctccggttccattccaagtccacctgcccctcctccctccctatctatcctgtactctctctcagtttctctctccccccgttctccgttccacatcgcgtgcgcattgagacgacgagtttctagagcgccgtaccgcgcacggctcccgagccccaccgcaaagcgccggaatcgtgagcgcgtccggcctcgcctagctgctccgcgccgagaggcggccgaggaggacgggcgatgtacccggtggtgacgggcacgccgccggcgcggctgccggcggcgtcgcgggtggacaaggccacgagccacctgctgcagggccccgactgggccgtcaacctcgaaatctgcgacaccctcaacgccgaccgctggcaaacgaaggatgtagtaaaagctgtgaagaagcgattgcagcataaggatccaaaagttaaattctttactttgacgtattggagacaatgatgaagaactgtggtgaatatgttcattttgaagttgttgatcagcatgttttacaagagattgttaaaattgtccagaagaggcatgatatgcaagtgagggataaggctttgttacttctggattcatggcaagaggcatttggtggacctggtggcaaatatccacagtactactggtcatacattgaactaaagagggcaggagtaatgttcccacaacgtcctgtagatgctcctccaatatttactcctcctgcaacacatcaggcatatggttcacctagatatccttctggaagtctaaatgagagaatcacatctgaagctggaacgttgagctttgagggcttgaataatattagaaatgcaacggaactgctgtatgatatggtgaatgctttgaaccctgctgaccgcatggcagttaaagatgaaattattgcagatcttgtaaatcaatgtcgttcaaatcaacaaaagctcatgcagtttgtcagttccacaggggatgaagacctgctaaagcaaggactagaattaaatgatcgcttacagagtgtcctcacaagacatgatgctattgcttctggttctccattaccagttgagacaccgattagagaaccacagagagaggatccaaatcctgagccatctacaccaattacacatgataataaggctcaagttgaagaggatgaagatgatgagtttgctcaaatagcacgaagaaaaaacaaatctgtgatatgcggtgatgaggcatcatcgagtgctggtgatcaagccctggtacctgttgatccagcactttctgaagtttcttcggttgagagcaatgcaatagtacctctcggcgcaacttctgttagtggaaccaggacgaaggagcaggatatgattgaccttctcagcctcaccttgtacagtcctgaatcatcagaagactcttcaactcagaaccaaaatgggagtcagccgagtgtcacatcaaatggatcagaaacactgccaagctatcagcctgctgtggcgaacggggcaaattaccctgccaacacccaggtttatccaacaaatcagggatatgttccatacaataactatgtggcaccatgggcccaaacgggaccggttgcacagcctggggcatattcgactcaaacccagcaatatgtgtcgagcaatccggcacccccatgggctatgcctgcaagtgccaattcagctaatcctttccagcctgtgacataccaaacgccaaacactcctcctgctgcttctgttgccccttcagctgctccatcagcgcaacatgttccatctccagaaccaacaccggtgcaaagttacaacttctctattcctcaaacatacactggttcgaacgtggctacaaatgctcgggtgaacggaaatcagcggccaaaagaaactccagtggcagcagccagaccatattacatgccggacaatttgttcggagacctgatcgacgtgaagagttttggcgccggaagcaagatcagcaggtctaccagcatgccgagtccaaagggtggtggccagcctatgatcggtagaaacaaataggcctctgctgtttaagatagggatgagcatatatttagctggtagccactgtcgtttggtttgatgtaaatttgctgtcttttttcacgtgtcaatttgcggatttgttactttggtcaatttcggagttgctgcatgtttaactttactagagaattgtagagaagtcattgctccagatgatcagtgacatcattatcgtgacggtttgatgacggaaaccattgcctgcttcgtgttttcc

SEQ ID NO: 59782 - DNA, 253 bp, Zea Mays
aggaccaaacaacgatcggtggacaactcaaaaggaaaaaaaataatatgccctcaatggaagttcctccaaaaaggtaacactcctacatacacatcttctgctcagtttcagtgtcgtttgcatggctggccattatttagttccctactcagattttgaaatgttaggcatccatacatgaaaatcctctagaaataaatgtgttgctcagtttgcattcagtaatagattatgtttgtgtgcacacaag

SEQ ID NO: 59783 - DNA, 248 bp, Zea Mays
agatcatgttattccacaattgatgtaataatgctggtacattgtgcagatggttttttctgctcttgctttgtctcaatgcgaggtgatttggtacttccaacatgtggggattgcatcatcaaaatctactcgattgaaaactgttgacattgatgcgatagacccaactattggtttcttactagatggaataggcaaactttgttgcctggttcgtaaatacatagcagcaataaaaggttatg

SEQ ID NO: 59784 - DNA, 5235 bp, Zea Mays
ctatcctgtactctctctcagtctctctctctccccccgttctccgttccacatcgcgtgcgcattgagacgacgagtttctagagcgccgtaccgcgcacggctcccgagccccaccgcaaagcgccggaatcgtgagcgcgtccggcctcgcctgctccgcggcgagaggcggccgaggaggacgggcgatgtacccggtggtgacgggcacgccgccggcgcggctgccggcggcgtcgcgggtggacaaggccacgagccacctgctgcagggccccgactgggccgtcaacctcgaaatctgcgacaccctcaacgccgaccgctggcaaacgaaggatatagtaaaagctgtgaagaagcgattgcagcataaggatccaaaagttaaattctttactttgacgttattggagacaatgatgaagaactgtggtgaatatgttcattttgaagttgttgatcagcatattttacaagagattgttaaaattgtccagaagaggcatgatatgcaagtgagggataaggctttgttacttctggattcatggcaagaggcatttggtggacctggtggcaaatatccacagtactactggtcatacattgaactaaagagggcaggagtaatgttcccacaacgtcctgtagatgctcctccaatatttactcctcctgcaacacatcaggcatatggttcacctagatatccttctggaagtctaaatgagagaatcacatctgatgctggaacgttgagctttgagggcttgaataatattagaaatgcaacggaactgctgtatgatatggtgaatgctttgaaccctgctgaccgcatgacagttaaagatgaaattattgcagatcttgtaaatcaatgtcgttcaaatcaacaaaagctcatgcagtttgtcagttccacaggggatgaagacctgctaaagcaaggactagaattaaatgatcgcttacagagtgtcctcacaagacatgatgctattgcttctggttctccattaccagttgagacaccgattagagaaccacagagagaggatccaaatcctgagccatctacaccaattacacatgataataaggctcaagttgaagaggatgaagatgatgagtttgctcaaatagcacgaagaaaaaacaaatctgtgatatgcggtgatgaggcatcatcgagtgctggtgatcaacccctggtacctgtttttttttttctcgaacagcgcaggagaactgcgcgtcatttcatttaaggaagaaaggaggtacaaaggtcaagagtgacccgaaacacaaacaccaacacacacacgccttcccttaaatacaaccgtcgcgccacatcaatgaagaaggcgaccacaacctacagagctaattaagctccagtaggcaccgacccaaaaacaagttcctggagcttggaagctccagccaaacaccaaagccccccctccacattaacagcttttagcacttccacaacacatggtcttgaattgtcaaagacacacctgttgcggtgcttccaaatctcccaagccactaacgtaattagagaattgaggcctctacgaagccccttaggaacagcagcaacagttctcttccaccaacctgagaatcgagacactgagggctgaggagccaactgcagcagccccaactgttgaaggatcagggcccaaatttggcgagcaaacacacatccaaccaacaagtgatgcaccgtctcagtcatctggtcacaaaatggacaagacactggatggggcagatttctgcgctcaagacgatcagcggtccaaacccgattatggtgcaccaaccataagaagaatttacaacgcgacggggcccaggttttccagattctcttccaagggccaaacttggtagagcccacgaagaaggcctcatacgcagacttgctgctataacagccatcttgtgtcaacttccatctgaaatgatcaggaacatcagcttgcagtacgacctcctcaacaaaatcccagacctggaggtactcaattaaaacctgaacagtaagagcacccttgatatcacgaacccaactccgcccaaacaaagcctgagccacagtctttcgcttagcaattcgcatagggtcagttctgaaaagattgggtgccatctcagccatggtaagcccatccaaccaacggtcagtccagaaaataattttctcaccattcccaaccacggcattcacagccatatcgaagagggcccgagctttatagggaatagaaattgagagtccagcccacggcctctccacatcagtcttctgagcccaaagccatctaattctcaaggcccaacctagaagctcaagattatggattccaaggccgccatactgaagaggtctctggaccttatcccaagctaccaagcagtttcctccattagcttgttgatgtcccttccacaagaacccccgccgctttttatcaacagccttgatgaaccatttcgggagatccaaagctatgagccaataaataggaacagcagtgagaaccactttcacaagcacaagacgcccagccctattcaacaaagaagctttccacccaggaaggtaatctgccaccttatccacaaaggccagcaacacctctttagaaggcttacaggttgtgagaggaagtcccaaataagtgcaaggaaaaactttaaccgaacaagagagagtttccacagaaagagccagctcatcatcggaacaatgaataggggagaccgagctcttaaccaggttggtccggaggcctgaggcgtgaccaaataaatcaagaatgcgtctgaccgaaaccagatccagaatgtgaggcctcaagaaaactacaacatcatcagcatagaaggaaacatgatgcctgacctgctgaacagcaataggttgaagcaaacccaacgaagtggcatagttgattaaagaattcagagtatccatgactaggataaagagcattggagaaagaggatctccctgcctgagaccgcgacgatgaataatgatgtccccaggctctccattgactaaaatctgagtggaagaagtagacagtaataaacaaaggagatcccgccaacgctgaccaaatcccattttccttaaaacttccaaaaggaacgaccaagaaacagagtcaaaagccttggagatgtccaacttaagaaggatatgtggttctttcttcttatgcagcaacttcacaatttgttggacaagcataaagttatcatgaatcctcctccccctcacaaaggcactctggttcacagaaaccagtgagggaagcaaaggggccagccgagtagccatgagcttagctaccaatttggcaaaactatgaatcaaacttataggccggaaatccttaacttcaacagcatccatcttcttaggcagtaaggagatataagccgtgttaagcaggcggaatttgaaaacatggccacgctggatgacatccaaagacctcaacacatcacctttaataatattccaacaggatttataaaatcgacctgtgaaaccatccggccccggggccttatccggaggcaaatcttttaccacagtccacacctcctcctcaagaaacggagcatctaaagcagataaatcatgattgtggatggccaactcatccaagtcaagagtgtagctcctctcctcagccctacccaaaatgttctcatagaaatcagaaacagccttctgtttatcttcttgggaggtgaccacctgatcaccaacgtgcagcttaggaatgaagttcttcttttttctgtatctagcctgctgatgaaaaaaggaggtgttggcatcaccctcctgaatatacaaaatccgagaccgcagtcgggcgctttctgaagtttcttcggttgagagcaatgcaatagtacctctcggcgcaacttctgttagtggaaccaggacgaaggagcaggatatgattgaccttctcagcctcaccttgtacagtcctgaatcatctgcagactcttcaactcagaaccaaaatgggagtcagccgagtgtcacatcaaatggaccagaaacactgccaagctatcagcctgctgtggcgaacggggcaaattaccctgccaacacccaggtttatccaacaaatcagggatatgttccatacaataactatgtggcaccatgggcccaaacgggaccggttgcacagcctggggcatattcgactcaaccccaacaatatgtgtcgagcaatccagcacccccatgggctatgcctgcaagtgccaattcagctaatcctttccagcctgtgacataccaaacgccaaacactcctgctgcttctgttgccccttcagctgcctatccaactatgtcaacaccgtatgctgctccatcagcgcaacatgttccatctccagcaccaacaccggtgcaaagttacaacttctctattcctcaaacatacactggttcgaacgtggctacaaatgctcgggtgaaagggaatcagcggccaaaagaatctccagtggcagcagccagaccatattacatgccggacaacttgtttggagacctgatcgacgtgaagagttttggcgccggaagcaagatcagcaggtctaccagcatgccgagtccaaagggtggtggccagcctatgatcggtagaaacaaataggcctctgctgtttaagatagggatgagcatatatttagctggtagccactgtcgtttggtttgatgtaaatttgctgtcttttttcacgtgtcaatttgcggatttgttactttggtcaatttcggagttgctgcatgtttaactttactagagaattgtagagaagtcattgctccagatgatcagtgacatcattatcgtgacggtttgatgacggaaaccattgcctgcttcgtgttcaacattctcaagtgacctgatgatgatcatgcatattaatttaatacgtgaacattttattttggattgtacgttaaacctttcctttcttgccaaaccactggtacaccaaacagtactgtatatgtaatttttatatccacatctccgcatctattgaacagtgataattgtttgtttacagagagcaggaatatatggagcatctgaaaagaagttgatattggtaacaaacgaacagttgctattcag

SEQ ID NO: 59785 - DNA, 1309 bp, Zea Mays
ctatcctgtactctctctcagtctctctctctccccccgttctccgttccacatcgcgtgcgcattgagacgacgagtttctagagcgccgtaccgcgcacggctcccgagccccaccgcaaagcgccggaatcgtgagcgcgtccggcctcgcctgctccgcggcgagaggcggccgaggaggacgggcgatgtacccggtggtgacgggcacgccgccggcgcggctgccggcggcgtcgcgggtggacaaggccacgagccacctgctgcagggccccgactgggccgtcaacctcgaaatctgcgacaccctcaacgccgaccgctggcaaacgaaggatatagtaaaagctgtgaagaagcgattgcagcataaggatccaaaagttaaattctttactttgacgttattggagacaatgatgaagaactgtggtgaatatgttcattttgaagttgttgatcagcatattttacaagagattgttaaaattgtccagaagaggcatgatatgcaagtgagggataaggctttgttacttctggattcatggcaagaggcatttggtggacctggtggcaaatatccacagtactactggtcatacattgaactaaagttttggaaaaacgttttacagagggcaggagtaatgttcccacaacgtcctgtagatgctcctccaatatttactcctcctgcaacacatcaggcatatggttcacctagatatccttctggaagtctaaatgagagaatcacatctgatgctggaacgttgagctttgagggcttgaataatattagaaatgcaacggaactgctgtatgatatggtgaatgctttgaaccctgctgaccgcatgacagttaaagatgaaattattgcagatcttgtaaatcaatgtcgttcaaatcaacaaaagctcatgcagtttgtcagttccacaggggatgaagacctgctaaagcaaggactagaattaaatgatcgcttacagagtgtcctcacaagacatgatgctattgcttctggttctccattaccagttgagacaccgattagagaaccacagagagaggatccaaatcctgagccatctacaccaattacacatgataataaggctcaagttgaagaggatgaagatgatgagtttgctcaaatagcacgaagaaaaaacaaatctgtgatatgcggtgatgaggcatcatcgagtgctggtgatcaacccctgagagcaggaatatatggagcatctgaaaagaagttgatattggtaacaaacgaacagttgctattcag

SEQ ID NO: 59786 - DNA, 1288 bp, Zea Mays
ctatcctgtactctctctcagtctctctctctccccccgttctccgttccacatcgcgtgcgcattgagacgacgagtttctagagcgccgtaccgcgcacggctcccgagccccaccgcaaagcgccggaatcgtgagcgcgtccggcctcgcctgctccgcggcgagaggcggccgaggaggacgggcgatgtacccggtggtgacgggcacgccgccggcgcggctgccggcggcgtcgcgggtggacaaggccacgagccacctgctgcagggccccgactgggccgtcaacctcgaaatctgcgacaccctcaacgccgaccgctggcaaacgaaggatatagtaaaagctgtgaagaagcgattgcagcataaggatccaaaagttaaattctttactttgacgttattggagacaatgatgaagaactgtggtgaatatgttcattttgaagttgttgatcagcatattttacaagagattgttaaaattgtccagaagaggcatgatatgcaagtgagggataaggctttgttacttctggattcatggcaagaggcatttggtggacctggtggcaaatatccacagtactactggtcatacattgaactaaagagggcaggagtaatgttcccacaacgtcctgtagatgctcctccaatatttactcctcctgcaacacatcaggcatatggttcacctagatatccttctggaagtctaaatgagagaatcacatctgatgctggaacgttgagctttgagggcttgaataatattagaaatgcaacggaactgctgtatgatatggtgaatgctttgaaccctgctgaccgcatgacagttaaagatgaaattattgcagatcttgtaaatcaatgtcgttcaaatcaacaaaagctcatgcagtttgtcagttccacaggggatgaagacctgctaaagcaaggactagaattaaatgatcgcttacagagtgtcctcacaagacatgatgctattgcttctggttctccattaccagttgagacaccgattagagaaccacagagagaggatccaaatcctgagccatctacaccaattacacatgataataaggctcaagttgaagaggatgaagatgatgagtttgctcaaatagcacgaagaaaaaacaaatctgtgatatgcggtgatgaggcatcatcgagtgctggtgatcaacccctgagagcaggaatatatggagcatctgaaaagaagttgatattggtaacaaacgaacagttgctattcag

SEQ ID NO: 59787 - DNA, 2534 bp, Zea Mays
cttccctcactttctcctttctcggtgatccggacccccggggagtatatgcagccggcgtcggacgcggtgtcggaggtggcgaggaacctggatcccaaatttttgaaggaaggggagcgcgtgatggtgggcttctcgggtccgttcgggttccacagggtcacgcccagggatctcatgtcctccttcatcggcaccatggtctgcgttgagggcatcgtcaccaaatgctcgttggttaggccaaaagttgttaagagtgtccacttctgccctgtgactggggactttctctcgcgtgaatacagggacatcacatcttttgtaggcttgcctactggctcggtttatccaacaagggatgacaatggtaacttgttggttaccgagtatggaatgtgtgaatacaaggatcaccagacattgtccatgcaagaagtgcctgaaaattctgcacctggacagctcccaagaactgtcgatgttattgtagaagatgatcttgtagattgttgcaaacctggtgaccgtgtctcaattgtcggtgtgtacaaggctctaccagggaaaagcaagggaagtgttagtggtgtcttcagaactgtccttatcgcaaataatgtgtcgcttcttaacaaagaggcaaatgcacctgtctacactcgggaagatctgaagcggatgaaagaaatatcaaggagaaatgacacctttgacttactgggaaattctcttgctccatccatatatggtcatctatggataaagaaggcagtagtactgttgatgctaggtggtgtcgagaagaatctaaaaaatggaactcacttgagaggagatataaacatgatgatggtgggagatccttcagttgccaagtcccagctcctaagagctgtcatgaacattgcccctttggctatctcaacaactggcaggggttcatctggtgttggtttgactgctgctgtgacttctgatcaagagactggggagcgaaggcttgaagctggtgccatggttcttgctgatcgtggtgttgtctgcattgatgagtttgataaaatgaatgatcaagatcgagttgctattcatgaagttatggaacagcaaactgtaaccattgcaaaggcaggaatacatgcctcactaaatgcaagatgtagtgtaattgctgcagcaaatccaatatatggaacttatgatcgttcattgacaccaacaaagaatatcgggcttccggattcactgctttcccgttttgatttactttttattgttcttgatcaaatggaccctgagattgaccggcaaatctcagaacatgttgcccgaatgcatagatattgcactgacgatggaggagcaaggtctcttgataaagagggatatgctgaagaagatgatggtgatgctaatgcagccatttttgtcaagtatgatagaatgctccatggtcaggatagaagaagaggaaagaaatccaagcaggacaggctaactgtcaaatttctgaagaaatatattcattatgcgaagaaccttattcaaccaaggctcactgatgaggcatctgatcatattgcaacctcatatgctgagctcagggatggtagtgcaaatgcaaagtccggtggaggtacacttccaattacagcaaggacactggaaaccataattcgtctatcgacagctcatgccaagatgaaactgaggcatgaggttctgaaatccgatgttgaggctgcattgcaagttctaaattttgcaatataccacaaggaattgactgagatggaagagagagaacagagagaaatggagatgaaacagcaagctgatcatgatgcaggtgcaaccggtggcactgtggatgggcatggaagctctggcaatgatccaatggatgtggatgtaggatcaaatgatcagaatgtttccgcagagagaattgaagcatttgaagcacttctgggtcagcatgtgttggcaaaccatatagatcaaatgtcaattgatgatatcgagcagatggttaatagggagtcaactgcaccttacaccagaagccaagtagagtttattttggagaggatgcaagatgcaaacagggtaatgatacgagatggtgttgttcgaatcatataactaccagtctaccaggacgtttacctgtggatcccatggtcatgctgtgtcatggtgcctgtctgtctgtctgtaaccaacttatatgtcgaagtatttgtttcttagtgtttgtccacaaaggattgaggcaatcattgccccccttggtacttttagttcatgtgatgtattgcttacttacctgacctagtgatatctagtactcagtcacgtctggttgtgttcgagttaatttgcaaatgcagttgcattctgacgagtaaaattcacacgtgctgagttgctgacggcgtaggctttctaggtaccgatgccagatgagatttgttctgattctctgttgggttggcaacgtgatacttaattgtattgtaaaatct

SEQ ID NO: 59788 - DNA, 15903 bp, Zea Mays
aatatggtctcgctactttgcctgaatgtttgttggattggccagatgttgtaacagtaggaaatcatagcatgggaagcccgttcgtgcttacagctactttaagaaagagttacgaggtagctttgatggcagttggccagaagtggcctgtacttctctatgggcctgttggtgcaggaaaatctgcacttattaacaagttggcacacatagttggaaatcgagtactttttatccacatggatgagcaaatggatggcaggaccttattaggaagttacgtttgcacagagaaacctggtgaattcaagtgggctcctggttcgcttacacaggctattgtcaaagggttttggattgtgtttgaagacatagacaaagcacctagcgatgtgcgttcaattttagtgcctttattggagggttcaaataccttttcagttggccatgcagaggccgtggaagttgctgagagttttcgcttctttgcaaccgtcactacatcaaagaacgatgtttcccatgatctgccagggagactcacatttagtgcattgtggagaaaagtgatggtgggagaacctaatcagagtgacatggttaatataattaaagggtgctacccaagcttggagcccatctcctccaaactcatagatacctttgaaaaggtcaactctcttggatcttatcagtttggtagtctcaacttggcagggggtttatctgatggtgttctgcacagattttcattaagggacctgctaaaatggtgcaagagaatattagggactgacctcaactttgaggacctcagatttgcatctagtggatgcaaattaatctatcatgaggctgttgacattttcactgcttcattatcatctccggagaaaaggttgtatgtagcaggagaaattgctagaatattatgtgttccttaccgaggagaaacagtgcaacctactgaaaagcccgtcatccaggctcgacatatggaattgcaagttggtagagttacattgccatgctgcgacaaacctacattaatccagaaagggccttttgctgatattcggcgtgcattagaaattcttgaaagggttgcatgttctataaaattcaatgagcccattcttcttgttggtgaaactggtactgggaagaccactactgtgcagaatcttgctgcctggcttaaacaaccgttgactgtggtgaacttaagccagcaaagtgacatttctgatctccttgggggatttaagcctacagatgctcgatcgatatgttttcctctttatatggagttcaaggatcttttttctcgaagtttttctgcaaaggacaatgaagctatgatacgttattgtgatgagtttgtaatgaacaagaattggaaaaaactactaaccactttggaaagatatgttgcgaaggctcagaagctaattgaagggtctaagtcttcaagtggttcaaagaggaaacgacctttgccagcccatgttgtttctgattgggacaccttctcttccagactgaatatggcttgtagtcaaattggttcagcaactggcatgtcatttcagtttgtggagggtgcttttatttcagctttaaggaaaggccattggattttgcttgatgaggttaaccttgcacctccagagacacttcaaagaattggtgctgtactggatggagagaggggcacactttgcctagcagagaggggagacgtggattatgttgaacgtcatccttgcttcaggatatttgcctgcatgaatccagcaactgatgctgggaaaagggaactgccgtacacttttaggaaccgctttactgaatactttgttgatgatcttatggatgacgatgatctacgtctttttgtcaggaaatatctggatggtctgaatgctgcaaatggagttatagatagtattgtgcgattttataaagtggcaaaaaaggagtgtgaggagagactgcaggatggagctaatcagaagcctcaatttagtttgagatctctatctcgtgctttaggatatataaaaaacgcagagaaaaaatttggcttcaggaaagccatttatgatggtttctgtatgttctttcttacattgttggatcctcctagtggaaaaatcatgaagaacttaatagtttcacttctgttagatggaagagtgccacctaacatttcttttgttgactacttcactgataagcctttgcaattaggtggctgtgaatcggatgattttttgcagagctatgttttaactcaaagtgttactgagcacataatcaaccttgcccgtgctgtttacattagaagataccctgttcttctacaagggccaacatcaagtggcaaaactagccttgtgaggtatcttgctgcaaaaactggacatgagtttgtccgaatcaacaaccatgagcatactgatctccaagaatatctgggtacttatgtgacagatagtcaagggaagcttcagtttcaggagggtgctttggtgaaggctgtgcgggaggggcactggattgttttggatgagctaaatcttgcaccgtctgatgtcctggaagctttaaataggctgttagatgacaacagggaacttttcattccagagctgcaagagactataccagcacaccctaattttatgctcttcgctacacaaaacccacctatgctttatggggggcgtaaaatgctgtcccgggcgttccgcaatcgttttgttgaagtgcatgttgatgaaataccagaagatgagctagccacaattttggagcagcgatgtagaattgctcccagttatgcgaaaaggatggttgaggttatgaaagaattgcaaacacatagacaaaatagtagagtgtttgctggcaaacatggtttcataacacctagggatctatttcgttgggccaatcggtacaggacatttgaagggaagtcatacgaagatctggcgaaagatggttatttactgctggcagagagattaagggatgtcaatgagaaagttgttgttaaagaagctttggagcgtcacctacgtgtaaaactcaatatagctgatttgtataactcggaagtcacccgtgaagataatttattcattgatgttatcaaactaagagtacaagattgcgttgggaatatcacttggacaaaaagtatgtggaggctatacttccttattgagcgttgctacagatcacgcgaacctgtcctccttgttggcgaaactggtggtgggaaaacaactgtttgccagattctaagtgctgtccttgggttgaagttacatattttgaactgccatcagtatacagagacatcagacttcattgggggattctgccctatacgtgatagatcaagaatagcaattgagttcaaagatcttgttgcaaaaatcaaacagatgaaaatgtttttttatgttgcagggaatgttccgcttgaaactgatgtatctggagctgatagtgtcatcagtcatctggatgaaatacttgacagatacagaaagaaaaaatatctgtttcctgaggtgtctgctcaagatcttggtgccatggagcaaatcaagttggatttgatgcatctccacaagaggtggcaagcaattttcctgtggcaggatggaccgcttgttcaagcaatgaagaatggtgatcttttcctcattgatgaaatttctttagctgatgacagtgtgcttgaacgcttgaacagtgttctagaacctgaaagaaaattgtcattggctgagaaaggtggttctgtgttagagaagattgtagcacatccaaacttcttcatccttgcaacgatgaaccctggtggtgactatggaaaaaaagagctttctcctgcattaagaaatcgatttactgaaatttgggttcctgctgttattgatgttgatgaacttaggagcataacttttgggaggttcaccaaaactgacttctcttgccttggagattgcattgttaacttctggaagtggttcaaccaattgcacatcgggagaacattgacgatacgggacctgctgtcatggatttcatttataaacgtgactgaacaaaatcttgggcccgagcaagctttgatacatggcctgtttcttattttgcttgatgggctctcattaggtctaaatgtttctaaaactgaggctactgagatgaggaatacttgcttgtccttccttctagaagaattgcagaaagttgggggcacggcagtagattcatacttgaatgatctaaataattatggctggggtgacaatatgaaaaaaaaagatatagatcatggttgtttggaagatcatttcggcattgcaccattctatattcctaaaggccattttccttgtaagcaacaggactttgaaataatggcgcccacgaccagtaagaatgtcttgcgagttttgcgtggtatgcaactacctaaacctctccttctggaaggtagtcctggagttggaaaaacaagtttaattgtagcattagctggattttctggtcatgatgttgtacggataaatctatctgaacagacagatatgatggatcttctaggttcagacctgccagctcaagggggaaatggaatggaattttcctggtctgatggtattcttctccaggctttaaagaatggaagctgggttcttttggatgagctcaatcttgctccacaatctgtcttagagggcctgaatgccattctggaccaccgtgctgaggtcttcatacctgagcttggtcaaacttacaaatgctcatcgtcttttcgggtctttgcatgccagaatccttcatcgcagggtggtggacggaaaggccttcccaagtcctttctgaaccgcttcaccaaagtttatgttgatgagctatcagaggaagattatctattcatctgtaaatcacgatatggttcattgatttctgaaagtttcatccgaaatcttattcactttaatagcagactgtatatggataccatggtatataggaagtatggccaacaaggttctccctgggaatttaatctacgtgatattatcagatcttgtgagatgatagcaggttccccaaatcctatgatggatgattcttttttaaatactgtttatctgcaaagaatgcgcacattggttgatcgccatgaagttgtcaagctttatgaggatgtctttaagaaaaatgcttggttgttggaagtgcctctattagaagaaataacatccaatcatataaagtgcaaaacaatcaactcaacatatttccaggtgtccttaatagtcttgaagcagccatgcactgtatccagcaagctttctggaaatacgttgaatgagttaaatctgtcgtctgcaactgatgtgtccgaattgttgggatgctttgagcagtataacttctttaggcactacaaaactgttttatcagaagttgagcattatgttgatgtgtatttcagcctgagtattgatacgaaccagaagaattttgttgcagaaagaaggggtttgtttaccaaatggtttgaatttgtggctgcaaaagggcactcctcaattaagacttcgaaattaatgagtgggaatgcatctttgccttcattaagcttgcttgctgaaatagttgagcagatgaaatgtgatctggaaatgtttgacttctctataccattgacaaaagatgatcttagtgaaacactgaagtccatcaacaacttgcagcaaaatggagctgcacaccaaccagttagattcaaatgggttgcgggagatttgattagagccattgagcgtggtgaatggattgttttagataatgcaaatttttgtaaccctactgtacttgataggataaactccttggttgagcaagaaaggtctattatggtcaatgagtgtggtcttgttgatggaaatcctgtagttatcaaagcccaccctaagtttcgaatgtttttgacagtaaattcaaactatggtgaagtttcaagagccatgcgaaacagaggagtggagatctttctgatggaccaaagttggaatctgaaaggatttagcaatgtacctggggacagtgaacggaaggatgtgataagatttttaatttcttgcggaatacccagaatggaactggtctcgtcaatgtgtgaagcacacatgtacgcaaaaggtgaaggttcacgtgttggtgtgaacattacccttcttgaaatcacgcgctgggttcagttgttccaacaactgattgttaaaggaaatcagttcctttggagcctgcatttgagctgggaacacacatatctaccatgtttgggtgaaattaatggatctggcattgtggaggaaggaaaaaataagtttttgactaattttgacagatctgaaattttggctagaaactttagttttttgactgtttttgatggttgttcaactagtttgcattctggattatctttgtccttgccgggtggttggccaattgagcaaaaactaagggatctcatttggtattcaaaagaaacttgtgtcatgaggaattgcatgtttctacagtcattgggtgcccaatacgctgcttatcagataagcagtttgaatgataattcattattgttgggtcagattagtctcatccacccatctattcttcctgctgcaagcttacgcgaattacagtttcctacggttaatggtcagcctgtcaaaatttgtgtcactggggcattcaattcatacttagctgatcagatgcttttctttgctgcaaactgggtaatggagcaatgtactaaaaacgatcttgaactatatggcaaatggtttaattggtataactctctggtccagccttattgcaacttctttgagagctattggtatattctggagcaagaaagtgagcatcctatttggcataacatccttgaatattacagggaaatagttgcctatcacaatattgatattgttactcagcatattccattactctcgaagaagttgctggatatggctggttgtgatagcctgaaagcatgccaaaaccggctgcatcgttcttttaaggctttgggcttgttgcggcttactctgcagcaatggcaaattgagacaaaatgtcctgatctttctgtcctggaatgtactttgttgccagcattgaagtccctcagatgcttagagggcgaggtacttaaaacgattgcgaaatcttggaagcggctcaaaatatactctctccttcttgattaccacagatcaatatggaaaatgatgattgcatctcagttagaggggctaccaattgtttggaatcttttgaggaaagaaatactgaagttgcagcagaagttcccggttgaagttgacgtctttttgatggaatgtgtgaatctcaacaatataaatgataccaattttcaatatggtaaaccaactttgtgggattatggtggtcatcctcatctgccatcatctagcgagatatttgacaaaatgcaagaacttttgtccttcacaacagatgtgtggccaaggaagaatcttttgaatatagagcttgatgataggaaacagttgactgatgctatgctgtcagccaacaaggatcttagacaccttgcaatggaaggtgtctctatggcttgcattgctacaatgaaaactgaggaagatgttttagctgttgtcccccaattggatgaagttcacaagcggcttgtaggaaaggttaactctgtgagggataatcttggattattgtccaagacatcagtgcctgaatttaagttctgttgctcagtgtcctctgagattctatgtaacatttatggtttcaatggctggctagcaagtcttcctttgctcaacttgaagagcttaaacttggatacccttttacttcaacagctatgcaagtgcacacaaaaagattcttctgaaactcatgagattcttgttaattctgagtacctgctgaagtatgctatggattactcactgggttcatcttcaagatctcctctggactatattcaacatcagatcatttggtggatttgtcatgactgggccaaagttgacaatgcacatttaaaagttgctagttgtattcttgaaatgtggtacaactatcactcttccttgtggacttattgctcaggaagcccaaagtgtctattctcagtcacacatgatgattcctgtgacttggcacacctgacaaaaatggacgccatcaatactattatccagcaggatttacatgtggtggattatctgaagagtggtgtaatgcttaaagttgcatctagaaacctctgggaaggtgtttcgtgtttgggaaactttgtttctagtctgcactctgctgctgattccctctttaagcagattatatttgtccataagaagcatttcgaggaagagaactataaccagttagagtctctcctgttccaacaatcgagacgtttgatagagaaagaagatctggacactgtttgtgctctgttatcatcttcaagctgtagagtattggcttcgctctcagagtcagataaactcgtagaatccttgcttatggacttgtattcatcctactcccgtgactctttgttgcataccggagctgcttgggtccgtattggagagttacgcttccggttattgttgagctcatacagtccagatcctacatttaagtctagatacaagcattcacatattttggaaaaaattacacttgtgaagcttgaggaaaaggttcgtcatgattgtgaggaattagctggttctaactcccctgaagatagccatgacaacgagttattgcaattgctggaaattaaagagaaagacacccgtgcaaaggttgtatttcgtcctcgacaatctaagcataagagtctcattgctgcatgccttgagtttgaggaccgcctgtctgagtgcaaggacttgttagctagcttaacttgcgaaggacttgggcaactagaggttgaccgagtgtgcaattggcagataatatccatgaactttatcaagaggctgacagaagattatagggaatatgttgatttgatccagccaattcaagttgctgtatatgaaatgaaacttggcttagcaattgctctatctggttctcttcagagggagtatttgaagaagattaaagaagatgatattaatagagttcttggagcaatttatgcttttatgcagtttccctctggatcttttactgaaagggttgtaactgacgtgactgatgatcttacaaattatacaatcactggccaactaggaaccctaaacagttgttctggagatgtagatatgttgaagaagcttgctgctatgtcaagtcagttgaatgtttgtaaagttgctggcaaagtgaagtccctgtccgagatgcttgcttcagtgcatcatatttttttagtaagaacagctgattgtgtcagctgttcccttgtcatggataagtcatcttatgcgtcattgaaggatacctttgatcattttacaagcatgtggatcaacatgaaataccgtttgaaggctaaagaaagcgatgattctcagtacttcaagttcaaatcgcgaatgatcagtatagacgacatctttaaagatgtgccgttgctttctgatatggaatcagaagacagcattttagataatgaagaaaaactagagcatgaatttttcaaaattacggaaagtattgatgacgataatggtgttgttgaagacaactgggatttgataccagagtctgctcttaaatgtattgtgaccatacatgaccaattgtttggttcgcccgatctttttgagaagcgccgcaaatgtcaagttagtgatgcacagaaagtccagtctttcatagaatcatatgagctgggaacaagaatacttaaagacctcccggaattaacatgttctatgtttgatgaaaagctcatgcctgagcacctatttcgtgtttgtcttgaataccaacgatcctgtgcaaaaacacatcaagattgtagtggttataatgcttacaaggatccaaatcctcctgtcttgtttaaaatggttgagtcactaactacacttcaggagagagttaatagctatctggatgaatggcctgatcatcctggtctcttgaaaatactggacctaatcgcttcccttttagcgatgcccctaagcacgccaatttcgaaggtcttgcttggattgcaattgctggctgggaaagctcaaacattgcaggaaaatgactccaagttctttgtaaaagatcatcttgcatcgatatttttgcttgtgtattcatggcaaaggctcgagttagattgttggcctatactgcttgaggaggtccagacaaagtatgagttgaatgctgcaaagctgtggtttccattgcgagccttacttactcaaacttctggtattccagtggatgatgatttgtctattatcagaagtgttgaggaatttgttcaaacatcaagtcttggagaatacaagagacgattgcatatcctctttgccttccatggtgagatttctgctggtgctagcttgggtagttattcaagtaatgcggtgaagaaaatccagaatattctgtacagtgtgtttggttactatatgcagtttttgtcactcgttcatgggaaaattgaagaaggtaaaaaaaacattgagaaggagttgaaagatcacgtcaagctttacagctgggagcaagcaccatatagcagcgcttctattgaaaattttaaaaggactaggcaaaagatttttaagcttctgcaacggttcaatgatattttgaaaagtcctgtcatctttctactgaatgaagaagccacatcaaggaagattccatgctggcttgatcctcagaggcctgaatcacaccttcctgttgactctgaaaaatttaacaaaaggtttctgtggtaccacaagtgggcaagtgagacgtctttatcattacaaacattgcagcaatcaaatggtagtactgttggagttcctactgccaaagaatatgcagatatggtatatgatgtgaagcactggcagaatgaaattgagctcaatgacagattgcagttcttctggatctcacttgagagaatatgtggggcagctaattttggtagtacagtgaagcatgggaaaaagaatcagaagaaaacagctctatccaatctgttcaagactcttgaggaatgtggactatctaagcacaggccaatgagtcatgagtggggagatgagctggcagcaccaagtccattgttcttggagcagtcatatgattctgcacatttattacagcaaataaactctcagaaaatgctggaagatgttagcatcaatcattccacactattgaacacagataactggaagcatgcaaatcagcaatacttcaaatgtttagcaatgatgcaacaacttcgacaggtttctttgaagtttaacaaagatctaggtttggaagaggttaacaaggctatgtcatttatgagtcatctgttgactgtgttgtctgaacaacgacatcttgcttataatctatttgatcaacggaaccaattcaagcatgctattttcttattaggttctggaggaaagagtaaatctctatcatcaagccaaaatgtgctgctgagttccatgtggcagcaaaagaaattgtttgatgctgtaatcactttgataacagactccaacttattgctcagaagcttcaaggattgccattataactcttgtaacaactttatagaagttgaagggatctcatctctccttggaaagttcatcttgaatttttctgaatccaaggagttgttagatgaatgcttgcttggatccactaatatatttgctggtgcatataagagcatgcctcattctgcaacagagatggaacaactttttactgataattgccagcatatagattcattgttggatggatacttgcctggatccaataatatatttccagatgcatataagagtattcctcttgctacaacagagatggagcaactttttgctgataattgccagcttatagattcattgagagaagatatgaaggttctatgccacagggatctttcagtgggatctgttaagaaagttcttatctctcgtttggaagaattgttggagaagggcaagatggcaatggagaaccgaagacatgttgaagaaaatcataagctatgcttaaagcttgaagcttcgtatatagaaattttgaaggaaactttcatgttagttgttggtgctgtcagaaagctcactgatcatgaagtatgcagtaatggaactgaaaaatcgccagttggtaatgttgcatcatggaaagatactttgcagacatgcattatgaatcttaaattggatgatatttgtgttgctggtgaaaagattcgtattctagtgaggttgctggttgactataaacctgatatacgtactagtatagagctgcacctaatgcatcttcatgcttggctgagtgtgatcctatcatcagcagaagggatactttccgaacttttagaagcacacataacaacttctgaaatgactcttgcacttggggacctttttattcatttatttacggatgggtttggttccactgaagatacagccgaagatgcagatgaactacagcaagatgctgttggaagtggaactggaatgggtgagggggatggtcaaaagagtgtaagctctgatatagatgatgaatcacaacttggtgacagtaaggacttgacatgtaaggcagatcccgctcctaagaacgatgataaagctgttgaaatgcaagacggttttaatgcacaattatctgatgtttctgaggatcttgaaggcaaagactcgggtggcgaagatgaggataccttggataatcagatgggtgatactggtgatgcaagtgaagtggttggcaagaaatcatgggataaggatgaagatgatgatcctaagacatctattgagaaatatgagtcaggctcatcagccaagggaacacaacaggatgatagggaaatgagagctaaggatgatggttctattgaggaggaagatccgatggaaatggattctgaggaaggaaagaataataatcttgaacatgatcctagtacccatgatgaaaccgaactgaatactgatgaagtcatggacaaagctgatgcatatgatgaccggactggacctgaactccctgaaccagagaatgattccattgatgttgacatggtggaacaagaacaaacggatgaaataaatgctgacaatgaagatataggtacagaagaagctgaacaagcagatcagaggttagatgcttcagatgatatggaggaaggagatatggcacaacatagcgatggtgtggtagataatgaaggggagcatgttgaagatgcaaatacagacgcaggtgagatggattcacaccaattggacaaggcggattcacttatgcctctgtcacaaggcctacagcctgacaatatgcaaataaattctaatggagaatctgaagcgaacttggccaacagcagtgatatgcatggcgctgttgctccttcagtaaatttttcaggaaatgaagtgcccaatatggaaatatctatgcccaatactggtaacgattcaatactatcgtctaactccaagccagatatgcaaaatgatgctcagcagcacatcaagcagacaaatcctttcagaagcatcggagatgcattggaggactggaaagaacgggccagagtctcagctgatactcaggatcatcaaccagaaactggaaaagatagtagtgagaacactactgaatttcgttatgtgcctgagggtgaggagagcacctctcaggcattgggtgctgcaacagctgaccagatcaattatgacaatcagattaatcaatctttcttggaagatgaaagctgtatcaggaatttggaacatagtgatgagagaacacctgataaccctgaggtgccttaccttcaaacttcacaagcacttcccaacaagtctgaaaatgccaatgaattggatggaagagaaattcaaactgatgcatccgttcaaaatttagttgaaagaacagatcacactttccaagatctagtttctttcaaacaacccccggcagatgataaaatagctcttattgacctaactactgacagggaattgccttctcagatggatctcgacatcactgatgcagagacaaaaagatctaatgcggtctggaaaaatcttgagctcgcaaccatgaaattgtcccaagaactggcagagcaattgcgcctggttatggaaccaactcttgctagtaagcttcaaggggattatagaactggaaagagaataaacatgaagaaggttattccatatattgcgagtcatttccgcagggacaagatatggttgcgccgaactaagcctaataaacggaattaccaagtggttattgctgttgatgactctagaagtatgtctgagggcaaatgtggaaaatttgctatcgaggcattagttactgtgtgccgtgctatgtcacagcttgaggttggacaatttgcagttgcaagttttgggaagaaggggaacgttagtgtgctacacgattttgatcagatctttaatagtgaagctggagttaatgtgatctctagcttgtcgtttgagcaagataacaaaattgaggatgaaccggtgtctgatctcttgacacatctgaatgttatgcttgatactgccgttgcacgggcacgcaccccatcagggcaaaatcctctccagcaactgatactgataatatctgatggaaaattccatgaaaaggaaaacttgaggcgccatgttagagacgttctaaatcgaaagaggatggtcgcgtatgtgctcctggatagccccgaggattctattattaatctaaaggaagcatgcttcagagtaggggagaaggtagagctgaaaaaatacatggattcctttccgttcccgtattatgttatgctacagaacattgaagctcttcctcgcacattggccgacctgcttagacagtggtttgagctcatgcagagcgccaacgagtgacccttgggagttgggagtagtgccacgcatttagctgtacagcaaactacattctagcttccatttttgcttgggcctggacagttctgtggtggcaagcttgattgtgcacaaatgccttcacggttcaaatcgctttcctgaaatatgatctctggtcgcaggcttgattgtctaaaagcatcatcacaattcaaattgtttttgggaaatttgaatagaatttccgctttcctgaaatatggtctctgctcgcaggctttattgtgtaaaaacatcatcacaatttaaattgtttctggcaaatttgaatagaatttccgtgctcaagagttatagtttgttttttttttcaatggagaattgttgctcacgtgctacatgcgacctgagtgtgattgatccttcaatcttgccctgctgttcatcttgtgttgtttgtcatgtttggctttgttgatgtacatgtttcttccactgcatgtgctacgcgttgacgatgtacgcaactgtcgctgccaacgcgaccactttatatatgtgacagtgacacatgccaggggcagatctagaaatctacaaaatctcttcaagctctttctctcttgtaagggattgtttgtttgag

SEQ ID NO: 59789 - DNA, 16044 bp, Zea Mays
ggtctcgctactttgcctgaatgtttgttggattggccagatgttgtaacagtaggaaatcatagcatgggaagcccgttcgtgcttacagctactttaagaaagagttacgaggtagctttgatggcagttggccagaagtggcctgtacttctctatgggcctgttggtgcaggaaaatctgcacttattaacaagttggcacacatagttggaaatcgagtactttttatccacatggatgagcaaatggatggcaggaccttattaggaagttacgtttgcacagagaaacctggtgaattcaagtgggctcctggttcgcttacacaggctattgtcaaagggttttggattgtgtttgaagacatagacaaagcacctagcgatgtgcgttcaattttagtgcctttattggagggttcaaataccttttcagttggccatgcagaggccgtggaagttgctgagagttttcgcttctttgcaaccgtcactacatcaaagaacgatgtttcccatgatctgccagggagactcacatttagtgcattgtggagaaaagtgatggtgggagaacctaatcagagtgacatggttaatataattaaagggtgctacccaagcttggagcccatctcctccaaactcatagatacctttgaaaaggtcaactctcttggatcttatcagtttggtagtctcaacttggcagggggtttatctgatggtgttctgcacagattttcattaagggacctgctaaaatggtgcaagagaatattagggactgacctcaactttgaggacctcagatttgcatctagtggatgcaaattaatctatcatgaggctgttgacattttcactgcttcattatcatctccggagaaaaggttgtatgtagcaggagaaattgctagaatattatgtgttccttaccgaggagaaacagtgcaacctactgaaaagcccgtcatccaggctcgacatatggaattgcaagttggtagagttacattgccatgctgcgacaaacctacattaatccagaaagggccttttgctgatattcggcgtgcattagaaattcttgaaagggttgcatgttctataaaattcaatgagcccattcttcttgttggtgaaactggtactgggaagaccactactgtgcagaatcttgctgcctggcttaaacaaccgttgactgtggtgaacttaagccagcaaagtgacatttctgatctccttgggggatttaagcctacagatgctcgatcgatatgttttcctctttatatggagttcaaggatcttttttctcgaagtttttctgcaaaggacaatgaagctatgatacgttattgtgatgagtttgtaatgaacaagaattggaaaaaactactaaccactttggaaagatatgttgcgaaggctcagaagctaattgaagggtctaagtcttcaagtggttcaaagaggaaacgacctttgccagcccatgttgtttctgattgggacaccttctcttccagactgaatatggcttgtagtcaaattggttcagcaactggcatgtcatttcagtttgtggagggtgcttttatttcagctttaaggaaaggccattggattttgcttgatgaggttaaccttgcacctccagagacacttcaaagaattggtgctgtactggatggagagaggggcacactttgcctagcagagaggggagacgtggattatgttgaacgtcatccttgcttcaggatatttgcctgcatgaatccagcaactgatgctgggaaaagggaactgccgtacacttttaggaaccgctttactgaatactttgttgatgatcttatggatgacgatgatctacgtctttttgtcaggaaatatctggatggtctgaatgctgcaaatggagttatagatagtattgtgcgattttataaagtggcaaaaaaggagtgtgaggagagactgcaggatggagctaatcagaagcctcaatttagtttgagatctctatctcgtgctttaggatatataaaaaacgcagagaaaaaatttggcttcaggaaagccatttatgatggtttctgtatgttctttcttacattgttggatcctcctagtggaaaaatcatgaagaacttaatagtttcacttctgttagatggaagagtgccacctaacatttcttttgttgactacttcactgataagcctttgcaattaggtggctgtgaatcggatgattttttgcagagctatgttttaactcaaagtgttactgagcacataatcaaccttgcccgtgctgtttacattagaagataccctgttcttctacaagggccaacatcaagtggcaaaactagccttgtgaggtatcttgctgcaaaaactggacatgagtttgtccgaatcaacaaccatgagcatactgatctccaagaatatctgggtacttatgtgacagatagtcaagggaagcttcagtttcaggagggtgctttggtgaaggctgtgcgggaggggcactggattgttttggatgagctaaatcttgcaccgtctgatgtcctggaagctttaaataggctgttagatgacaacagggaacttttcattccagagctgcaagagactataccagcacaccctaattttatgctcttcgctacacaaaacccacctatgctttatggggggcgtaaaatgctgtcccgggcgttccgcaatcgttttgttgaagtgcatgttgatgaaataccagaagatgagctagccacaattttggagcagcgatgtagaattgctcccagttatgcgaaaaggatggttgaggttatgaaagaattgcaaacacatagacaaaatagtagagtgtttgctggcaaacatggtttcataacacctagggatctatttcgttgggccaatcggtacaggacatttgaagggaagtcatacgaagatctggcgaaagatggttatttactgctggcagagagattaagggatgtcaatgagaaagttgttgttaaagaagctttggagcgtcacctacgtgtaaaactcaatatagctgatttgtataactcggaagtcacccgtgaagataatttattcattgatgttatcaaactaagagtacaagattgcgttgggaatatcacttggacaaaaagtatgtggaggctatacttccttattgagcgttgctacagatcacgcgaacctgtcctccttgttggcgaaactggtggtgggaaaacaactgtttgccagattctaagtgctgtccttgggttgaagttacatattttgaactgccatcagtatacagagacatcagacttcattgggggattctgccctatacgtgatagatcaagaatagcaattgagttcaaagatcttgttgcaaaaatcaaacagatgaaaatgtttttttatgttgcagggaatgttccgcttgaaactgatgtatctggagctgatagtgtcatcagtcatctggatgaaatacttgacagatacagaaagaaaaaatatctgtttcctgaggtgtctgctcaagatcttggtgccatggagcaaatcaagttggatttgatgcatctccacaagaggtggcaagcaattttcctgtggcaggatggaccgcttgttcaagcaatgaagaatggtgatcttttcctcattgatgaaatttctttagctgatgacagtgtgcttgaacgcttgaacagtgttctagaacctgaaagaaaattgtcattggctgagaaaggtggttctgtgttagagaagattgtagcacatccaaacttcttcatccttgcaacgatgaaccctggtggtgactatggaaaaaaagagctttctcctgcattaagaaatcgatttactgaaatttgggttcctgctgttattgatgttgatgaacttaggagcataacttttgggaggttcaccaaaactgacttctcttgccttggagattgcattgttaacttctggaagtggttcaaccaattgcacatcgggagaacattgacgatacgggacctgctgtcatggatttcatttataaacgtgactgaacaaaatcttgggcccgagcaagctttgatacatggcctgtttcttattttgcttgatgggctctcattaggtctaaatgtttctaaaactgaggctactgagatgaggaatacttgcttgtccttccttctagaagaattgcagaaagttgggggcacggcagtagattcatacttgaatgatctaaataattatggctggggtgacaatatgaaaaaaaaagatatagatcatggttgtttggaagatcatttcggcattgcaccattctatattcctaaaggccattttccttgtaagcaacaggactttgaaataatggcgcccacgaccagtaagaatgtcttgcgagttttgcgtggtatgcaactacctaaacctctccttctggaaggtagtcctggagttggaaaaacaagtttaattgtagcattagctggattttctggtcatgatgttgtacggataaatctatctgaacagacagatatgatggatcttctaggttcagacctgccagctcaagggggaaatggaatggaattttcctggtctgatggtattcttctccaggctttaaagaatggaagctgggttcttttggatgagctcaatcttgctccacaatctgtcttagagggcctgaatgccattctggaccaccgtgctgaggtcttcatacctgagcttggtcaaacttacaaatgctcatcgtcttttcgggtctttgcatgccagaatccttcatcgcagggtggtggacggaaaggccttcccaagtcctttctgaaccgcttcaccaaagtttatgttgatgagctatcagaggaagattatctattcatctgtaaatcacgatatggttcattgatttctgaaagtttcatccgaaatcttattcactttaatagcagactgtatatggataccatggtatataggaagtatggccaacaaggttctccctgggaatttaatctacgtgatattatcagatcttgtgagatgatagcaggttccccaaatcctatgatggatgattcttttttaaatactgtttatctgcaaagaatgcgcacattggttgatcgccatgaagttgtcaagctttatgaggatgtctttaagaaaaagatcagcattcaccaaccaaaaatgctccatgttaatccacattgcttggttgttggaagtgcctctattagaagaaataacatccaatcatataaagtgcaaaacaatcaactcaacatatttccaggtgtccttaatagtcttgaagcagccatgcactgtatccagcaaggttggttgtgcattcttattggacaaaattcagctggtaaaacatcattaatccgcttgctggctcagctttctggaaatacgttgaatgagttaaatctgtcgtctgcaactgatgtgtccgaattgttgggatgctttgagcagtataacttctttaggcactacaaaactgttttatcagaagttgagcattatgttgatgtgtatttcagcctgagtattgatacgaaccagaagaattttgttgcagaaagaaggggtttgtttaccaaatggtttgaatttgtggctgcaaaagggcactcctcaattaagacttcgaaattaatgagtgggaatgcatctttgccttcattaagcttgcttgctgaaatagttgagcagatgaaatgtgatctggaaatgtttgacttctctataccattgacaaaagatgatcttagtgaaacactgaagtccatcaacaacttgcagcaaaatggagctgcacaccaaccagttagattcaaatgggttgcgggagatttgattagagccattgagcgtggtgaatggattgttttagataatgcaaatttttgtaaccctactgtacttgataggataaactccttggttgagcaagaaaggtctattatggtcaatgagtgtggtcttgttgatggaaatcctgtagttatcaaagcccaccctaagtttcgaatgtttttgacagtaaattcaaactatggtgaagtttcaagagccatgcgaaacagaggagtggagatctttctgatggaccaaagttggaatctgaaaggatttagcaatgtacctggggacagtgaacggaaggatgtgataagatttttaatttcttgcggaatacccagaatggaactggtctcgtcaatgtgtgaagcacacatgtacgcaaaaggtgaaggttcacgtgttggtgtgaacattacccttcttgaaatcacgcgctgggttcagttgttccaacaactgattgttaaaggaaatcagttcctttggagcctgcatttgagctgggaacacacatatctaccatgtttgggtgaaattaatggatctggcattgtggaggaaggaaaaaataagtttttgactaattttgacagatctgaaattttggctagaaactttagttttttgactgtttttgatggttgttcaactagtttgcattctggattatctttgtccttgccgggtggttggccaattgagcaaaaactaagggatctcatttggtattcaaaagaaacttgtgtcatgaggaattgcatgtttctacagtcattgggtgcccaatacgctgcttatcagataagcagtttgaatgataattcattattgttgggtcagattagtctcatccacccatctattcttcctgctgcaagcttacgcgaattacagtttcctacggttaatggtcagcctgtcaaaatttgtgtcactggggcattcaattcatacttagctgatcagatgcttttctttgctgcaaactgggtaatggagcaatgtactaaaaacgatcttgaactatatggcaaatggtttaattggtataactctctggtccagccttattgcaacttctttgagagctattggtatattctggagcaagaaagtgagcatcctatttggcataacatccttgaatattacagggaaatagttgcctatcacaatattgatattgttactcagcatattccattactctcgaagaagttgctggatatggctggttgtgatagcctgaaagcatgccaaaaccggctgcatcgttcttttaaggctttgggcttgttgcggcttactctgcagcaatggcaaattgagacaaaatgtcctgatctttctgtcctggaatgtactttgttgccagcattgaagtccctcagatgcttagagggcgaggtacttaaaacgattgcgaaatcttggaagcggctcaaaatatactctctccttcttgattaccacagatcaatatggaaaatgatgattgcatctcagttagaggggctaccaattgtttggaatcttttgaggaaagaaatactgaagttgcagcagaagttcccggttgaagttgacgtctttttgatggaatgtgtgaatctcaacaatataaatgataccaattttcaatatggtaaaccaactttgtgggattatggtggtcatcctcatctgccatcatctagcgagatatttgacaaaatgcaagaacttttgtccttcacaacagatgtgtggccaaggaagaatcttttgaatatagagcttgatgataggaaacagttgactgatgctatgctgtcagccaacaaggatcttagacaccttgcaatggaaggtgtctctatggcttgcattgctacaatgaaaactgaggaagatgttttagctgttgtcccccaattggatgaagttcacaagcggcttgtaggaaaggttaactctgtgagggataatcttggattattgtccaagacatcagtgcctgaatttaagttctgttgctcagtgtcctctgagattctatgtaacatttatggtttcaatggctggctagcaagtcttcctttgctcaacttgaagagcttaaacttggatacccttttacttcaacagctatgcaagtgcacacaaaaagattcttctgaaactcatgagattcttgttaattctgagtacctgctgaagtatgctatggattactcactgggttcatcttcaagatctcctctggactatattcaacatcagatcatttggtggatttgtcatgactgggccaaagttgacaatgcacatttaaaagttgctagttgtattcttgaaatgtggtacaactatcactcttccttgtggacttattgctcaggaagcccaaagtgtctattctcagtcacacatgatgattcctgtgacttggcacacctgacaaaaatggacgccatcaatactattatccagcaggatttacatgtggtggattatctgaagagtggtgtaatgcttaaagttgcatctagaaacctctgggaaggtgtttcgtgtttgggaaactttgtttctagtctgcactctgctgctgattccctctttaagcagattatatttgtccataagaagcatttcgaggaagagaactataaccagttagagtctctcctgttccaacaatcgagacgtttgatagagaaagaagatctggacactgtttgtgctctgttatcatcttcaagctgtagagtattggcttcgctctcagagtcagataaactcgtagaatccttgcttatggacttgtattcatcctactcccgtgactctttgttgcataccggagctgcttgggtccgtattggagagttacgcttccggttattgttgagctcatacagtccagatcctacatttaagtctagatacaagcattcacatattttggaaaaaattacacttgtgaagcttgaggaaaaggttcgtcatgattgtgaggaattagctggttctaactcccctgaagatagccatgacaacgagttattgcaattgctggaaattaaagagaaagacacccgtgcaaaggttgtatttcgtcctcgacaatctaagcataagagtctcattgctgcatgccttgagtttgaggaccgcctgtctgagtgcaaggacttgttagctagcttaacttgcgaaggacttgggcaactagaggttgaccgagtgtgcaattgataatatccatgaactttatcaagaggctgacagaagattatagggaatatgttgatttgatccagccaattcaagttgctgtatatgaaatgaaacttggcttagcaattgctctatctggttctcttcagagggagtatttgaagaagattaaagaagatgatattaatagagttcttggagcaatttatgcttttatgcagtttccctctggatcttttactgaaagggttgtaactgacgtgactgatgatcttacaaattatacaatcactggccaactaggaaccctaaacagttgttctggagatgtagatatgttgaagaagcttgctgctatgtcaagtcagttgaatgtttgtaaagttgctggcaaagtgaagtccctgtccgagatgcttgcttcagtgcatcatatttttttagtaagaacagctgattgtgtcagctgttcccttgtcatggataagtcatcttatgcgtcattgaaggatacctttgatcattttacaagcatgtggatcaacatgaaataccgtttgaaggctaaagaaagcgatgattctcagtacttcaagttcaaatcgcgaatgatcagtatagacgacatctttaaagatgtgccgttgctttctgatatggaatcagaagacagcattttagataatgaagaaaaactagagcatgaatttttcaaaattacggaaagtattgatgacgataatggtgttgttgaagacaactgggatttgataccagagtctgctcttaaatgtattgtgaccatacatgaccaattgtttggttcgcccgatctttttgagaagcgccgcaaatgtcaagttagtgatgcacagaaagtccagtctttcatagaatcatatgagctgggaacaagaatacttaaagacctcccggaattaacatgttctatgtttgatgaaaagctcatgcctgagcacctatttcgtgtttgtcttgaataccaacgatcctgtgcaaaaacacatcaagattgtagtggttataatgcttacaaggatccaaatcctcctgtcttgtttaaaatggttgagtcactaactacacttcaggagagagttaatagctatctggatgaatggcctgatcatcctggtctcttgaaaatactggacctaatcgcttcccttttagcgatgcccctaagcacgccaatttcgaaggtcttgcttggattgcaattgctggctgggaaagctcaaacattgcaggaaaatgactccaagttctttgtaaaagatcatcttgcatcgatatttttgcttgtgtattcatggcaaaggctcgagttagattgttggcctatactgcttgaggaggtccagacaaagtatgagttgaatgctgcaaagctgtggtttccattgcgagccttacttactcaaacttctggtattccagtggatgatgatttgtctattatcagaagtgttgaggaatttgttcaaacatcaagtcttggagaatacaagagacgattgcatatcctctttgccttccatggtgagatttctgctggtgctagcttgggtagttattcaagtaatgcggtgaagaaaatccagaatattctgtacagtgtgtttggttactatatgcagtttttgtcactcgttcatgggaaaattgaagaaggtaaaaaaaacattgagaaggagttgaaagatcacgtcaagctttacagctgggagcaagcaccatatagcagcgcttctattgaaaattttaaaaggactaggcaaaagatttttaagcttctgcaacggttcaatgatattttgaaaagtcctgtcatctttctactgaatgaagaagccacatcaaggaagattccatgctggcttgatcctcagaggcctgaatcacaccttcctgttgactctgaaaaatttaacaaaaggtttctgtggtaccacaagtgggcaagtgagacgtctttatcattacaaacattgcagcaatcaaatggtagtactgttggagttcctactgccaaagatatggtatatgatgtgaagcactggcagaatgaaattgagctcaatgacagattgcagttcttctggatctcacttgagagaatatgtggggcagctaattttggtagtacagtgaagcatgggaaaaagaatcagaagaaaacagctctatccaatctgttcaagactcttgaggaatgtggactatctaagcacaggccaatgagtcatgagtggggagatgagctggcagcaccaagtccattgttcttggagcagtcatatgattctgcacatttattacagcaaataaactctcagaaaatgctggaagatgttagcatcaatcattccacactattgaacacagataactggaagcatgcaaatcagcaatacttcaaatgtttagcaatgatgcaacaacttcgacaggtttctttgaagtttaacaaagatctaggtttggaagaggttaacaaggctatgtcatttatgagtcatctgttgactgtgttgtctgaacaacgacatcttgcttataatctatttgatcaacggaaccaattcaagcatgctattttcttattaggttctggaggaaagagtaaatctctatcatcaagccaaaatgtgctgctgagttccatgtggcagcaaaagactccaacttattgctcagaagcttcaaggattgccattataactcttgtaacaactttatagaagttgaagggatctcatctctccttggaaagttcatcttgaatttttctgaatccaaggagttgttagatgaatgcttgcttggatccactaatatatttgctggtgcatataagagcatgcctcattctgcaacagagatggaacaactttttactgataattgccagcatatagattcattgttggatggatacttgcctggatccaataatatatttccagatgcatataagagtattcctcttgctacaacagagatggagcaactttttgctgataattgccagcttatagattcattgagagaagatatgaaggttctatgccacagggatctttcagtgggatctgttaagaaagttcttatctctcgtttggaagaattgttggagaagggcaagatggcaatggagaaccgaagacatgttgaagaaaatcataagctatgcttaaagcttgaagcttcgtatatagaaattttgaaggaaactttcatgttagttgttggtgctgtcagaaagctcactgatcatgaagtatgcagtaatggaactgaaaaatcgccagttggtaatgttgcatcatggaaagatactttgcagacatgcattatgaatcttaaattggatgatatttgtgttgctggtgaaaagattcgtattctagtggtttgtaccattacctttacacttttcttatctgtattttttttgttattaccatctcatttgttattgtttgcaacagaggttgctggttgactataaacctgatatacgtactagtatagagctgcacctaatgcatcttcatgcttggctgagtgtgatcctatcatcagcagaagggatactttccgaacttttagaagcacacataacaacttctgaaatgactcttgcacttggggacctttttattcatttatttacggatgggtttggttccactgaagatacagccgaagatgcagatgaactacagcaagatgctgttggaagtggaactggaatgggtgagggggatggtcaaaagagtgtaagctctgatatagatgatgaatcacaacttggtgacagtaagcaggacttgacatgtaaggcagatcccgctcctaagaacgatgataaagctgttgaaatgcaagacggttttaatgcacaattatctgatgtttctgaggatcttgaaggcaaagactcgggtggcgaagatgaggataccttggataatcagatgggtgatactggtgatgcaagtgaagtggttggcaagaaatcatgggataaggatgaagatgatgatcctaagacatctattgagaaatatgagtcaggctcatcagccaagggaacacaacaggatgatagggaaatgagagctaaggatgatggttctattgaggaggaagatccgatggaaatggattctgaggaaggaaagaataataatcttgaacatgatcctagtacccatgatgaaaccgaactgaatactgatgaagtcatggacaaagctgatgcatatgatgaccggactggacctgaactccctgaaccagagaatgattccattgatgttgacatggtggaacaagaacaaacggatgaaataaatgctgacaatgaagatataggtacagaagaagctgaacaagcagatcagaggttagatgcttcagatgatatggaggaaggagatatggcacaacatagcgatggtgtggtagataatgaaggggagcatgttgaagatgcaaatacagacgcaggtgagatggattcacaccaattggacaaggcggattcacttatgcctctgtcacaaggcctacagcctgacaatatgcaaataaattctaatggagaatctgaagcgaacttggccaacagcagtgatatgcatggcgctgttgctccttcagtaaatttttcaggaaatgaagtgcccaatatggaaatatctatgcccaatactggtaacgattcaatactatcgtctaactccaagccagatatgcaaaatgatgctcagcagcacatcaagcagacaaatcctttcagaagcatcggagatgcattggaggactggaaagaacgggccagagtctcagctgatactcaggatcatcaaccagaaactggaaaagatagtagtgagaacactactgaatttcgttatgtgcctgagggtgaggagagcacctctcaggcattgggtgctgcaacagctgaccagatcaattatgacaatcagattaatcaatctttcttggaagatgaaagctgtatcaggaatttggaacatagtgatgagagaacacctgataaccctgaggtgccttaccttcaaacttcacaagcacttcccaacaagtctgaaaatgccaatgaattggatggaagagaaattcaaactgatgcatccgttcaaaatttagttgaaagaacagatcacactttccaagatctagtttctttcaaacaacccccggcagatgataaaatagctcttattgacctaactactgacagggaattgccttctcagatggatctcgacatcactgatgcagagacaaaaagatctaatgcggtctggaaaaatcttgagctcgcaaccatgaaattgtcccaagaactggcagagcaattgcgcctggttatggaaccaactcttgctagtaagcttcaaggggattatagaactggaaagagaataaacatgaagaaggttattccatatattgcgagtcatttccgcagggacaagatatggttgcgccgaactaagcctaataaacggaattaccaagtggttattgctgttgatgactctagaagtatgtctgagggcaaatgtggaaaatttgctatcgaggcattagttactgtgtgccgtgctatgtcacagcttgaggttggacaatttgcagttgcaagttttgggaagaaggggaacgttagtgtgctacacgattttgatcagatctttaatagtgaagctggagttaatgtgatctctagcttgtcgtttgagcaagataacaaaattgaggatgaaccggtgtctgatctcttgacacatctgaatgttatgcttgatactgccgttgcacgggcacgcaccccatcagggcaaaatcctctccagcaactgatactgataatatctgatggaaaattccatgaaaaggaaaacttgaggcgccatgttagagacgttctaaatcgaaagaggatggtcgcgtatgtgctcctggatagccccgaggattctattattaatctaaaggaagcatgcttcagagtaggggagaaggtagagctgaaaaaatacatggattcctttccgttcccgtattatgttatgctacagaacattgaagctcttcctcgcacattggccgacctgcttagacagtggtttgagctcatgcagagcgccaacgagtgacccttgggagttgggagtagtgccacgcatttagctgtacagcaaactacattctagcttccatttttgcttgggcctggacagttctgtggtggcaagcttgattgtgcacaaatgccttcacggttcaaatcgctttcctgaaatatgatctctggtcgcaggcttgattgtctaaaagcatcatcacaattcaaattgtttttgggaaatttgaatagaatttccgctttcctgaaatatggtctctgctcgcaggctttattgtgtaaaaacatcatcacaatttaaattgtttctggcaaatttgaatagaatttccgtgctcaagagttatagtttgttttttttttcaatggagaattgttgctcacgtgctacatgcgacctgagtgtgattgatccttcaatcttgccctgctgttcatcttgtgttgtttgtcatgtttggctttgttgatgtacatgtttcttccactgcatgtgctacgcgttgacgatgtacgcaactgtcgctgccaacgcgaccactttatatatgtgacagtgacacatgccaggggcagatctagaaatctacaaaatctcttcaagctctttctctcttgtaagggattgtttgtttgag

SEQ ID NO: 59790 - DNA, 15717 bp, Zea Mays
ctcgctactttgcctgaatgtttgttggattggccagatgttgtaacagtaggaaatcatagcatgggaagcccgttcgtgcttacagctactttaagaaagagttacgaggtagctttgatggcagttggccagaagtggcctgtacttctctatgggcctgttggtgcaggaaaatctgcacttattaacaagttggcacacatagttggaaatcgagtactttttatccacatggatgagcaaatggatggcaggaccttattaggaagttacgtttgcacagagaaacctggtgaattcaagtgggctcctggttcgcttacacaggctattgtcaaagggttttggattgtgtttgaagacatagacaaagcacctagcgatgtgcgttcaattttagtgcctttattggagggttcaaataccttttcagttggccatgcagaggccgtggaagttgctgagagttttcgcttctttgcaaccgtcactacatcaaagaacgatgtttcccatgatctgccagggagactcacatttagtgcattgtggagaaaagtgatggtgggagaacctaatcagagtgacatggttaatataattaaagggtgctacccaagcttggagcccatctcctccaaactcatagatacctttgaaaaggtcaactctcttggatcttatcagtttggtagtctcaacttggcagggggtttatctgatggtgttctgcacagattttcattaagggacctgctaaaatggtgcaagagaatattagggactgacctcaactttgaggacctcagatttgcatctagtggatgcaaattaatctatcatgaggctgttgacattttcactgcttcattatcatctccggagaaaaggttgtatgtagcaggagaaattgctagaatattatgtgttccttaccgaggagaaacagtgcaacctactgaaaagcccgtcatccaggctcgacatatggaattgcaagttggtagagttacattgccatgctgcgacaaacctacattaatccagaaagggccttttgctgatattcggcgtgcattagaaattcttgaaagggttgcatgttctataaaattcaatgagcccattcttcttgttggtgaaactggtactgggaagaccactactgtgcagaatcttgctgcctggcttaaacaaccgttgactgtggtgaacttaagccagcaaagtgacatttctgatctccttgggggatttaagcctacagatgctcgatcgatatgttttcctctttatatggagttcaaggatcttttttctcgaagtttttctgcaaaggacaatgaagctatgatacgttattgtgatgagtttgtaatgaacaagaattggaaaaaactactaaccactttggaaagatatgttgcgaaggctcagaagctaattgaagggtctaagtcttcaagtggttcaaagaggaaacgacctttgccagcccatgttgtttctgattgggacaccttctcttccagactgaatatggcttgtagtcaaattggttcagcaactggcatgtcatttcagtttgtggagggtgcttttatttcagctttaaggaaaggccattggattttgcttgatgaggttaaccttgcacctccagagacacttcaaagaattggtgctgtactggatggagagaggggcacactttgcctagcagagaggggagacgtggattatgttgaacgtcatccttgcttcaggatatttgcctgcatgaatccagcaactgatgctgggaaaagggaactgccgtacacttttaggaaccgctttactgaatactttgttgatgatcttatggatgacgatgatctacgtctttttgtcaggaaatatctggatggtctgaatgctgcaaatggagttatagatagtattgtgcgattttataaagtggcaaaaaaggagtgtgaggagagactgcaggatggagctaatcagaagcctcaatttagtttgagatctctatctcgtgctttaggatatataaaaaacgcagagaaaaaatttggcttcaggaaagccatttatgatggtttctgtatgttctttcttacattgttggatcctcctagtggaaaaatcatgaagaacttaatagtttcacttctgttagatggaagagtgccacctaacatttcttttgttgactacttcactgataagcctttgcaattaggtggctgtgaatcggatgattttttgcagagctatgttttaactcaaagtgttactgagcacataatcaaccttgcccgtgctgtttacattagaagataccctgttcttctacaagggccaacatcaagtggcaaaactagccttgtgaggtatcttgctgcaaaaactggacatgagtttgtccgaatcaacaaccatgagcatactgatctccaagaatatctgggtacttatgtgacagatagtcaagggaagcttcagtttcaggagggtgctttggtgaaggctgtgcgggaggggcactggattgttttggatgagctaaatcttgcaccgtctgatgtcctggaagctttaaataggctgttagatgacaacagggaacttttcattccagagctgcaagagactataccagcacaccctaattttatgctcttcgctacacaaaacccacctatgctttatggggggcgtaaaatgctgtcccgggcgttccgcaatcgttttgttgaagtgcatgttgatgaaataccagaagatgagctagccacaattttggagcagcgatgtagaattgctcccagttatgcgaaaaggatggttgaggttatgaaagaattgcaaacacatagacaaaatagtagagtgtttgctggcaaacatggtttcataacacctagggatctatttcgttgggccaatcggtacaggacatttgaagggaagtcatacgaagatctggcgaaagatggttatttactgctggcagagagattaagggatgtcaatgagaaagttgttgttaaagaagctttggagcgtcacctacgtgtaaaactcaatatagctgatttgtataactcggaagtcacccgtgaagataatttattcattgatgttatcaaactaagagtacaagattgcgttgggaatatcacttggacaaaaagtatgtggaggctatacttccttattgagcgttgctacagatcacgcgaacctgtcctccttgttggcgaaactggtggtgggaaaacaactgtttgccagattctaagtgctgtccttgggttgaagttacatattttgaactgccatcagtatacagagacatcagacttcattgggggattctgccctatacgtgatagatcaagaatagcaattgagttcaaagatcttgttgcaaaaatcaaacagatgaaaatgtttttttatgttgcagggaatgttccgcttgaaactgatgtatctggagctgatagtgtcatcagtcatctggatgaaatacttgacagatacagaaagaaaaaatatctgtttcctgaggtgtctgctcaagatcttggtgccatggagcaaatcaagttggatttgatgcatctccacaagaggtggcaagcaattttcctgtggcaggatggaccgcttgttcaagcaatgaagaatggtgatcttttcctcattgatgaaatttctttagctgatgacagtgtgcttgaacgcttgaacagtgttctagaacctgaaagaaaattgtcattggctgagaaaggtggttctgtgttagagaagattgtagcacatccaaacttcttcatccttgcaacgatgaaccctggtggtgactatggaaaaaaagagctttctcctgcattaagaaatcgatttactgaaatttgggttcctgctgttattgatgttgatgaacttaggagcataacttttgggaggttcaccaaaactgacttctcttgccttggagattgcattgttaacttctggaagtggttcaaccaattgcacatcgggagaacattgacgatacgggacctgctgtcatggatttcatttataaacgtgactgaacaaaatcttgggcccgagcaagctttgatacatggcctgtttcttattttgcttgatgggctctcattaggtctaaatgtttctaaaactgaggctactgagatgaggaatacttgcttgtccttccttctagaagaattgcagaaagttgggggcacggcagtagattcatacttgaatgatctaaataattatggctggggtgacaatatgaaaaaaaaagatatagatcatggttgtttggaagatcatttcggcattgcaccattctatattcctaaaggccattttccttgtaagcaacaggactttgaaataatggcgcccacgaccagtaagaatgtcttgcgagttttgcgtggtatgcaactacctaaacctctccttctggaaggtagtcctggagttggaaaaacaagtttaattgtagcattagctggattttctggtcatgatgttgtacggataaatctatctgaacagacagatatgatggatcttctaggttcagacctgccagctcaagggggaaatggaatggaattttcctggtctgatggtattcttctccaggctttaaagaatggaagctgggttcttttggatgagctcaatcttgctccacaatctgtcttagagggcctgaatgccattctggaccaccgtgctgaggtcttcatacctgagcttggtcaaacttacaaatgctcatcgtcttttcgggtctttgcatgccagaatccttcatcgcagggtggtggacggaaaggccttcccaagtcctttctgaaccgcttcaccaaagtttatgttgatgagctatcagaggaagattatctattcatctgtaaatcacgatatggttcattgatttctgaaagtttcatccgaaatcttattcactttaatagcagactgtatatggataccatggtatataggaagtatggccaacaaggttctccctgggaatttaatctacgtgatattatcagatcttgtgagatgatagcaggttccccaaatcctatgatggatgattcttttttaaatactgtttatctgcaaagaatgcgcacattggttgatcgccatgaagttgtcaagctttatgaggatgtctttaagaaaaatgcttggttgttggaagtgcctctattagaagaaataacatccaatcatataaagtgcaaaacaatcaactcaacatatttccaggtgtccttaatagtcttgaagcagccatgcactgtatccagcaaggttggttgtgcattcttattggacaaaattcagctggtaaaacatcattaatccgcttgctggctcagctttctggaaatacgttgaatgagttaaatctgtcgtctgcaactgatgtgtccgaattgttgggatgctttgagcagtataacttctttaggcactacaaaactgttttatcagaagttgagcattatgttgatgtgtatttcagcctgagtattgatacgaaccagaagaattttgttgcagaaagaaggggtttgtttaccaaatggtttgaatttgtggctgcaaaagggcactcctcaattaagacttcgaaattaatgagtgggaatgcatctttgccttcattaagcttgcttgctgaaatagttgagcagatgaaatgtgatctggaaatgtttgacttctctataccattgacaaaagatgatcttagtgaaacactgaagtccatcaacaacttgcagcaaaatggagctgcacaccaaccagttagattcaaatgggttgcgggagatttgattagagccattgagcgtggtgaatggattgttttagataatgcaaatttttgtaaccctactgtacttgataggataaactccttggttgagcaagaaaggtctattatggtcaatgagtgtggtcttgttgatggaaatcctgtagttatcaaagcccaccctaagtttcgaatgtttttgacagtaaattcaaactatggtgaagtttcaagagccatgcgaaacagaggagtggagatctttctgatggaccaaagttggaatctgaaaggatttagcaatgtacctggggacagtgaacggaaggatgtgataagatttttaatttcttgcggaatacccagaatggaactggtctcgtcaatgtgtgaagcacacatgtacgcaaaaggtgaaggttcacgtgttgctagtttgcattctggattatctttgtccttgccgggtggttggccaattgagcaaaaactaagggatctcatttggtattcaaaagaaacttgtgtcatgaggaattgcatgtttctacagtcattgggtgcccaatacgctgcttatcagataagcagtttgaatgataattcattattgttgggtcagattagtctcatccacccatctattcttcctgctgcaagcttacgcgaattacagtttcctacggttaatggtcagcctgtcaaaatttgtgtcactggggcattcaattcatacttagctgatcagatgcttttctttgctgcaaactgggtaatggagcaatgtactaaaaacgatcttgaactatatggcaaatggtttaattggtataactctctggtccagccttattgcaacttctttgagagctattggtatattctggagcaagaaagtgagcatcctatttggcataacatccttgaatattacagggaaatagttgcctatcacaatattgatattgttactcagcatattccattactctcgaagaagttgctggatatggctggttgtgatagcctgaaagcatgccaaaaccggctgcatcgttcttttaaggctttgggcttgttgcggcttactctgcagcaatggcaaattgagacaaaatgtcctgatctttctgtcctggaatgtactttgttgccagcattgaagtccctcagatgcttagagggcgaggtacttaaaacgattgcgaaatcttggaagcggctcaaaatatactctctccttcttgattaccacagatcaatatggaaaatgatgattgcatctcagttagaggggctaccaattgtttggaatcttttgaggaaagaaatactgaagttgcagcagaagttcccggttgaagttgacgtctttttgatggaatgtgtgaatctcaacaatataaatgataccaattttcaatatggtaaaccaactttgtgggattatggtggtcatcctcatctgccatcatctagcgagatatttgacaaaatgcaagaacttttgtccttcacaacagatgtgtggccaaggaagaatcttttgaatatagagcttgatgataggaaacagttgactgatgctatgctgtcagccaacaaggatcttagacaccttgcaatggaaggtgtctctatggcttgcattgctacaatgaaaactgaggaagatgttttagctgttgtcccccaattggatgaagttcacaagcggcttgtaggaaaggttaactctgtgagggataatcttggattattgtccaagacatcagtgcctgaatttaagttctgttgctcagtgtcctctgagattctatgtaacatttatggtttcaatggctggctagcaagtcttcctttgctcaacttgaagagcttaaacttggatacccttttacttcaacagctatgcaagtgcacacaaaaagattcttctgaaactcatgagattcttgttaattctgagtacctgctgaagtatgctatggattactcactgggttcatcttcaagatctcctctggactatattcaacatcagatcatttggtggatttgtcatgactgggccaaagttgacaatgcacatttaaaagttgctagttgtattcttgaaatgtggtacaactatcactcttccttgtggacttattgctcaggaagcccaaagtgtctattctcagtcacacatgatgattcctgtgacttggcacacctgacaaaaatggacgccatcaatactattatccagcaggatttacatgtggtggattatctgaagagtggtgtaatgcttaaagttgcatctagaaacctctgggaaggtgtttcgtgtttgggaaactttgtttctagtctgcactctgctgctgattccctctttaagcagattatatttgtccataagaagcatttcgaggaagagaactataaccagttagagtctctcctgttccaacaatcgagacgtttgatagagaaagaagatctggacactgtttgtgctctgttatcatcttcaagctgtagagtattggcttcgctctcagagtcagataaactcgtagaatccttgcttatggacttgtattcatcctactcccgtgactctttgttgcataccggagctgcttgggtccgtattggagagttacgcttccggttattgttgagctcatacagtccagatcctacatttaagtctagatacaagcattcacatattttggaaaaaattacacttgtgaagcttgaggaaaaggttcgtcatgattgtgaggaattagctggttctaactcccctgaagatagccatgacaacgagttattgcaattgctggaaattaaagagaaagacacccgtgcaaaggttgtatttcgtcctcgacaatctaagcataagagtctcattgctgcatgccttgagtttgaggaccgcctgtctgagtgcaaggacttgttagctagcttaacttgcgaaggacttgggcaactagaggttgaccgagtgtgcaattggcagataatatccatgaactttatcaagaggctgacagaagattatagggaatatgttgatttgatccagccaattcaagttgctgtatatgaaatgaaacttggcttagcaattgctctatctggttctcttcagagggagtatttgaagaagattaaagaagatgatattaatagagttcttggagcaatttatgcttttatgcagtttccctctggatcttttactgaaagggttgtaactgacgtgactgatgatcttacaaattatacaatcactggccaactaggaaccctaaacagttgttctggagatgtagatatgttgaagaagcttgctgctatgtcaagtcagttgaatgtttgtaaagttgctggcaaagtgaagtccctgtccgagatgcttgcttcagtgcatcatatttttttagtaagaacagctgattgtgtcagctgttcccttgtcatggataagtcatcttatgcgtcattgaaggatacctttgatcattttacaagcatgtggatcaacatgaaataccgtttgaaggctaaagaaagcgatgattctcagtacttcaagttcaaatcgcgaatgatcagtatagacgacatctttaaagatgtgccgttgctttctgatatggaatcagaagacagcattttagataatgaagaaaaactagagcatgaatttttcaaaattacggaaagtattgatgacgataatggtgttgttgaagacaactgggatttgataccagagtctgctcttaaatgtattgtgaccatacatgaccaattgtttggttcgcccgatctttttgagaagcgccgcaaatgtcaagttagtgatgcacagaaagtccagtctttcatagaatcatatgagctgggaacaagaatacttaaagacctcccggaattaacatgttctatgtttgatgaaaagctcatgcctgagcacctatttcgtgtttgtcttgaataccaacgatcctgtgcaaaaacacatcaagattgtagtggttataatgcttacaaggatccaaatcctcctgtcttgtttaaaatggttgagtcactaactacacttcaggagagagttaatagctatctggatgaatggcctgatcatcctggtctcttgaaaatactggacctaatcgcttcccttttagcgatgcccctaagcacgccaatttcgaaggtcttgcttggattgcaattgctggctgggaaagctcaaacattgcaggaaaatgactccaagttctttgtaaaagatcatcttgcatcgatatttttgcttgtgtattcatggcaaaggctcgagttagattgttggcctatactgcttgaggaggtccagacaaagtatgagttgaatgctgcaaagctgtggtttccattgcgagccttacttactcaaacttctggtattccagtggatgatgatttgtctattatcagaagtgttgaggaatttgttcaaacatcaagtcttggagaatacaagagacgattgcatatcctctttgccttccatggtgagatttctgctggtgctagcttgggtagttattcaagtaatgcggtgaagaaaatccagaatattctgtacagtgtgtttggttactatatgcagtttttgtcactcgttcatgggaaaattgaagaaggtaaaaaaaacattgagaaggagttgaaagatcacgtcaagctttacagctgggagcaagcaccatatagcagcgcttctattgaaaattttaaaaggactaggcaaaagatttttaagcttctgcaacggttcaatgatattttgaaaagtcctgtcatctttctactgaatgaagaagccacatcaaggaagattccatgctggcttgatcctcagaggcctgaatcacaccttcctgttgactctgaaaaatttaacaaaaggtttctgtggtaccacaagtgggcaagtgagacgtctttatcattacaaacattgcagcaatcaaatggtagtactgttggagttcctactgccaaagaatatgcagatatggtatatgatgtgaagcactggcagaatgaaattgagctcaatgacagattgcagttcttctggatctcacttgagagaatatgtggggcagctaattttggtagtacagtgaagcatgggaaaaagaatcagaagaaaacagctctatccaatctgttcaagactcttgaggaatgtggactatctaagcacaggccaatgagtcatgagtggggagatgagctggcagcaccaagtccattgttcttggagcagtcatatgattctgcacatttattacagcaaataaactctcagaaaatgctggaagatgttagcatcaatcattccacactattgaacacagataactggaagcatgcaaatcagcaatacttcaaatgtttagcaatgatgcaacaacttcgacaggtttctttgaagtttaacaaagatctaggtttggaagaggttaacaaggctatgtcatttatgagtcatctgttgactgtgttgtctgaacaacgacatcttgcttataatctatttgatcaacggaaccaattcaagcatgctattttcttattaggttctggaggaaagagtaaatctctatcatcaagccaaaatgtgctgctgagttccatgtggcagcaaaagaaattgtttgatgctgtaatcactttgataacagactccaacttattgctcagaagcttcaaggattgccattataactcttgtaacaactttatagaagttgaagggatctcatctctccttggaaagttcatcttgaatttttctgaatccaaggagttgttagatgaatgcttgcttggatccactaatatatttgctggtgcatataagagcatgcctcattctgcaacagagatggaacaactttttactgataattgccagcatatagattcattgttggatggatacttgcctggatccaataatatatttccagatgcatataagagtattcctcttgctacaacagagatggagcaactttttgctgataattgccagcttatagattcattgagagaagatatgaaggttctatgccacagggatctttcagtgggatctgttaagaaagttcttatctctcgtttggaagaattgttggagaagggcaagatggcaatggagaaccgaagacatgttgaagaaaatcataagctatgcttaaagcttgaagcttcgtatatagaaattttgaaggaaactttcatgttagttgttggtgctgtcagaaagctcactgatcatgaagtatgcagtaatggaactgaaaaatcgccagttggtaatgttgcatcatggaaagatactttgcagacatgcattatgaatcttaaattggatgatatttgtgttgctggtgaaaagattcgtattctagtgaggttgctggttgactataaacctgatatacgtactagtatagagctgcacctaatgcatcttcatgcttggctgagtgtgatcctatcatcagcagaagggatactttccgaacttttagaagcacacataacaacttctgaaatgactcttgcacttggggacctttttattcatttatttacggatgggtttggttccactgaagatacagccgaagatgcagatgaactacagcaagatgctgttggaagtggaactggaatgggtgagggggatggtcaaaagagtgtaagctctgatatagatgatgaatcacaacttggtgacagtaaggacttgacatgtaaggcagatcccgctcctaagaacgatgataaagctgttgaaatgcaagacggttttaatgcacaattatctgatgtttctgaggatcttgaaggcaaagactcgggtggcgaagatgaggataccttggataatcagatgggtgatactggtgatgcaagtgaagtggttggcaagaaatcatgggataaggatgaagatgatgatcctaagacatctattgagaaatatgagtcaggctcatcagccaagggaacacaacaggatgatagggaaatgagagctaaggatgatggttctattgaggaggaagatccgatggaaatggattctgaggaaggaaagaataataatcttgaacatgatcctagtacccatgatgaaaccgaactgaatactgatgaagtcatggacaaagctgatgcatatgatgaccggactggacctgaactccctgaaccagagaatgattccattgatgttgacatggtggaacaagaacaaacggatgaaataaatgctgacaatgaagatataggtacagaagaagctgaacaagcagatcagaggttagatgcttcagatgatatggaggaaggagatatggcacaacatagcgatggtgtggtagataatgaaggggagcatgttgaagatgcaaatacagacgcaggtgagatggattcacaccaattggacaaggcggattcacttatgcctctgtcacaaggcctacagcctgacaatatgcaaataaattctaatggagaatctgaagcgaacttggccaacagcagtgatatgcatggcgctgttgctccttcagtaaatttttcaggaaatgaagtgcccaatatggaaatatctatgcccaatactggtaacgattcaatactatcgtctaactccaagccagatatgcaaaatgatgctcagcagcacatcaagcagacaaatcctttcagaagcatcggagatgcattggaggactggaaagaacgggccagagtctcagctgatactcaggatcatcaaccagaaactggaaaagatagtagtgagaacactactgaatttcgttatgtgcctgagggtgaggagagcacctctcaggcattgggtgctgcaacagctgaccagatcaattatgacaatcagattaatcaatctttcttggaagatgaaagctgtatcaggaatttggaacatagtgatgagagaacacctgataaccctgaggtgccttaccttcaaacttcacaagcacttcccaacaagtctgaaaatgccaatgaattggatggaagagaaattcaaactgatgcatccgttcaaaatttagttgaaagaacagatcacactttccaagatctagtttctttcaaacaacccccggcagatgataaaatagctcttattgacctaactactgacagggaattgccttctcagatggatctcgacatcactgatgcagagacaaaaagatctaatgcggtctggaaaaatcttgagctcgcaaccatgaaattgtcccaagaactggcagagcaattgcgcctggttatggaaccaactcttgctagtaagcttcaaggggattatagaactggaaagagaataaacatgaagaaggttattccatatattgcgagtcatttccgcagggacaagatatggttgcgccgaactaagcctaataaacggaattaccaagtggttattgctgttgatgactctagaagtatgtctgagggcaaatgtggaaaatttgctatcgaggcattagttactgtgtgccgtgctatgtcacagcttgaggttggacaatttgcagttgcaagttttgggaagaaggggaacgttagtgtgctacacgattttgatcagatctttaatagtgaagctggagttaatgtgatctctagcttgtcgtttgagcaagataacaaaattgaggatgaaccggtgtctgatctcttgacacatctgaatgttatgcttgatactgccgttgcacgggcacgcaccccatcagggcaaaatcctctccagcaactgatactgataatatctgatggaaaattccatgaaaaggaaaacttgaggcgccatgttagagacgttctaaatcgaaagaggatggtcgcgtatgtgctcctggatagccccgaggattctattattaatctaaaggaagcatgcttcagagtaggggagaaggtagagctgaaaaaatacatggattcctttccgttcccgtattatgttatgctacagaacattgaagctcttcctcgcacattggccgacctgcttagacagtggtttgagctcatgcagagcgccaacgagtgacccttgggagttgggagtagtgccacgcatttagctgtacagcaaactacattctagcttccatttttgcttgggcctggacagttctgtggtggcaagcttgattgtgcacaaatgccttcacggttcaaatcgctttcctgaaatatgatctctggtcgcaggcttgattgtctaaaagcatcatcacaattcaaattgtttttgggaaatttgaatagaatttccgctttcctgaaatatggtctctgctcgcaggctttattgtgtaaaaacatcatcacaatttaaattgtttctggcaaatttgaatagaatttccgtgctcaagagttatagtttgttttttttttcaatggagaattgttgctcacgtgctacatgcgacctgagtgtgattgatccttcaatcttgccctgctgttcatcttgtgttgtttgtcatgtttggctttgttgatgtacatgtttcttccactgcatgtgctacgcgttgacgatgtacgcaactgtcgctgccaacgcgaccactttatatatgtgacagtgacacatgccaggggcagatctagaaatctacaaaatctcttcaagctctttctctcttgtaagggattgtttgtttgag

SEQ ID NO: 59791 - DNA, 15655 bp, Zea Mays
cgctactttgcctgaatgtttgttggattggccagatgttgtaacagtaggaaatcatagcatgggaagcccgttcgtgcttacagctactttaagaaagagttacgaggtagctttgatggcagttggccagaagtggcctgtacttctctatgggcctgttggtgcaggaaaatctgcacttattaacaagttggcacacatagttggaaatcgagtactttttatccacatggatgagcaaatggatggcaggaccttattaggaagttacgtttgcacagagaaacctggtgaattcaagtgggctcctggttcgcttacacaggctattgtcaaagggttttggattgtgtttgaagacatagacaaagcacctagcgatgtgcgttcaattttagtgcctttattggagggttcaaataccttttcagttggccatgcagaggccgtggaagttgctgagagttttcgcttctttgcaaccgtcactacatcaaagaacgatgtttcccatgatctgccagggagactcacatttagtgcattgtggagaaaagtgatggtgggagaacctaatcagagtgacatggttaatataattaaagggtgctacccaagcttggagcccatctcctccaaactcatagggggtttatctgatggtgttctgcacagattttcattaagggacctgctaaaatggtgcaagagaatattagggactgacctcaactttgaggacctcagatttgcatctagtggatgcaaattaatctatcatgaggctgttgacattttcactgcttcattatcatctccggagaaaaggttgtatgtagcaggagaaattgctagaatattatgtgttccttaccgaggagaaacagtgcaacctactgaaaagcccgtcatccaggctcgacatatggaattgcaagttggtagagttacattgccatgctgcgacaaacctacattaatccagaaagggccttttgctgatattcggcgtgcattagaaattcttgaaagggttgcatgttctataaaattcaatgagcccattcttcttgttggtgaaactggtactgggaagaccactactgtgcagaatcttgctgcctggcttaaacaaccgttgactgtggtgaacttaagccagcaaagtgacatttctgatctccttgggggatttaagcctacagatgctcgatcgatatgttttcctctttatatggagttcaaggatcttttttctcgaagtttttctgcaaaggacaatgaagctatgatacgttattgtgatgagtttgtaatgaacaagaattggaaaaaactactaaccactttggaaagatatgttgcgaaggctcagaagctaattgaagggtctaagtcttcaagtggttcaaagaggaaacgacctttgccagcccatgttgtttctgattgggacaccttctcttccagactgaatatggcttgtagtcaaattggttcagcaactggcatgtcatttcagtttgtggagggtgcttttatttcagctttaaggaaaggccattggattttgcttgatgaggttaaccttgcacctccagagacacttcaaagaattggtgctgtactggatggagagaggggcacactttgcctagcagagaggggagacgtggattatgttgaacgtcatccttgcttcaggatatttgcctgcatgaatccagcaactgatgctgggaaaagggaactgccgtacacttttaggaaccgctttactgaatactttgttgatgatcttatggatgacgatgatctacgtctttttgtcaggaaatatctggatggtctgaatgctgcaaatggagttatagatagtattgtgcgattttataaagtggcaaaaaaggagtgtgaggagagactgcaggatggagctaatcagaagcctcaatttagtttgagatctctatctcgtgctttaggatatataaaaaacgcagagaaaaaatttggcttcaggaaagccatttatgatggtttctgtatgttctttcttacattgttggatcctcctagtggaaaaatcatgaagaacttaatagtttcacttctgttagatggaagagtgccacctaacatttcttttgttgactacttcactgataagcctttgcaattaggtggctgtgaatcggatgattttttgcagagctatgttttaactcaaagtgttactgagcacataatcaaccttgcccgtgctgtttacattagaagataccctgttcttctacaagggccaacatcaagtggcaaaactagccttgtgaggtatcttgctgcaaaaactggacatgagtttgtccgaatcaacaaccatgagcatactgatctccaagaatatctgggtacttatgtgacagatagtcaagggaagcttcagtttcaggagggtgctttggtgaaggctgtgcgggaggggcactggattgttttggatgagctaaatcttgcaccgtctgatgtcctggaagctttaaataggctgttagatgacaacagggaacttttcattccagagctgcaagagactataccagcacaccctaattttatgctcttcgctacacaaaacccacctatgctttatggggggcgtaaaatgctgtcccgggcgttccgcaatcgttttgttgaagtgcatgttgatgaaataccagaagatgagctagccacaattttggagcagcgatgtagaattgctcccagttatgcgaaaaggatggttgaggttatgaaagaattgcaaacacatagacaaaatagtagagtgtttgctggcaaacatggtttcataacacctagggatctatttcgttgggccaatcggtacaggacatttgaagggaagtcatacgaagatctggcgaaagatggttatttactgctggcagagagattaagggatgtcaatgagaaagttgttgttaaagaagctttggagcgtcacctacgtgtaaaactcaatatagctgatttgtataactcggaagtcacccgtgaagataatttattcattgatgttatcaaactaagagtacaagattgcgttgggaatatcacttggacaaaaagtatgtggaggctatacttccttattgagcgttgctacagatcacgcgaacctgtcctccttgttggcgaaactggtggtgggaaaacaactgtttgccagattctaagtgctgtccttgggttgaagttacatattttgaactgccatcagtatacagagacatcagacttcattgggggattctgccctatacgtgatagatcaagaatagcaattgagttcaaagatcttgttgcaaaaatcaaacagatgaaaatgtttttttatgttgcagggaatgttccgcttgaaactgatgtatctggagctgatagtgtcatcagtcatctggatgaaatacttgacagatacagaaagaaaaaatatctgtttcctgaggtgtctgctcaagatcttggtgccatggagcaaatcaagttggatttgatgcatctccacaagaggtggcaagcaattttcctgtggcaggatggaccgcttgttcaagcaatgaagaatggtgatcttttcctcattgatgaaatttctttagctgatgacagtgtgcttgaacgcttgaacagtgttctagaacctgaaagaaaattgtcattggctgagaaaggtggttctgtgttagagaagattgtagcacatccaaacttcttcatccttgcaacgatgaaccctggtggtgactatggaaaaaaagagctttctcctgcattaagaaatcgatttactgaaatttgggttcctgctgttattgatgttgatgaacttaggagcataacttttgggaggttcaccaaaactgacttctcttgccttggagattgcattgttaacttctggaagtggttcaaccaattgcacatcgggagaacattgacgatacgggacctgctgtcatggatttcatttataaacgtgactgaacaaaatcttgggcccgagcaagctttgatacatggcctgtttcttattttgcttgatgggctctcattaggtctaaatgtttctaaaactgaggctactgagatgaggaatacttgcttgtccttccttctagaagaattgcagaaagttgggggcacggcagtagattcatacttgaatgatctaaataattatggctggggtgacaatatgaaaaaaaaagatatagatcatggttgtttggaagatcatttcggcattgcaccattctatattcctaaaggccattttccttgtaagcaacaggactttgaaataatggcgcccacgaccagtaagaatgtcttgcgagttttgcgtggtatgcaactacctaaacctctccttctggaaggtagtcctggagttggaaaaacaagtttaattgtagcattagctggattttctggtcatgatgttgtacggataaatctatctgaacagacagatatgatggatcttctaggttcagacctgccagctcaagggggaaatggaatggaattttcctggtctgatggtattcttctccaggctttaaagaatggaagctgggttcttttggatgagctcaatcttgctccacaatctgtcttagagggcctgaatgccattctggaccaccgtgctgaggtcttcatacctgagcttggtcaaacttacaaatgctcatcgtcttttcgggtctttgcatgccagaatccttcatcgcagggtggtggacggaaaggccttcccaagtcctttctgaaccgcttcaccaaagtttatgttgatgagctatcagaggaagattatctattcatctgtaaatcacgatatggttcattgatttctgaaagtttcatccgaaatcttattcactttaatagcagactgtatatggataccatggtatataggaagtatggccaacaaggttctccctgggaatttaatctacgtgatattatcagatcttgtgagatgatagcaggttccccaaatcctatgatggatgattcttttttaaatactgtttatctgcaaagaatgcgcacattggttgatcgccatgaagttgtcaagctttatgaggatgtctttaagaaaaatgcttggttgttggaagtgcctctattagaagaaataacatccaatcatataaagtgcaaaacaatcaactcaacatatttccaggtgtccttaatagtcttgaagcagccatgcactgtatccagcaaggttggttgtgcattcttattggacaaaattcagctggtaaaacatcattaatccgcttgctggctcagctttctggaaatacgttgaatgagttaaatctgtcgtctgcaactgatgtgtccgaattgttgggatgctttgagcagtataacttctttaggcactacaaaactgttttatcagaagttgagcattatgttgatgtgtatttcagcctgagtattgatacgaaccagaagaattttgttgcagaaagaaggggtttgtttaccaaatggtttgaatttgtggctgcaaaagggcactcctcaattaagacttcgaaattaatgagtgggaatgcatctttgccttcattaagcttgcttgctgaaatagttgagcagatgaaatgtgatctggaaatgtttgacttctctataccattgacaaaagatgatcttagtgaaacactgaagtccatcaacaacttgcagcaaaatggagctgcacaccaaccagttagattcaaatgggttgcgggagatttgattagagccattgagcgtggtgaatggattgttttagataatgcaaatttttgtaaccctactgtacttgataggataaactccttggttgagcaagaaaggtctattatggtcaatgagtgtggtcttgttgatggaaatcctgtagttatcaaagcccaccctaagtttcgaatgtttttgacagtaaattcaaactatggtgaagtttcaagagccatgcgaaacagaggagtggagatctttctgatggaccaaagttggaatctgaaaggatttagcaatgtacctggggacagtgaacggaaggatgtgataagatttttaatttcttgcggaatacccagaatggaactggtctcgtcaatgtgtgaagcacacatgtacgcaaaaggtgaaggttcacgtgttgctagtttgcattctggattatctttgtccttgccgggtggttggccaattgagcaaaaactaagggatctcatttggtattcaaaagaaacttgtgtcatgaggaattgcatgtttctacagtcattgggtgcccaatacgctgcttatcagataagcagtttgaatgataattcattattgttgggtcagattagtctcatccacccatctattcttcctgctgcaagcttacgcgaattacagtttcctacggttaatggtcagcctgtcaaaatttgtgtcactggggcattcaattcatacttagctgatcagatgcttttctttgctgcaaactgggtaatggagcaatgtactaaaaacgatcttgaactatatggcaaatggtttaattggtataactctctggtccagccttattgcaacttctttgagagctattggtatattctggagcaagaaagtgagcatcctatttggcataacatccttgaatattacagggaaatagttgcctatcacaatattgatattgttactcagcatattccattactctcgaagaagttgctggatatggctggttgtgatagcctgaaagcatgccaaaaccggctgcatcgttcttttaaggctttgggcttgttgcggcttactctgcagcaatggcaaattgagacaaaatgtcctgatctttctgtcctggaatgtactttgttgccagcattgaagtccctcagatgcttagagggcgaggtacttaaaacgattgcgaaatcttggaagcggctcaaaatatactctctccttcttgattaccacagatcaatatggaaaatgatgattgcatctcagttagaggggctaccaattgtttggaatcttttgaggaaagaaatactgaagttgcagcagaagttcccggttgaagttgacgtctttttgatggaatgtgtgaatctcaacaatataaatgataccaattttcaatatggtaaaccaactttgtgggattatggtggtcatcctcatctgccatcatctagcgagatatttgacaaaatgcaagaacttttgtccttcacaacagatgtgtggccaaggaagaatcttttgaatatagagcttgatgataggaaacagttgactgatgctatgctgtcagccaacaaggatcttagacaccttgcaatggaaggtgtctctatggcttgcattgctacaatgaaaactgaggaagatgttttagctgttgtcccccaattggatgaagttcacaagcggcttgtaggaaaggttaactctgtgagggataatcttggattattgtccaagacatcagtgcctgaatttaagttctgttgctcagtgtcctctgagattctatgtaacatttatggtttcaatggctggctagcaagtcttcctttgctcaacttgaagagcttaaacttggatacccttttacttcaacagctatgcaagtgcacacaaaaagattcttctgaaactcatgagattcttgttaattctgagtacctgctgaagtatgctatggattactcactgggttcatcttcaagatctcctctggactatattcaacatcagatcatttggtggatttgtcatgactgggccaaagttgacaatgcacatttaaaagttgctagttgtattcttgaaatgtggtacaactatcactcttccttgtggacttattgctcaggaagcccaaagtgtctattctcagtcacacatgatgattcctgtgacttggcacacctgacaaaaatggacgccatcaatactattatccagcaggatttacatgtggtggattatctgaagagtggtgtaatgcttaaagttgcatctagaaacctctgggaaggtgtttcgtgtttgggaaactttgtttctagtctgcactctgctgctgattccctctttaagcagattatatttgtccataagaagcatttcgaggaagagaactataaccagttagagtctctcctgttccaacaatcgagacgtttgatagagaaagaagatctggacactgtttgtgctctgttatcatcttcaagctgtagagtattggcttcgctctcagagtcagataaactcgtagaatccttgcttatggacttgtattcatcctactcccgtgactctttgttgcataccggagctgcttgggtccgtattggagagttacgcttccggttattgttgagctcatacagtccagatcctacatttaagtctagatacaagcattcacatattttggaaaaaattacacttgtgaagcttgaggaaaaggttcgtcatgattgtgaggaattagctggttctaactcccctgaagatagccatgacaacgagttattgcaattgctggaaattaaagagaaagacacccgtgcaaaggttgtatttcgtcctcgacaatctaagcataagagtctcattgctgcatgccttgagtttgaggaccgcctgtctgagtgcaaggacttgttagctagcttaacttgcgaaggacttgggcaactagaggttgaccgagtgtgcaattggcagataatatccatgaactttatcaagaggctgacagaagattatagggaatatgttgatttgatccagccaattcaagttgctgtatatgaaatgaaacttggcttagcaattgctctatctggttctcttcagagggagtatttgaagaagattaaagaagatgatattaatagagttcttggagcaatttatgcttttatgcagtttccctctggatcttttactgaaagggttgtaactgacgtgactgatgatcttacaaattatacaatcactggccaactaggaaccctaaacagttgttctggagatgtagatatgttgaagaagcttgctgctatgtcaagtcagttgaatgtttgtaaagttgctggcaaagtgaagtccctgtccgagatgcttgcttcagtgcatcatatttttttagtaagaacagctgattgtgtcagctgttcccttgtcatggataagtcatcttatgcgtcattgaaggatacctttgatcattttacaagcatgtggatcaacatgaaataccgtttgaaggctaaagaaagcgatgattctcagtacttcaagttcaaatcgcgaatgatcagtatagacgacatctttaaagatgtgccgttgctttctgatatggaatcagaagacagcattttagataatgaagaaaaactagagcatgaatttttcaaaattacggaaagtattgatgacgataatggtgttgttgaagacaactgggatttgataccagagtctgctcttaaatgtattgtgaccatacatgaccaattgtttggttcgcccgatctttttgagaagcgccgcaaatgtcaagttagtgatgcacagaaagtccagtctttcatagaatcatatgagctgggaacaagaatacttaaagacctcccggaattaacatgttctatgtttgatgaaaagctcatgcctgagcacctatttcgtgtttgtcttgaataccaacgatcctgtgcaaaaacacatcaagattgtagtggttataatgcttacaaggatccaaatcctcctgtcttgtttaaaatggttgagtcactaactacacttcaggagagagttaatagctatctggatgaatggcctgatcatcctggtctcttgaaaatactggacctaatcgcttcccttttagcgatgcccctaagcacgccaatttcgaaggtcttgcttggattgcaattgctggctgggaaagctcaaacattgcaggaaaatgactccaagttctttgtaaaagatcatcttgcatcgatatttttgcttgtgtattcatggcaaaggctcgagttagattgttggcctatactgcttgaggaggtccagacaaagtatgagttgaatgctgcaaagctgtggtttccattgcgagccttacttactcaaacttctggtattccagtggatgatgatttgtctattatcagaagtgttgaggaatttgttcaaacatcaagtcttggagaatacaagagacgattgcatatcctctttgccttccatggtgagatttctgctggtgctagcttgggtagttattcaagtaatgcggtgaagaaaatccagaatattctgtacagtgtgtttggttactatatgcagtttttgtcactcgttcatgggaaaattgaagaaggtaaaaaaaacattgagaaggagttgaaagatcacgtcaagctttacagctgggagcaagcaccatatagcagcgcttctattgaaaattttaaaaggactaggcaaaagatttttaagcttctgcaacggttcaatgatattttgaaaagtcctgtcatctttctactgaatgaagaagccacatcaaggaagattccatgctggcttgatcctcagaggcctgaatcacaccttcctgttgactctgaaaaatttaacaaaaggtttctgtggtaccacaagtgggcaagtgagacgtctttatcattacaaacattgcagcaatcaaatggtagtactgttggagttcctactgccaaagaatatgcagatatggtatatgatgtgaagcactggcagaatgaaattgagctcaatgacagattgcagttcttctggatctcacttgagagaatatgtggggcagctaattttggtagtacagtgaagcatgggaaaaagaatcagaagaaaacagctctatccaatctgttcaagactcttgaggaatgtggactatctaagcacaggccaatgagtcatgagtggggagatgagctggcagcaccaagtccattgttcttggagcagtcatatgattctgcacatttattacagcaaataaactctcagaaaatgctggaagatgttagcatcaatcattccacactattgaacacagataactggaagcatgcaaatcagcaatacttcaaatgtttagcaatgatgcaacaacttcgacaggtttctttgaagtttaacaaagatctaggtttggaagaggttaacaaggctatgtcatttatgagtcatctgttgactgtgttgtctgaacaacgacatcttgcttataatctatttgatcaacggaaccaattcaagcatgctattttcttattaggttctggaggaaagagtaaatctctatcatcaagccaaaatgtgctgctgagttccatgtggcagcaaaagaaattgtttgatgctgtaatcactttgataacagactccaacttattgctcagaagcttcaaggattgccattataactcttgtaacaactttatagaagttgaagggatctcatctctccttggaaagttcatcttgaatttttctgaatccaaggagttgttagatgaatgcttgcttggatccactaatatatttgctggtgcatataagagcatgcctcattctgcaacagagatggaacaactttttactgataattgccagcatatagattcattgttggatggatacttgcctggatccaataatatatttccagatgcatataagagtattcctcttgctacaacagagatggagcaactttttgctgataattgccagcttatagattcattgagagaagatatgaaggttctatgccacagggatctttcagtgggatctgttaagaaagttcttatctctcgtttggaagaattgttggagaagggcaagatggcaatggagaaccgaagacatgttgaagaaaatcataagctatgcttaaagcttgaagcttcgtatatagaaattttgaaggaaactttcatgttagttgttggtgctgtcagaaagctcactgatcatgaagtatgcagtaatggaactgaaaaatcgccagttggtaatgttgcatcatggaaagatactttgcagacatgcattatgaatcttaaattggatgatatttgtgttgctggtgaaaagattcgtattctagtgaggttgctggttgactataaacctgatatacgtactagtatagagctgcacctaatgcatcttcatgcttggctgagtgtgatcctatcatcagcagaagggatactttccgaacttttagaagcacacataacaacttctgaaatgactcttgcacttggggacctttttattcatttatttacggatgggtttggttccactgaagatacagccgaagatgcagatgaactacagcaagatgctgttggaagtggaactggaatgggtgagggggatggtcaaaagagtgtaagctctgatatagatgatgaatcacaacttggtgacagtaaggacttgacatgtaaggcagatcccgctcctaagaacgatgataaagctgttgaaatgcaagacggttttaatgcacaattatctgatgtttctgaggatcttgaaggcaaagactcgggtggcgaagatgaggataccttggataatcagatgggtgatactggtgatgcaagtgaagtggttggcaagaaatcatgggataaggatgaagatgatgatcctaagacatctattgagaaatatgagtcaggctcatcagccaagggaacacaacaggatgatagggaaatgagagctaaggatgatggttctattgaggaggaagatccgatggaaatggattctgaggaaggaaagaataataatcttgaacatgatcctagtacccatgatgaaaccgaactgaatactgatgaagtcatggacaaagctgatgcatatgatgaccggactggacctgaactccctgaaccagagaatgattccattgatgttgacatggtggaacaagaacaaacggatgaaataaatgctgacaatgaagatataggtacagaagaagctgaacaagcagatcagaggttagatgcttcagatgatatggaggaaggagatatggcacaacatagcgatggtgtggtagataatgaaggggagcatgttgaagatgcaaatacagacgcaggtgagatggattcacaccaattggacaaggcggattcacttatgcctctgtcacaaggcctacagcctgacaatatgcaaataaattctaatggagaatctgaagcgaacttggccaacagcagtgatatgcatggcgctgttgctccttcagtaaatttttcaggaaatgaagtgcccaatatggaaatatctatgcccaatactggtaacgattcaatactatcgtctaactccaagccagatatgcaaaatgatgctcagcagcacatcaagcagacaaatcctttcagaagcatcggagatgcattggaggactggaaagaacgggccagagtctcagctgatactcaggatcatcaaccagaaactggaaaagatagtagtgagaacactactgaatttcgttatgtgcctgagggtgaggagagcacctctcaggcattgggtgctgcaacagctgaccagatcaattatgacaatcagattaatcaatctttcttggaagatgaaagctgtatcaggaatttggaacatagtgatgagagaacacctgataaccctgaggtgccttaccttcaaacttcacaagcacttcccaacaagtctgaaaatgccaatgaattggatggaagagaaattcaaactgatgcatccgttcaaaatttagttgaaagaacagatcacactttccaagatctagtttctttcaaacaacccccggcagatgataaaatagctcttattgacctaactactgacagggaattgccttctcagatggatctcgacatcactgatgcagagacaaaaagatctaatgcggtctggaaaaatcttgagctcgcaaccatgaaattgtcccaagaactggcagagcaattgcgcctggttatggaaccaactcttgctagtaagcttcaaggggattatagaactggaaagagaataaacatgaagaaggttattccatatattgcgagtcatttccgcagggacaagatatggttgcgccgaactaagcctaataaacggaattaccaagtggttattgctgttgatgactctagaagtatgtctgagggcaaatgtggaaaatttgctatcgaggcattagttactgtgtgccgtgctatgtcacagcttgaggttggacaatttgcagttgcaagttttgggaagaaggggaacgttagtgtgctacacgattttgatcagatctttaatagtgaagctggagttaatgtgatctctagcttgtcgtttgagcaagataacaaaattgaggatgaaccggtgtctgatctcttgacacatctgaatgttatgcttgatactgccgttgcacgggcacgcaccccatcagggcaaaatcctctccagcaactgatactgataatatctgatggaaaattccatgaaaaggaaaacttgaggcgccatgttagagacgttctaaatcgaaagaggatggtcgcgtatgtgctcctggatagccccgaggattctattattaatctaaaggaagcatgcttcagagtaggggagaaggtagagctgaaaaaatacatggattcctttccgttcccgtattatgttatgctacagaacattgaagctcttcctcgcacattggccgacctgcttagacagtggtttgagctcatgcagagcgccaacgagtgacccttgggagttgggagtagtgccacgcatttagctgtacagcaaactacattctagcttccatttttgcttgggcctggacagttctgtggtggcaagcttgattgtgcacaaatgccttcacggttcaaatcgctttcctgaaatatgatctctggtcgcaggcttgattgtctaaaagcatcatcacaattcaaattgtttttgggaaatttgaatagaatttccgctttcctgaaatatggtctctgctcgcaggctttattgtgtaaaaacatcatcacaatttaaattgtttctggcaaatttgaatagaatttccgtgctcaagagttatagtttgttttttttttcaatggagaattgttgctcacgtgctacatgcgacctgagtgtgattgatccttcaatcttgccctgctgttcatcttgtgttgtttgtcatgtttggctttgttgatgtacatgtttcttccactgcatgtgctacgcgttgacgatgtacgcaactgtcgctgccaacgcgaccactttatatatgtgacagtgacacatgccaggggcagatctagaaatctacaaaatctcttcaagctctttctctcttgtaagggattgtttgtttgag

SEQ ID NO: 59792 - DNA, 15944 bp, Zea Mays
ctgaatgtttgttggattggccagatgttgtaacagtaggaaatcatagcatgggaagcccgttcgtgcttacagctactttaagaaagagttacgaggtagctttgatggcagttggccagaagtggcctgtacttctctatgggcctgttggtgcaggaaaatctgcacttattaacaagttggcacacatagttggaaatcgagtactttttatccacatggatgagcaaatggatggcaggaccttattaggaagttacgtttgcacagagaaacctggtgaattcaagtgggctcctggttcgcttacacaggctattgtcaaagggttttggattgtgtttgaagacatagacaaagcacctagcgatgtgcgttcaattttagtgcctttattggagggttcaaataccttttcagttggccatgcagaggccgtggaagttgctgagagttttcgcttctttgcaaccgtcactacatcaaagaacgatgtttcccatgatctgccagggagactcacatttagtgcattgtggagaaaagtgatggtgggagaacctaatcagagtgacatggttaatataattaaagggtgctacccaagcttggagcccatctcctccaaactcatagatacctttgaaaaggtcaactctcttggatcttatcagtttggtagtctcaacttggcagggggtttatctgatggtgttctgcacagattttcattaagggacctgctaaaatggtgcaagagaatattagggactgacctcaactttgaggacctcagatttgcatctagtggatgcaaattaatctatcatgaggctgttgacattttcactgcttcattatcatctccggagaaaaggttgtatgtagcaggagaaattgctagaatattatgtgttccttaccgaggagaaacagtgcaacctactgaaaagcccgtcatccaggctcgacatatggaattgcaagttggtagagttacattgccatgctgcgacaaacctacattaatccagaaagggccttttgctgatattcggcgtgcattagaaattcttgaaagggttgcatgttctataaaattcaatgagcccattcttcttgttggtgaaactggtactgggaagaccactactgtgcagaatcttgctgcctggcttaaacaaccgttgactgtggtgaacttaagccagcaaagtgacatttctgatctccttgggggatttaagcctacagatgctcgatcgatatgttttcctctttatatggagttcaaggatcttttttctcgaagtttttctgcaaaggacaatgaagctatgatacgttattgtgatgagtttgtaatgaacaagaattggaaaaaactactaaccactttggaaagatatgttgcgaaggctcagaagctaattgaagggtctaagtcttcaagtggttcaaagaggaaacgacctttgccagcccatgttgtttctgattgggacaccttctcttccagactgaatatggcttgtagtcaaattggttcagcaactggcatgtcatttcagtttgtggagggtgcttttatttcagctttaaggaaaggccattggattttgcttgatgaggttaaccttgcacctccagagacacttcaaagaattggtgctgtactggatggagagaggggcacactttgcctagcagagaggggagacgtggattatgttgaacgtcatccttgcttcaggatatttgcctgcatgaatccagcaactgatgctgggaaaagggaactgccgtacacttttaggaaccgctttactgaatactttgttgatgatcttatggatgacgatgatctacgtctttttgtcaggaaatatctggatggtctgaatgctgcaaatggagttatagatagtattgtgcgattttataaagtggcaaaaaaggagtgtgaggagagactgcaggatggagctaatcagaagcctcaatttagtttgagatctctatctcgtgctttaggatatataaaaaacgcagagaaaaaatttggcttcaggaaagccatttatgatggtttctgtatgttctttcttacattgttggatcctcctagtggaaaaatcatgaagaacttaatagtttcacttctgttagatggaagagtgccacctaacatttcttttgttgactacttcactgataagcctttgcaattaggtggctgtgaatcggatgattttttgcagagctatgttttaactcaaagtgttactgagcacataatcaaccttgcccgtgctgtttacattagaagataccctgttcttctacaagggccaacatcaagtggcaaaactagccttgtgaggtatcttgctgcaaaaactggacatgagtttgtccgaatcaacaaccatgagcatactgatctccaagaatatctgggtacttatgtgacagatagtcaagggaagcttcagtttcaggagggtgctttggtgaaggctgtgcgggaggggcactggattgttttggatgagctaaatcttgcaccgtctgatgtcctggaagctttaaataggctgttagatgacaacagggaacttttcattccagagctgcaagagactataccagcacaccctaattttatgctcttcgctacacaaaacccacctatgctttatggggggcgtaaaatgctgtcccgggcgttccgcaatcgttttgttgaagtgcatgttgatgaaataccagaagatgagctagccacaattttggagcagcgatgtagaattgctcccagttatgcgaaaaggatggttgaggttatgaaagaattgcaaacacatagacaaaatagtagagtgtttgctggcaaacatggtttcataacacctagggatctatttcgttgggccaatcggtacaggacatttgaagggaagtcatacgaagatctggcgaaagatggttatttactgctggcagagagattaagggatgtcaatgagaaagttgttgttaaagaagctttggagcgtcacctacgtgtaaaactcaatatagctgatttgtataactcggaagtcacccgtgaagataatttattcattgatgttatcaaactaagagtacaagattgcgttgggaatatcacttggacaaaaagtatgtggaggctatacttccttattgagcgttgctacagatcacgcgaacctgtcctccttgttggcgaaactggtggtgggaaaacaactgtttgccagattctaagtgctgtccttgggttgaagttacatattttgaactgccatcagtatacagagacatcagacttcattgggggattctgccctatacgtgatagatcaagaatagcaattgagttcaaagatcttgttgcaaaaatcaaacagatgaaaatgtttttttatgttgcagggaatgttccgcttgaaactgatgtatctggagctgatagtgtcatcagtcatctggatgaaatacttgacagatacagaaagaaaaaatatctgtttcctgaggtgtctgctcaagatcttggtgccatggagcaaatcaagttggatttgatgcatctccacaagaggtggcaagcaattttcctgtggcaggatggaccgcttgttcaagcaatgaagaatggtgatcttttcctcattgatgaaatttctttagctgatgacagtgtgcttgaacgcttgaacagtgttctagaacctgaaagaaaattgtcattggctgagaaaggtggttctgtgttagagaagattgtagcacatccaaacttcttcatccttgcaacgatgaaccctggtggtgactatggaaaaaaagagctttctcctgcattaagaaatcgatttactgaaatttgggttcctgctgttattgatgttgatgaacttaggagcataacttttgggaggttcaccaaaactgacttctcttgccttggagattgcattgttaacttctggaagtggttcaaccaattgcacatcgggagaacattgacgatacgggacctgctgtcatggatttcatttataaacgtgactgaacaaaatcttgggcccgagcaagctttgatacatggcctgtttcttattttgcttgatgggctctcattaggtctaaatgtttctaaaactgaggctactgagatgaggaatacttgcttgtccttccttctagaagaattgcagaaagttgggggcacggcagtagattcatacttgaatgatctaaataattatggctggggtgacaatatgaaaaaaaaagatatagatcatggttgtttggaagatcatttcggcattgcaccattctatattcctaaaggccattttccttgtaagcaacaggactttgaaataatggcgcccacgaccagtaagaatgtcttgcgagttttgcgtggtatgcaactacctaaacctctccttctggaaggtagtcctggagttggaaaaacaagtttaattgtagcattagctggattttctggtcatgatgttgtacggataaatctatctgaacagacagatatgatggatcttctaggttcagacctgccagctcaagggggaaatggaatggaattttcctggtctgatggtattcttctccaggctttaaagaatggaagctgggttcttttggatgagctcaatcttgctccacaatctgtcttagagggcctgaatgccattctggaccaccgtgctgaggtcttcatacctgagcttggtcaaacttacaaatgctcatcgtcttttcgggtctttgcatgccagaatccttcatcgcagggtggtggacggaaaggccttcccaagtcctttctgaaccgcttcaccaaagtttatgttgatgagctatcagaggaagattatctattcatctgtaaatcacgatatggttcattgatttctgaaagtttcatccgaaatcttattcactttaatagcagactgtatatggataccatggtatataggaagtatggccaacaaggttctccctgggaatttaatctacgtgatattatcagatcttgtgagatgatagcaggttccccaaatcctatgatggatgattcttttttaaatactgtttatctgcaaagaatgcgcacattggttgatcgccatgaagttgtcaagctttatgaggatgtctttaagaaaaatgcttggttgttggaagtgcctctattagaagaaataacatccaatcatataaagtgcaaaacaatcaactcaacatatttccaggtgtccttaatagtcttgaagcagccatgcactgtatccagcaaggttggttgtgcattcttattggacaaaattcagctggtaaaacatcattaatccgcttgctggctcagctttctggaaatacgttgaatgagttaaatctgtcgtctgcaactgatgtgtccgaattgttgggatgctttgagcagtataacttctttaggcactacaaaactgttttatcagaagttgagcattatgttgatgtgtatttcagcctgagtattgatacgaaccagaagaattttgttgcagaaagaaggggtttgtttaccaaatggtttgaatttgtggctgcaaaagggcactcctcaattaagacttcgaaattaatgagtgggaatgcatctttgccttcattaagcttgcttgctgaaatagttgagcagatgaaatgtgatctggaaatgtttgacttctctataccattgacaaaagatgatcttagtgaaacactgaagtccatcaacaacttgcagcaaaatggagctgcacaccaaccagttagattcaaatgggttgcgggagatttgattagagccattgagcgtggtgaatggattgttttagataatgcaaatttttgtaaccctactgtacttgataggataaactccttggttgagcaagaaaggtctattatggtcaatgagtgtggtcttgttgatggaaatcctgtagttatcaaagcccaccctaagtttcgaatgtttttgacagtaaattcaaactatggtgaagtttcaagagccatgcgaaacagaggagtggagatctttctgatggaccaaagttggaatctgaaaggatttagcaatgtacctggggacagtgaacggaaggatgtgataagatttttaatttcttgcggaatacccagaatggaactggtctcgtcaatgtgtgaagcacacatgtacgcaaaaggtgaaggttcacgtgttggtgtgaacattacccttcttgaaatcacgcgctgggttcagttgttccaacaactgattgttaaaggaaatcagttcctttggagcctgcatttgagctgggaacacacatatctaccatgtttgggtgaaattaatggatctggcattgtggaggaaggaaaaaataagtttttgactaattttgacagatctgaaattttggctagaaactttagttttttgactgtttttgatggttgttcaactagtttgcattctggattatctttgtccttgccgggtggttggccaattgagcaaaaactaagggatctcatttggtattcaaaagaaacttgtgtcatgaggaattgcatgtttctacagtcattgggtgcccaatacgctgcttatcagataagcagtttgaatgataattcattattgttgggtcagattagtctcatccacccatctattcttcctgctgcaagcttacgcgaattacagtttcctacggttaatggtcagcctgtcaaaatttgtgtcactggggcattcaattcatacttagctgatcagatgcttttctttgctgcaaactgggtaatggagcaatgtactaaaaacgatcttgaactatatggcaaatggtttaattggtataactctctggtccagccttattgcaacttctttgagagctattggtatattctggagcaagaaagtgagcatcctatttggcataacatccttgaatattacagggaaatagttgcctatcacaatattgatattgttactcagcatattccattactctcgaagaagttgctggatatggctggttgtgatagcctgaaagcatgccaaaaccggctgcatcgttcttttaaggctttgggcttgttgcggcttactctgcagcaatggcaaattgagacaaaatgtcctgatctttctgtcctggaatgtactttgttgccagcattgaagtccctcagatgcttagagggcgaggtacttaaaacgattgcgaaatcttggaagcggctcaaaatatactctctccttcttgattaccacagatcaatatggaaaatgatgattgcatctcagttagaggggctaccaattgtttggaatcttttgaggaaagaaatactgaagttgcagcagaagttcccggttgaagttgacgtctttttgatggaatgtgtgaatctcaacaatataaatgataccaattttcaatatggtaaaccaactttgtgggattatggtggtcatcctcatctgccatcatctagcgagatatttgacaaaatgcaagaacttttgtccttcacaacagatgtgtggccaaggaagaatcttttgaatatagagcttgatgataggaaacagttgactgatgctatgctgtcagccaacaaggatcttagacaccttgcaatggaaggtgtctctatggcttgcattgctacaatgaaaactgaggaagatgttttagctgttgtcccccaattggatgaagttcacaagcggcttgtaggaaaggttaactctgtgagggataatcttggattattgtccaagacatcagtgcctgaatttaagttctgttgctcagtgtcctctgagattctatgtaacatttatggtttcaatggctggctagcaagtcttcctttgctcaacttgaagagcttaaacttggatacccttttacttcaacagctatgcaagtgcacacaaaaagattcttctgaaactcatgagattcttgttaattctgagtacctgctgaagtatgctatggattactcactgggttcatcttcaagatctcctctggactatattcaacatcagatcatttggtggatttgtcatgactgggccaaagttgacaatgcacatttaaaagttgctagttgtattcttgaaatgtggtacaactatcactcttccttgtggacttattgctcaggaagcccaaagtgtctattctcagtcacacatgatgattcctgtgacttggcacacctgacaaaaatggacgccatcaatactattatccagcaggatttacatgtggtggattatctgaagagtggtgtaatgcttaaagttgcatctagaaacctctgggaaggtgtttcgtgtttgggaaactttgtttctagtctgcactctgctgctgattccctctttaagcagattatatttgtccataagaagcatttcgaggaagagaactataaccagttagagtctctcctgttccaacaatcgagacgtttgatagagaaagaagatctggacactgtttgtgctctgttatcatcttcaagctgtagagtattggcttcgctctcagagtcagataaactcgtagaatccttgcttatggacttgtattcatcctactcccgtgactctttgttgcataccggagctgcttgggtccgtattggagagttacgcttccggttattgttgagctcatacagtccagatcctacatttaagtctagatacaagcattcacatattttggaaaaaattacacttgtgaagcttgaggaaaaggttcgtcatgattgtgaggaattagctggttctaactcccctgaagatagccatgacaacgagttattgcaattgctggaaattaaagagaaagacacccgtgcaaaggttgtatttcgtcctcgacaatctaagcataagagtctcattgctgcatgccttgagtttgaggaccgcctgtctgagtgcaaggacttgttagctagcttaacttgcgaaggacttgggcaactagaggttgaccgagtgtgcaattggcagataatatccatgaactttatcaagaggctgacagaagattatagggaatatgttgatttgatccagccaattcaagttgctgtatatgaaatgaaacttggcttagcaattgctctatctggttctcttcagagggagtatttgaagaagattaaagaagatgatattaatagagttcttggagcaatttatgcttttatgcagtttccctctggatcttttactgaaagggttgtaactgacgtgactgatgatcttacaaattatacaatcactggccaactaggaaccctaaacagttgttctggagatgtagatatgttgaagaagcttgctgctatgtcaagtcagttgaatgtttgtaaagttgctggcaaagtgaagtccctgtccgagatgcttgcttcagtgcatcatatttttttagtaagaacagctgattgtgtcagctgttcccttgtcatggataagtcatcttatgcgtcattgaaggatacctttgatcattttacaagcatgtggatcaacatgaaataccgtttgaaggctaaagaaagcgatgattctcagtacttcaagttcaaatcgcgaatgatcagtatagacgacatctttaaagatgtgccgttgctttctgatatggaatcagaagacagcattttagataatgaagaaaaactagagcatgaatttttcaaaattacggaaagtattgatgacgataatggtgttgttgaagacaactgggatttgataccagagtctgctcttaaatgtattgtgaccatacatgaccaattgtttggttcgcccgatctttttgagaagcgccgcaaatgtcaagttagtgatgcacagaaagtccagtctttcatagaatcatatgagctgggaacaagaatacttaaagacctcccggaattaacatgttctatgtttgatgaaaagctcatgcctgagcacctatttcgtgtttgtcttgaataccaacgatcctgtgcaaaaacacatcaagattgtagtggttataatgcttacaaggatccaaatcctcctgtcttgtttaaaatggttgagtcactaactacacttcaggagagagttaatagctatctggatgaatggcctgatcatcctggtctcttgaaaatactggacctaatcgcttcccttttagcgatgcccctaagcacgccaatttcgaaggtcttgcttggattgcaattgctggctgggaaagctcaaacattgcaggaaaatgactccaagttctttgtaaaagatcatcttgcatcgatatttttgcttgtgtattcatggcaaaggctcgagttagattgttggcctatactgcttgaggaggtccagacaaagtatgagttgaatgctgcaaagctgtggtttccattgcgagccttacttactcaaacttctggtattccagtggatgatgatttgtctattatcagaagtgttgaggaatttgttcaaacatcaagtcttggagaatacaagagacgattgcatatcctctttgccttccatggtgagatttctgctggtgctagcttgggtagttattcaagtaatgcggtgaagaaaatccagaatattctgtacagtgtgtttggttactatatgcagtttttgtcactcgttcatgggaaaattgaagaaggtaaaaaaaacattgagaaggagttgaaagatcacgtcaagctttacagctgggagcaagcaccatatagcagcgcttctattgaaaattttaaaaggactaggcaaaagatttttaagcttctgcaacggttcaatgatattttgaaaagtcctgtcatctttctactgaatgaagaagccacatcaaggaagattccatgctggcttgatcctcagaggcctgaatcacaccttcctgttgactctgaaaaatttaacaaaaggtttctgtggtaccacaagtgggcaagtgagacgtctttatcattacaaacattgcagcaatcaaatggtagtactgttggagttcctactgccaaagatatggtatatgatgtgaagcactggcagaatgaaattgagctcaatgacagattgcagttcttctggatctcacttgagagaatatgtggggcagctaattttggtagtacagtgaagcatgggaaaaagaatcagaagaaaacagctctatccaatctgttcaagactcttgaggaatgtggactatctaagcacaggccaatgagtcatgagtggggagatgagctggcagcaccaagtccattgttcttggagcagtcatatgattctgcacatttattacagcaaataaactctcagaaaatgctggaagatgttagcatcaatcattccacactattgaacacagataactggaagcatgcaaatcagcaatacttcaaatgtttagcaatgatgcaacaacttcgacaggtttctttgaagtttaacaaagatctaggtttggaagaggttaacaaggctatgtcatttatgagtcatctgttgactgtgttgtctgaacaacgacatcttgcttataatctatttgatcaacggaaccaattcaagcatgctattttcttattaggttctggaggaaagagtaaatctctatcatcaagccaaaatgtgctgctgagttccatgtggcagcaaaagaaattgtttgatgctgtaatcactttgataacagactccaacttattgctcagaagcttcaaggattgccattataactcttgtaacaactttatagaagttgaagggatctcatctctccttggaaagttcatcttgaatttttctgaatccaaggagttgttagatgaatgcttgcttggatccactaatatatttgctggtgcatataagagcatgcctcattctgcaacagagatggaacaactttttactgataattgccagcatatagattcattgttggatggatacttgcctggatccaataatatatttccagatgcatataagagtattcctcttgctacaacagagatggagcaactttttgctgataattgccagcttatagattcattgagagaagatatgaaggttctatgccacagggatctttcagtgggatctgttaagaaagttcttatctctcgtttggaagaattgttggagaagggcaagatggcaatggagaaccgaagacatgttgaagaaaatcataagctatgcttaaagcttgaagcttcgtatatagaaattttgaaggaaactttcatgttagttgttggtgctgtcagaaagctcactgatcatgaagtatgcagtaatggaactgaaaaatcgccagttggtaatgttgcatcatggaaagatactttgcagacatgcattatgaatcttaaattggatgatatttgtgttgctggtgaaaagattcgtattctagtgaggttgctggttgactataaacctgatatacgtactagtatagagctgcacctaatgcatcttcatgcttggctgagtgtgatcctatcatcagcagaagggatactttccgaacttttagaagcacacataacaacttctgaaatgactcttgcacttggggacctttttattcatttatttacggatgggtttggttccactgaagatacagccgaagatgcagatgaactacagcaagatgctgttggaagtggaactggaatgggtgagggggatggtcaaaagagtgtaagctctgatatagatgatgaatcacaacttggtgacagtaagcaggacttgacatgtaaggcagatcccgctcctaagaacgatgataaagctgttgaaatgcaagacggttttaatgcacaattatctgatgtttctgaggatcttgaaggcaaagactcgggtggcgaagatgaggataccttggataatcagatgggtgatactggtgatgcaagtgaagtggttggcaagaaatcatgggataaggatgaagatgatgatcctaagacatctattgagaaatatgagtcaggctcatcagccaagggaacacaacaggatgatagggaaatgagagctaaggatgatggttctattgaggaggaagatccgatggaaatggattctgaggaaggaaagaataataatcttgaacatgatcctagtacccatgatgaaaccgaactgaatactgatgaagtcatggacaaagctgatgcatatgatgaccggactggacctgaactccctgaaccagagaatgattccattgatgttgacatggtggaacaagaacaaacggatgaaataaatgctgacaatgaagatataggtacagaagaagctgaacaagcagatcagaggttagatgcttcagatgatatggaggaaggagatatggcacaacatagcgatggtgtggtagataatgaaggggagcatgttgaagatgcaaatacagacgcaggtgagatggattcacaccaattggacaaggcggattcacttatgcctctgtcacaaggcctacagcctgacaatatgcaaataaattctaatggagaatctgaagcgaacttggccaacagcagtgatatgcatggcgctgttgctccttcagtaaatttttcaggaaatgaagtgcccaatatggaaatatctatgcccaatactggtaacgattcaatactatcgtctaactccaagccagatatgcaaaatgatgctcagcagcacatcaagcagacaaatcctttcagaagcatcggagatgcattggaggactggaaagaacgggccagagtctcagctgatactcaggatcatcaaccagaaactggaaaagatagtagtgagaacactactgaatttcgttatgtgcctgagggtgaggagagcacctctcaggcattgggtgctgcaacagctgaccagatcaattatgacaatcagattaatcaatctttcttggaagatgaaagctgtatcaggaatttggaacatagtgatgagagaacacctgataaccctgaggtgccttaccttcaaacttcacaagcacttcccaacaagtctgaaaatgccaatgaattggatggaagagaaattcaaactgatgcatccgttcaaaatttagttgaaagaacagatcacactttccaagatctagtttctttcaaacaacccccggcagatgataaaatagctcttattgacctaactactgacagggaattgccttctcagatggatctcgacatcactgatgcagagacaaaaagatctaatgcggtctggaaaaatcttgagctcgcaaccatgaaattgtcccaagaactggcagagcaattgcgcctggttatggaaccaactcttgctagtaagcttcaaggggattatagaactggaaagagaataaacatgaagaaggttattccatatattgcgagtcatttccgcagggacaagatatggttgcgccgaactaagcctaataaacggaattaccaagtggttattgctgttgatgactctagaagtatgtctgagggcaaatgtggaaaatttgctatcgaggcattagttactgtgtgccgtgctatgtcacagcttgaggttggacaatttgcagttgcaagttttgggaagaaggggaacgttagtgtgctacacgattttgatcagatctttaatagtgaagctggagttaatgtgatctctagcttgtcgtttgagcaagataacaaaattgaggatgaaccggtgtctgatctcttgacacatctgaatgttatgcttgatactgccgttgcacgggcacgcaccccatcagggcaaaatcctctccagcaactgatactgataatatctgatggaaaattccatgaaaaggaaaacttgaggcgccatgttagagacgttctaaatcgaaagaggatggtcgcgtatgtgctcctggatagccccgaggattctattattaatctaaaggaagcatgcttcagagtaggggagaaggtagagctgaaaaaatacatggattcctttccgttcccgtattatgttatgctacagaacattgaagctcttcctcgcacattggccgacctgcttagacagtggtttgagctcatgcagagcgccaacgagtgacccttgggagttgggagtagtgccacgcatttagctgtacagcaaactacattctagcttccatttttgcttgggcctggacagttctgtggtggcaagcttgattgtgcacaaatgccttcacggttcaaatcgctttcctgaaatatgatctctggtcgcaggcttgattgtctaaaagcatcatcacaattcaaattgtttttgggaaatttgaatagaatttccgctttcctgaaatatggtctctgctcgcaggctttattgtgtaaaaacatcatcacaatttaaattgtttctggcaaatttgaatagaatttccgtgctcaagagttatagtttgttttttttttcaatggagaattgttgctcacgtgctacatgcgacctgagtgtgattgatccttcaatcttgccctgctgttcatcttgtgttgtttgtcatgtttggctttgttgatgtacatgtttcttccactgcatgtgctacgcgttgacgatgtacgcaactgtcgctgccaacgcgaccactttatatatgtgacagtgacacatgccaggggcagatctagaaatctacaaaatctcttcaagctctttctctcttgtaagggattgtttgtttgag

SEQ ID NO: 59793 - DNA, 15579 bp, Zea Mays
ctgaatgtttgttggattggccagatgttgtaacagtaggaaatcatagcatgggaagcccgttcgtgcttacagctactttaagaaagagttacgaggtagctttgatggcagttggccagaagtggcctgtacttctctatgggcctgttggtgcaggaaaatctgcacttattaacaagttggcacacatagttggaaatcgagtactttttatccacatggatgagcaaatggatggcaggaccttattaggaagttacgtttgcacagagaaacctggtgaattcaagtgggctcctggttcgcttacacaggctattgtcaaagggttttggattgtgtttgaagacatagacaaagcacctagcgatgtgcgttcaattttagtgcctttattggagggttcaaataccttttcagttggccatgcagaggccgtggaagttgctgagagttttcgcttctttgcaaccgtcactacatcaaagaacgatgtttcccatgatctgccagggagactcacatttagtgcattgtggagaaaagtgatggtgggagaacctaatcagagtgacatggttaatataattaaagggtgctacccaagcttggagcccatctcctccaaactcatagatacctttgaaaaggtcaactctcttggatcttatcagtttggtagtctcaacttggcagggggtttatctgatggtgttctgcacagattttcattaagggacctgctaaaatggtgcaagagaatattagggactgacctcaactttgaggacctcagatttgcatctagtggatgcaaattaatctatcatgaggctgttgacattttcactgcttcattatcatctccggagaaaaggttgtatgtagcaggagaaattgctagaatattatgtgttccttaccgaggagaaacagtgcaacctactgaaaagcccgtcatccaggctcgacatatggaattgcaagttggtagagttacattgccatgctgcgacaaacctacattaatccagaaagggccttttgctgatattcggcgtgcattagaaattcttgaaagggttgcatgttctataaaattcaatgagcccattcttcttgttggtgaaactggtactgggaagaccactactgtgcagaatcttgctgcctggcttaaacaaccgttgactgtggtgaacttaagccagcaaagtgacatttctgatctccttgggggatttaagcctacagatgctcgatcgatatgttttcctctttatatggagttcaaggatcttttttctcgaagtttttctgcaaaggacaatgaagctatgatacgttattgtgatgagtttgtaatgaacaagaattggaaaaaactactaaccactttggaaagatatgttgcgaaggctcagaagctaattgaagggtctaagtcttcaagtggttcaaagaggaaacgacctttgccagcccatgttgtttctgattgggacaccttctcttccagactgaatatggcttgtagtcaaattggttcagcaactggcatgtcatttcagtttgtggagggtgcttttatttcagctttaaggaaaggccattggattttgcttgatgaggttaaccttgcacctccagagacacttcaaagaattggtgctgtactggatggagagaggggcacactttgcctagcagagaggggagacgtggattatgttgaacgtcatccttgcttcaggatatttgcctgcatgaatccagcaactgatgctgggaaaagggaactgccgtacacttttaggaaccgctttactgaatactttgttgatgatcttatggatgacgatgatctacgtctttttgtcaggaaatatctggatggtctgaatgctgcaaatggagttatagatagtattgtgcgattttataaagtggcaaaaaaggagtgtgaggagagactgcaggatggagctaatcagaagcctcaatttagtttgagatctctatctcgtgctttaggatatataaaaaacgcagagaaaaaatttggcttcaggaaagccatttatgatggtttctgtatgttctttcttacattgttggatcctcctagtggaaaaatcatgaagaacttaatagtttcacttctgttagatggaagagtgccacctaacatttcttttgttgactacttcactgataagcctttgcaattaggtggctgtgaatcggatgattttttgcagagctatgttttaactcaaagtgttactgagcacataatcaaccttgcccgtgctgtttacattagaagataccctgttcttctacaagggccaacatcaagtggcaaaactagccttgtgaggtatcttgctgcaaaaactggacatgagtttgtccgaatcaacaaccatgagcatactgatctccaagaatatctgggtacttatgtgacagatagtcaagggaagcttcagtttcaggagggtgctttggtgaaggctgtgcgggaggggcactggattgttttggatgagctaaatcttgcaccgtctgatgtcctggaagctttaaataggctgttagatgacaacagggaacttttcattccagagctgcaagagactataccagcacaccctaattttatgctcttcgctacacaaaacccacctatgctttatggggggcgtaaaatgctgtcccgggcgttccgcaatcgttttgttgaagtgcatgttgatgaaataccagaagatgagctagccacaattttggagcagcgatgtagaattgctcccagttatgcgaaaaggatggttgaggttatgaaagaattgcaaacacatagacaaaatagtagagtgtttgctggcaaacatggtttcataacacctagggatctatttcgttgggccaatcggtacaggacatttgaagggaagtcatacgaagatctggcgaaagatggttatttactgctggcagagagattaagggatgtcaatgagaaagttgttgttaaagaagctttggagcgtcacctacgtgtaaaactcaatatagctgatttgtataactcggaagtcacccgtgaagataatttattcattgatgttatcaaactaagagtacaagattgcgttgggaatatcacttggacaaaaagtatgtggaggctatacttccttattgagcgttgctacagatcacgcgaacctgtcctccttgttggcgaaactggtggtgggaaaacaactgtttgccagattctaagtgctgtccttgggttgaagttacatattttgaactgccatcagtatacagagacatcagacttcattgggggattctgccctatacgtgatagatcaagaatagcaattgagttcaaagatcttgttgcaaaaatcaaacagatgaaaatgtttttttatgttgcagggaatgttccgcttgaaactgatgtatctggagctgatagtgtcatcagtcatctggatgaaatacttgacagatacagaaagaaaaaatatctgtttcctgaggtgtctgctcaagatcttggtgccatggagcaaatcaagttggatttgatgcatctccacaagaggtggcaagcaattttcctgtggcaggatggaccgcttgttcaagcaatgaagaatggtgatcttttcctcattgatgaaatttctttagctgatgacagtgtgcttgaacgcttgaacagtgttctagaacctgaaagaaaattgtcattggctgagaaaggtggttctgtgttagagaagattgtagcacatccaaacttcttcatccttgcaacgatgaaccctggtggtgactatggaaaaaaagagctttctcctgcattaagaaatcgatttactgaaatttgggttcctgctgttattgatgttgatgaacttaggagcataacttttgggaggttcaccaaaactgacttctcttgccttggagattgcattgttaacttctggaagtggttcaaccaattgcacatcgggagaacattgacgatacgggacctgctgtcatggatttcatttataaacgtgactgaacaaaatcttgggcccgagcaagctttgatacatggcctgtttcttattttgcttgatgggctctcattaggtctaaatgtttctaaaactgaggctactgagatgaggaatacttgcttgtccttccttctagaagaattgcagaaagttgggggcacggcagtagattcatacttgaatgatctaaataattatggctggggtgacaatatgaaaaaaaaagatatagatcatggttgtttggaagatcatttcggcattgcaccattctatattcctaaaggccattttccttgtaagcaacaggactttgaaataatggcgcccacgaccagtaagaatgtcttgcgagttttgcgtggtatgcaactacctaaacctctccttctggaaggtagtcctggagttggaaaaacaagtttaattgtagcattagctggattttctggtcatgatgttgtacggataaatctatctgaacagacagatatgatggatcttctaggttcagacctgccagctcaagggggaaatggaatggaattttcctggtctgatggtattcttctccaggctttaaagaatggaagctgggttcttttggatgagctcaatcttgctccacaatctgtcttagagggcctgaatgccattctggaccaccgtgctgaggtcttcatacctgagcttggtcaaacttacaaatgctcatcgtcttttcgggtctttgcatgccagaatccttcatcgcagggtggtggacggaaaggccttcccaagtcctttctgaaccgcttcaccaaagtttatgttgatgagctatcagaggaagattatctattcatctgtaaatcacgatatggttcattgatttctgaaagtttcatccgaaatcttattcactttaatagcagactgtatatggataccatggtatataggaagtatggccaacaaggttctccctgggaatttaatctacgtgatattatcagatcttgtgagatgatagcaggttccccaaatcctatgatggatgattcttttttaaatactgtttatctgcaaagaatgcgcacattggttgatcgccatgaagttgtcaagctttatgaggatgtctttaagaaaaagatcagcattcaccaaccaaaaatgctccatgttaatccacattgcttggttgttggaagtgcctctattagaagaaataacatccaatcatataaagtgcaaaacaatcaactcaacatatttccaggtgtccttaatagtcttgaagcagccatgcactgtatccagcaaggttggttgtgcattcttattggacaaaattcagctggtaaaacatcattaatccgcttgctggctcagctttctggaaatacgttgaatgagttaaatctgtcgtctgcaactgatgtgtccgaattgttgggatgctttgagcagtataacttctttaggcactacaaaactgttttatcagaagttgagcattatgttgatgtgtatttcagcctgagtattgatacgaaccagaagaattttgttgcagaaagaaggggtttgtttaccaaatggtttgaatttgtggctgcaaaagggcactcctcaattaagacttcgaaattaatgagtgggaatgcatctttgccttcattaagcttgcttgctgaaatagttgagcagatgaaatgtgatctggaaatgtttgacttctctataccattgacaaaagatgatcttagtgaaacactgaagtccatcaacaacttgcagcaaaatggagctgcacaccaaccagttagattcaaatgggttgcgggagatttgattagagccattgagcgtggtgaatggattgttttagataatgcaaatttttgtaaccctactgtacttgataggataaactccttggttgagcaagaaaggtctattatggtcaatgagtgtggtcttgttgatggaaatcctgtagttatcaaagcccaccctaagtttcgaatgtttttgacagtaaattcaaactatggtgaagtttcaagagccatgcgaaacagaggagtggagatctttctgatggaccaaagttggaatctgaaaggatttagcaatgtacctggggacagtgaacggaaggatgtgataagatttttaatttcttgcggaatacccagaatggaactggtctcgtcaatgtgtgaagcacacatgtacgcaaaaggtgaaggttcacgtgttgctagtttgcattctggattatctttgtccttgccgggtggttggccaattgagcaaaaactaagggatctcatttggtattcaaaagaaacttgtgtcatgaggaattgcatgtttctacagtcattgggtgcccaatacgctgcttatcagataagcagtttgaatgataattcattattgttgggtcagattagtctcatccacccatctattcttcctgctgcaagcttacgcgaattacagtttcctacggttaatggtcagcctgtcaaaatttgtgtcactggggcattcaattcatacttagctgatcagatgcttttctttgctgcaaactgggtaatggagcaatgtactaaaaacgatcttgaactatatggcaaatggtttaattggtataactctctggtccagccttattgcaacttctttgagagctattggtatattctggagcaagaaagtgagcatcctatttggcataacatccttgaatattacagggaaatagttgcctatcacaatattgatattgttactcagcatattccattactctcgaagaagttgctggatatggctggttgtgatagcctgaaagcatgccaaaaccggctgcatcgttcttttaaggctttgggcttgttgcggcttactctgcagcaatggcaaattgagacaaaatgtcctgatctttctgtcctggaatgtactttgttgccagcattgaagtccctcagatgcttagagggcgaggtacttaaaacgattgcgaaatcttggaagcggctcaaaatatactctctccttcttgattaccacagatcaatatggaaaatgatgattgcatctcagttagaggggctaccaattgtttggaatcttttgaggaaagaaatactgaagttgcagcagaagttcccggttgaagttgacgtctttttgatggaatgtgtgaatctcaacaatataaatgataccaattttcaatatggtaaaccaactttgtgggattatggtggtcatcctcatctgccatcatctagcgagatatttgacaaaatgcaagaacttttgtccttcacaacagatgtgtggccaaggaagaatcttttgaatatagagcttgatgataggaaacagttgactgatgctatgctgtcagccaacaaggatcttagacaccttgcaatggaaggtgtctctatggcttgcattgctacaatgaaaactgaggaagatgttttagctgttgtcccccaattggatgaagttcacaagcggcttgtaggaaaggttaactctgtgagggataatcttggattattgtccaagacatcagtgcctgaaattcttgttaattctgagtacctgctgaagtatgctatggattactcactgggttcatcttcaagatctcctctggactatattcaacatcagatcatttggtggatttgtcatgactgggccaaagttgacaatgcacatttaaaagttgctagttgtattcttgaaatgtggtacaactatcactcttccttgtggacttattgctcaggaagcccaaagtgtctattctcagtcacacatgatgattcctgtgacttggcacacctgacaaaaatggacgccatcaatactattatccagcaggatttacatgtggtggattatctgaagagtggtgtaatgcttaaagttgcatctagaaacctctgggaaggtgtttcgtgtttgggaaactttgtttctagtctgcactctgctgctgattccctctttaagcagattatatttgtccataagaagcatttcgaggaagagaactataaccagttagagtctctcctgttccaacaatcgagacgtttgatagagaaagaagatctggacactgtttgtgctctgttatcatcttcaagctgtagagtattggcttcgctctcagagtcagataaactcgtagaatccttgcttatggacttgtattcatcctactcccgtgactctttgttgcataccggagctgcttgggtccgtattggagagttacgcttccggttattgttgagctcatacagtccagatcctacatttaagtctagatacaagcattcacatattttggaaaaaattacacttgtgaagcttgaggaaaaggttcgtcatgattgtgaggaattagctggttctaactcccctgaagatagccatgacaacgagttattgcaattgctggaaattaaagagaaagacacccgtgcaaaggttgtatttcgtcctcgacaatctaagcataagagtctcattgctgcatgccttgagtttgaggaccgcctgtctgagtgcaaggacttgttagctagcttaacttgcgaaggacttgggcaactagaggttgaccgagtgtgcaattggcagataatatccatgaactttatcaagaggctgacagaagattatagggaatatgttgatttgatccagccaattcaagttgctgtatatgaaatgaaacttggcttagcaattgctctatctggttctcttcagagggagtatttgaagaagattaaagaagatgatattaatagagttcttggagcaatttatgcttttatgcagtttccctctggatcttttactgaaagggttgtaactgacgtgactgatgatcttacaaattatacaatcactggccaactaggaaccctaaacagttgttctggagatgtagatatgttgaagaagcttgctgctatgtcaagtcagttgaatgtttgtaaagttgctggcaaagtgaagtccctgtccgagatgcttgcttcagtgcatcatatttttttagtaagaacagctgattgtgtcagctgttcccttgtcatggataagtcatcttatgcgtcattgaaggatacctttgatcattttacaagcatgtggatcaacatgaaataccgtttgaaggctaaagaaagcgatgattctcagtacttcaagttcaaatcgcgaatgatcagtatagacgacatctttaaagatgtgccgttgctttctgatatggaatcagaagacagcattttagataatgaagaaaaactagagcatgaatttttcaaaattacggaaagtattgatgacgataatggtgttgttgaagacaactgggatttgataccagagtctgctcttaaatgtattgtgaccatacatgaccaattgtttggttcgcccgatctttttgagaagcgccgcaaatgtcaagttagtgatgcacagaaagtccagtctttcatagaatcatatgagctgggaacaagaatacttaaagacctcccggaattaacatgttctatgtttgatgaaaagctcatgcctgagcacctatttcgtgtttgtcttgaataccaacgatcctgtgcaaaaacacatcaagattgtagtggttataatgcttacaaggatccaaatcctcctgtcttgtttaaaatggttgagtcactaactacacttcaggagagagttaatagctatctggatgaatggcctgatcatcctggtctcttgaaaatactggacctaatcgcttcccttttagcgatgcccctaagcacgccaatttcgaaggtcttgcttggattgcaattgctggctgggaaagctcaaacattgcaggaaaatgactccaagttctttgtaaaagatcatcttgcatcgatatttttgcttgtgtattcatggcaaaggctcgagttagattgttggcctatactgcttgaggaggtccagacaaagtatgagttgaatgctgcaaagctgtggtttccattgcgagccttacttactcaaacttctggtattccagtggatgatgatttgtctattatcagaagtgttgaggaatttgttcaaacatcaagtcttggagaatacaagagacgattgcatatcctctttgccttccatggtgagatttctgctggtgctagcttgggtagttattcaagtaatgcggtgaagaaaatccagaatattctgtacagtgtgtttggttactatatgcagtttttgtcactcgttcatgggaaaattgaagaaggtaaaaaaaacattgagaaggagttgaaagatcacgtcaagctttacagctgggagcaagcaccatatagcagcgcttctattgaaaattttaaaaggactaggcaaaagatttttaagcttctgcaacggttcaatgatattttgaaaagtcctgtcatctttctactgaatgaagaagccacatcaaggaagattccatgctggcttgatcctcagaggcctgaatcacaccttcctgttgactctgaaaaatttaacaaaaggtttctgtggtaccacaagtgggcaagtgagacgtctttatcattacaaacattgcagcaatcaaatggtagtactgttggagttcctactgccaaagaatatgcagatatggtatatgatgtgaagcactggcagaatgaaattgagctcaatgacagattgcagttcttctggatctcacttgagagaatatgtggggcagctaattttggtagtacagtgaagcatgggaaaaagaatcagaagaaaacagctctatccaatctgttcaagactcttgaggaatgtggactatctaagcacaggccaatgagtcatgagtggggagatgagctggcagcaccaagtccattgttcttggagcagtcatatgattctgcacatttattacagcaaataaactctcagaaaatgctggaagatgttagcatcaatcattccacactattgaacacagataactggaagcatgcaaatcagcaatacttcaaatgtttagcaatgatgcaacaacttcgacaggtttctttgaagtttaacaaagatctaggtttggaagaggttaacaaggctatgtcatttatgagtcatctgttgactgtgttgtctgaacaacgacatcttgcttataatctatttgatcaacggaaccaattcaagcatgctattttcttattaggttctggaggaaagagtaaatctctatcatcaagccaaaatgtgctgctgagttccatgtggcagcaaaagaaattgtttgatgctgtaatcactttgataacagactccaacttattgctcagaagcttcaaggattgccattataactcttgtaacaactttatagaagttgaagggatctcatctctccttggaaagttcatcttgaatttttctgaatccaaggagttgttagatgaatgcttgcttggatccactaatatatttgctggtgcatataagagcatgcctcattctgcaacagagatggaacaactttttactgataattgccagcatatagattcattgttggatggatacttgcctggatccaataatatatttccagatgcatataagagtattcctcttgctacaacagagatggagcaactttttgctgataattgccagcttatagattcattgagagaagatatgaaggttctatgccacagggatctttcagtgggatctgttaagaaagttcttatctctcgtttggaagaattgttggagaagggcaagatggcaatggagaaccgaagacatgttgaagaaaatcataagctatgcttaaagcttgaagcttcgtatatagaaattttgaaggaaactttcatgttagttgttggtgctgtcagaaagctcactgatcatgaagtatgcagtaatggaactgaaaaatcgccagttggtaatgttgcatcatggaaagatactttgcagacatgcattatgaatcttaaattggatgatatttgtgttgctggtgaaaagattcgtattctagtgaggttgctggttgactataaacctgatatacgtactagtatagagctgcacctaatgcatcttcatgcttggctgagtgtgatcctatcatcagcagaagggatactttccgaacttttagaagcacacataacaacttctgaaatgactcttgcacttggggacctttttattcatttatttacggatgggtttggttccactgaagatacagccgaagatgcagatgaactacagcaagatgctgttggaagtggaactggaatgggtgagggggatggtcaaaagagtgtaagctctgatatagatgatgaatcacaacttggtgacagtaaggacttgacatgtaaggcagatcccgctcctaagaacgatgataaagctgttgaaatgcaagacggttttaatgcacaattatctgatgtttctgaggatcttgaaggcaaagactcgggtggcgaagatgaggataccttggataatcagatgggtgatactggtgatgcaagtgaagtggttggcaagaaatcatgggataaggatgaagatgatgatcctaagacatctattgagaaatatgagtcaggctcatcagccaagggaacacaacaggatgatagggaaatgagagctaaggatgatggttctattgaggaggaagatccgatggaaatggattctgaggaaggaaagaataataatcttgaacatgatcctagtacccatgatgaaaccgaactgaatactgatgaagtcatggacaaagctgatgcatatgatgaccggactggacctgaactccctgaaccagagaatgattccattgatgttgacatggtggaacaagaacaaacggatgaaataaatgctgacaatgaagatataggtacagaagaagctgaacaagcagatcagaggttagatgcttcagatgatatggaggaaggagatatggcacaacatagcgatggtgtggtagataatgaaggggagcatgttgaagatgcaaatacagacgcaggtgagatggattcacaccaattggacaaggcggattcacttatgcctctgtcacaaggcctacagcctgacaatatgcaaataaattctaatggagaatctgaagcgaacttggccaacagcagtgatatgcatggcgctgttgctccttcagtaaatttttcaggaaatgaagtgcccaatatggaaatatctatgcccaatactggtaacgattcaatactatcgtctaactccaagccagatatgcaaaatgatgctcagcagcacatcaagcagacaaatcctttcagaagcatcggagatgcattggaggactggaaagaacgggccagagtctcagctgatactcaggatcatcaaccagaaactggaaaagatagtagtgagaacactactgaatttcgttatgtgcctgagggtgaggagagcacctctcaggcattgggtgctgcaacagctgaccagatcaattatgacaatcagattaatcaatctttcttggaagatgaaagctgtatcaggaatttggaacatagtgatgagagaacacctgataaccctgaggtgccttaccttcaaacttcacaagcacttcccaacaagtctgaaaatgccaatgaattggatggaagagaaattcaaactgatgcatccgttcaaaatttagttgaaagaacagatcacactttccaagatctagtttctttcaaacaacccccggcagatgataaaatagctcttattgacctaactactgacagggaattgccttctcagatggatctcgacatcactgatgcagagacaaaaagatctaatgcggtctggaaaaatcttgagctcgcaaccatgaaattgtcccaagaactggcagagcaattgcgcctggttatggaaccaactcttgctagtaagcttcaaggggattatagaactggaaagagaataaacatgaagaaggttattccatatattgcgagtcatttccgcagggacaagatatggttgcgccgaactaagcctaataaacggaattaccaagtggttattgctgttgatgactctagaagtatgtctgagggcaaatgtggaaaatttgctatcgaggcattagttactgtgtgccgtgctatgtcacagcttgaggttggacaatttgcagttgcaagttttgggaagaaggggaacgttagtgtgctacacgattttgatcagatctttaatagtgaagctggagttaatgtgatctctagcttgtcgtttgagcaagataacaaaattgaggatgaaccggtgtctgatctcttgacacatctgaatgttatgcttgatactgccgttgcacgggcacgcaccccatcagggcaaaatcctctccagcaactgatactgataatatctgatggaaaattccatgaaaaggaaaacttgaggcgccatgttagagacgttctaaatcgaaagaggatggtcgcgtatgtgctcctggatagccccgaggattctattattaatctaaaggaagcatgcttcagagtaggggagaaggtagagctgaaaaaatacatggattcctttccgttcccgtattatgttatgctacagaacattgaagctcttcctcgcacattggccgacctgcttagacagtggtttgagctcatgcagagcgccaacgagtgacccttgggagttgggagtagtgccacgcatttagctgtacagcaaactacattctagcttccatttttgcttgggcctggacagttctgtggtggcaagcttgattgtgcacaaatgccttcacggttcaaatcgctttcctgaaatatgatctctggtcgcaggcttgattgtctaaaagcatcatcacaattcaaattgtttttgggaaatttgaatagaatttccgctttcctgaaatatggtctctgctcgcaggctttattgtgtaaaaacatcatcacaatttaaattgtttctggcaaatttgaatagaatttccgtgctcaagagttatagtttgttttttttttcaatggagaattgttgctcacgtgctacatgcgacctgagtgtgattgatccttcaatcttgccctgctgttcatcttgtgttgtttgtcatgtttggctttgttgatgtacatgtttcttccactgcatgtgctacgcgttgacgatgtacgcaactgtcgctgccaacgcgaccactttatatatgtgacagtgacacatgccaggggcagatctagaaatctacaaaatctcttcaagctctttctctcttgtaagggattgtttgtttgag

SEQ ID NO: 59794 - DNA, 15758 bp, Zea Mays
ggaaatcatagcatgggaagcccgttcgtgcttacagctactttaagaaagagttacgaggtagctttgatggcagttggccagaagtggcctgtacttctctatgggcctgttggtgcaggaaaatctgcacttattaacaagttggcacacatagttggaaatcgagtactttttatccacatggatgagcaaatggatggcaggaccttattaggaagttacgtttgcacagagaaacctggtgaattcaagtgggctcctggttcgcttacacaggctattgtcaaagggttttggattgtgtttgaagacatagacaaagcacctagcgatgtgcgttcaattttagtgcctttattggagggttcaaataccttttcagttggccatgcagaggccgtggaagttgctgagagttttcgcttctttgcaaccgtcactacatcaaagaacgatgtttcccatgatctgccagggagactcacatttagtgcattgtggagaaaagtgatggtgggagaacctaatcagagtgacatggttaatataattaaagggtgctacccaagcttggagcccatctcctccaaactcatagatacctttgaaaaggtcaactctcttggatcttatcagtttggtagtctcaacttggcagggggtttatctgatggtgttctgcacagattttcattaagggacctgctaaaatggtgcaagagaatattagggactgacctcaactttgaggacctcagatttgcatctagtggatgcaaattaatctatcatgagacattaatccagaaagggccttttgctgatattcggcgtgcattagaaattcttgaaagggttgcatgttctataaaattcaatgagcccattcttcttgttggtgaaactggtactgggaagaccactactgtgcagaatcttgctgcctggcttaaacaaccgttgactgtggtgaacttaagccagcaaagtgacatttctgatctccttgggggatttaagcctacagatgctcgatcgatatgttttcctctttatatggagttcaaggatcttttttctcgaagtttttctgcaaaggacaatgaagctatgatacgttattgtgatgagtttgtaatgaacaagaattggaaaaaactactaaccactttggaaagatatgttgcgaaggctcagaagctaattgaagggtctaagtcttcaagtggttcaaagaggaaacgacctttgccagcccatgttgtttctgattgggacaccttctcttccagactgaatatggcttgtagtcaaattggttcagcaactggcatgtcatttcagtttgtggagggtgcttttatttcagctttaaggaaaggccattggattttgcttgatgaggttaaccttgcacctccagagacacttcaaagaattggtgctgtactggatggagagaggggcacactttgcctagcagagaggggagacgtggattatgttgaacgtcatccttgcttcaggatatttgcctgcatgaatccagcaactgatgctgggaaaagggaactgccgtacacttttaggaaccgctttactgaatactttgttgatgatcttatggatgacgatgatctacgtctttttgtcaggaaatatctggatggtctgaatgctgcaaatggagttatagatagtattgtgcgattttataaagtggcaaaaaaggagtgtgaggagagactgcaggatggagctaatcagaagcctcaatttagtttgagatctctatctcgtgctttaggatatataaaaaacgcagagaaaaaatttggcttcaggaaagccatttatgatggtttctgtatgttctttcttacattgttggatcctcctagtggaaaaatcatgaagaacttaatagtttcacttctgttagatggaagagtgccacctaacatttcttttgttgactacttcactgataagcctttgcaattaggtggctgtgaatcggatgattttttgcagagctatgttttaactcaaagtgttactgagcacataatcaaccttgcccgtgctgtttacattagaagataccctgttcttctacaagggccaacatcaagtggcaaaactagccttgtgaggtatcttgctgcaaaaactggacatgagtttgtccgaatcaacaaccatgagcatactgatctccaagaatatctgggtacttatgtgacagatagtcaagggaagcttcagtttcaggagggtgctttggtgaaggctgtgcgggaggggcactggattgttttggatgagctaaatcttgcaccgtctgatgtcctggaagctttaaataggctgttagatgacaacagggaacttttcattccagagctgcaagagactataccagcacaccctaattttatgctcttcgctacacaaaacccacctatgctttatggggggcgtaaaatgctgtcccgggcgttccgcaatcgttttgttgaagtgcatgttgatgaaataccagaagatgagctagccacaattttggagcagcgatgtagaattgctcccagttatgcgaaaaggatggttgaggttatgaaagaattgcaaacacatagacaaaatagtagagtgtttgctggcaaacatggtttcataacacctagggatctatttcgttgggccaatcggtacaggacatttgaagggaagtcatacgaagatctggcgaaagatggttatttactgctggcagagagattaagggatgtcaatgagaaagttgttgttaaagaagctttggagcgtcacctacgtgtaaaactcaatatagctgatttgtataactcggaagtcacccgtgaagataatttattcattgatgttatcaaactaagagtacaagattgcgttgggaatatcacttggacaaaaagtatgtggaggctatacttccttattgagcgttgctacagatcacgcgaacctgtcctccttgttggcgaaactggtggtgggaaaacaactgtttgccagattctaagtgctgtccttgggttgaagttacatattttgaactgccatcagtatacagagacatcagacttcattgggggattctgccctatacgtgatagatcaagaatagcaattgagttcaaagatcttgttgcaaaaatcaaacagatgaaaatgtttttttatgttgcagggaatgttccgcttgaaactgatgtatctggagctgatagtgtcatcagtcatctggatgaaatacttgacagatacagaaagaaaaaatatctgtttcctgaggtgtctgctcaagatcttggtgccatggagcaaatcaagttggatttgatgcatctccacaagaggtggcaagcaattttcctgtggcaggatggaccgcttgttcaagcaatgaagaatggtgatcttttcctcattgatgaaatttctttagctgatgacagtgtgcttgaacgcttgaacagtgttctagaacctgaaagaaaattgtcattggctgagaaaggtggttctgtgttagagaagattgtagcacatccaaacttcttcatccttgcaacgatgaaccctggtggtgactatggaaaaaaagagctttctcctgcattaagaaatcgatttactgaaatttgggttcctgctgttattgatgttgatgaacttaggagcataacttttgggaggttcaccaaaactgacttctcttgccttggagattgcattgttaacttctggaagtggttcaaccaattgcacatcgggagaacattgacgatacgggacctgctgtcatggatttcatttataaacgtgactgaacaaaatcttgggcccgagcaagctttgatacatggcctgtttcttattttgcttgatgggctctcattaggtctaaatgtttctaaaactgaggctactgagatgaggaatacttgcttgtccttccttctagaagaattgcagaaagttgggggcacggcagtagattcatacttgaatgatctaaataattatggctggggtgacaatatgaaaaaaaaagatatagatcatggttgtttggaagatcatttcggcattgcaccattctatattcctaaaggccattttccttgtaagcaacaggactttgaaataatggcgcccacgaccagtaagaatgtcttgcgagttttgcgtggtatgcaactacctaaacctctccttctggaaggtagtcctggagttggaaaaacaagtttaattgtagcattagctggattttctggtcatgatgttgtacggataaatctatctgaacagacagatatgatggatcttctaggttcagacctgccagctcaagggggaaatggaatggaattttcctggtctgatggtattcttctccaggctttaaagaatggaagctgggttcttttggatgagctcaatcttgctccacaatctgtcttagagggcctgaatgccattctggaccaccgtgctgaggtcttcatacctgagcttggtcaaacttacaaatgctcatcgtcttttcgggtctttgcatgccagaatccttcatcgcagggtggtggacggaaaggccttcccaagtcctttctgaaccgcttcaccaaagtttatgttgatgagctatcagaggaagattatctattcatctgtaaatcacgatatggttcattgatttctgaaagtttcatccgaaatcttattcactttaatagcagactgtatatggataccatggtatataggaagtatggccaacaaggttctccctgggaatttaatctacgtgatattatcagatcttgtgagatgatagcaggttccccaaatcctatgatggatgattcttttttaaatactgtttatctgcaaagaatgcgcacattggttgatcgccatgaagttgtcaagctttatgaggatgtctttaagaaaaagatcagcattcaccaaccaaaaatgctccatgttaatccacattgcttggttgttggaagtgcctctattagaagaaataacatccaatcatataaagtgcaaaacaatcaactcaacatatttccaggtgtccttaatagtcttgaagcagccatgcactgtatccagcaaggttggttgtgcattcttattggacaaaattcagctggtaaaacatcattaatccgcttgctggctcagctttctggaaatacgttgaatgagttaaatctgtcgtctgcaactgatgtgtccgaattgttgggatgctttgagcagtataacttctttaggcactacaaaactgttttatcagaagttgagcattatgttgatgtgtatttcagcctgagtattgatacgaaccagaagaattttgttgcagaaagaaggggtttgtttaccaaatggtttgaatttgtggctgcaaaagggcactcctcaattaagacttcgaaattaatgagtgggaatgcatctttgccttcattaagcttgcttgctgaaatagttgagcagatgaaatgtgatctggaaatgtttgacttctctataccattgacaaaagatgatcttagtgaaacactgaagtccatcaacaacttgcagcaaaatggagctgcacaccaaccagttagattcaaatgggttgcgggagatttgattagagccattgagcgtggtgaatggattgttttagataatgcaaatttttgtaaccctactgtacttgataggataaactccttggttgagcaagaaaggtctattatggtcaatgagtgtggtcttgttgatggaaatcctgtagttatcaaagcccaccctaagtttcgaatgtttttgacagtaaattcaaactatggtgaagtttcaagagccatgcgaaacagaggagtggagatctttctgatggaccaaagttggaatctgaaaggatttagcaatgtacctggggacagtgaacggaaggatgtgataagatttttaatttcttgcggaatacccagaatggaactggtctcgtcaatgtgtgaagcacacatgtacgcaaaaggtgaaggttcacgtgttggtgtgaacattacccttcttgaaatcacgcgctgggttcagttgttccaacaactgattgttaaaggaaatcagttcctttggagcctgcatttgagctgggaacacacatatctaccatgtttgggtgaaattaatggatctggcattgtggaggaaggaaaaaataagtttttgactaattttgacagatctgaaattttggctagaaactttagttttttgactgtttttgatggttgttcaactagtttgcattctggattatctttgtccttgccgggtggttggccaattgagcaaaaactaagggatctcatttggtattcaaaagaaacttgtgtcatgaggaattgcatgtttctacagtcattgggtgcccaatacgctgcttatcagataagcagtttgaatgataattcattattgttgggtcagattagtctcatccacccatctattcttcctgctgcaagcttacgcgaattacagtttcctacggttaatggtcagcctgtcaaaatttgtgtcactggggcattcaattcatacttagctgatcagatgcttttctttgctgcaaactgggtaatggagcaatgtactaaaaacgatcttgaactatatggcaaatggtttaattggtataactctctggtccagccttattgcaacttctttgagagctattggtatattctggagcaagaaagtgagcatcctatttggcataacatccttgaatattacagggaaatagttgcctatcacaatattgatattgttactcagcatattccattactctcgaagaagttgctggatatggctggttgtgatagcctgaaagcatgccaaaaccggctgcatcgttcttttaaggctttgggcttgttgcggcttactctgcagcaatggcaaattgagacaaaatgtcctgatctttctgtcctggaatgtactttgttgccagcattgaagtccctcagatgcttagagggcgaggtacttaaaacgattgcgaaatcttggaagcggctcaaaatatactctctccttcttgattaccacagatcaatatggaaaatgatgattgcatctcagttagaggggctaccaattgtttggaatcttttgaggaaagaaatactgaagttgcagcagaagttcccggttgaagttgacgtctttttgatggaatgtgtgaatctcaacaatataaatgataccaattttcaatatggtaaaccaactttgtgggattatggtggtcatcctcatctgccatcatctagcgagatatttgacaaaatgcaagaacttttgtccttcacaacagatgtgtggccaaggaagaatcttttgaatatagagcttgatgataggaaacagttgactgatgctatgctgtcagccaacaaggatcttagacaccttgcaatggaaggtgtctctatggcttgcattgctacaatgaaaactgaggaagatgttttagctgttgtcccccaattggatgaagttcacaagcggcttgtaggaaaggttaactctgtgagggataatcttggattattgtccaagacatcagtgcctgaatttaagttctgttgctcagtgtcctctgagattctatgtaacatttatggtttcaatggctggctagcaagtcttcctttgctcaacttgaagagcttaaacttggatacccttttacttcaacagctatgcaagtgcacacaaaaagattcttctgaaactcatgagattcttgttaattctgagtacctgctgaagtatgctatggattactcactgggttcatcttcaagatctcctctggactatattcaacatcagatcatttggtggatttgtcatgactgggccaaagttgacaatgcacatttaaaagttgctagttgtattcttgaaatgtggtacaactatcactcttccttgtggacttattgctcaggaagcccaaagtgtctattctcagtcacacatgatgattcctgtgacttggcacacctgacaaaaatggacgccatcaatactattatccagcaggatttacatgtggtggattatctgaagagtggtgtaatgcttaaagttgcatctagaaacctctgggaaggtgtttcgtgtttgggaaactttgtttctagtctgcactctgctgctgattccctctttaagcagattatatttgtccataagaagcatttcgaggaagagaactataaccagttagagtctctcctgttccaacaatcgagacgtttgatagagaaagaagatctggacactgtttgtgctctgttatcatcttcaagctgtagagtattggcttcgctctcagagtcagataaactcgtagaatccttgcttatggacttgtattcatcctactcccgtgactctttgttgcataccggagctgcttgggtccgtattggagagttacgcttccggttattgttgagctcatacagtccagatcctacatttaagtctagatacaagcattcacatattttggaaaaaattacacttgtgaagcttgaggaaaaggttcgtcatgattgtgaggaattagctggttctaactcccctgaagatagccatgacaacgagttattgcaattgctggaaattaaagagaaagacacccgtgcaaaggttgtatttcgtcctcgacaatctaagcataagagtctcattgctgcatgccttgagtttgaggaccgcctgtctgagtgcaaggacttgttagctagcttaacttgcgaaggacttgggcaactagaggttgaccgagtgtgcaattggcagctgtattgattagctttgcaatcatcctgtggcagataatatccatgaactttatcaagaggctgacagaagattatagggaatatgttgatttgatccagccaattcaagttgctgtatatgaaatgaaacttggcttagcaattgctctatctggttctcttcagagggagtatttgaagaagattaaagaagatgatattaatagagttcttggagcaatttatgcttttatgcagtttccctctggatcttttactgaaagggttgtaactgacgtgactgatgatcttacaaattatacaatcactggccaactaggaaccctaaacagttgttctggagatgtagatatgttgaagaagcttgctgctatgtcaagtcagttgaatgtttgtaaagttgctggcaaagtgaagtccctgtccgagatgcttgcttcagtgcatcatatttttttagtaagaacagctgattgtgtcagctgttcccttgtcatggataagtcatcttatgcgtcattgaaggatacctttgatcattttacaagcatgtggatcaacatgaaataccgtttgaaggctaaagaaagcgatgattctcagtacttcaagttcaaatcgcgaatgatcagtatagacgacatctttaaagatgtgccgttgctttctgatatggaatcagaagacagcattttagataatgaagaaaaactagagcatgaatttttcaaaattacggaaagtattgatgacgataatggtgttgttgaagacaactgggatttgataccagagtctgctcttaaatgtattgtgaccatacatgaccaattgtttggttcgcccgatctttttgagaagcgccgcaaatgtcaagttagtgatgcacagaaagtccagtctttcatagaatcatatgagctgggaacaagaatacttaaagacctcccggaattaacatgttctatgtttgatgaaaagctcatgcctgagcacctatttcgtgtttgtcttgaataccaacgatcctgtgcaaaaacacatcaagattgtagtggttataatgcttacaaggatccaaatcctcctgtcttgtttaaaatggttgagtcactaactacacttcaggagagagttaatagctatctggatgaatggcctgatcatcctggtctcttgaaaatactggacctaatcgcttcccttttagcgatgcccctaagcacgccaatttcgaaggtcttgcttggattgcaattgctggctgggaaagctcaaacattgcaggaaaatgactccaagttctttgtaaaagatcatcttgcatcgatatttttgcttgtgtattcatggcaaaggctcgagttagattgttggcctatactgcttgaggaggtccagacaaagtatgagttgaatgctgcaaagctgtggtttccattgcgagccttacttactcaaacttctggtattccagtggatgatgatttgtctattatcagaagtgttgaggaatttgttcaaacatcaagtcttggagaatacaagagacgattgcatatcctctttgccttccatggtgagatttctgctggtgctagcttgggtagttattcaagtaatgcggtgaagaaaatccagaatattctgtacagtgtgtttggttactatatgcagtttttgtcactcgttcatgggaaaattgaagaaggtaaaaaaaacattgagaaggagttgaaagatcacgtcaagctttacagctgggagcaagcaccatatagcagcgcttctattgaaaattttaaaaggactaggcaaaagatttttaagcttctgcaacggttcaatgatattttgaaaagtcctgtcatctttctactgaatgaagaagccacatcaaggaagattccatgctggcttgatcctcagaggcctgaatcacaccttcctgttgactctgaaaaatttaacaaaaggtttctgtggtaccacaagtgggcaagtgagacgtctttatcattacaaacattgcagcaatcaaatggtagtactgttggagttcctactgccaaagatatggtatatgatgtgaagcactggcagaatgaaattgagctcaatgacagattgcagttcttctggatctcacttgagagaatatgtggggcagctaattttggtagtacagtgaagcatgggaaaaagaatcagaagaaaacagctctatccaatctgttcaagactcttgaggaatgtggactatctaagcacaggccaatgagtcatgagtggggagatgagctggcagcaccaagtccattgttcttggagcagtcatatgattctgcacatttattacagcaaataaactctcagaaaatgctggaagatgttagcatcaatcattccacactattgaacacagataactggaagcatgcaaatcagcaatacttcaaatgtttagcaatgatgcaacaacttcgacaggtttctttgaagtttaacaaagatctaggtttggaagaggttaacaaggctatgtcatttatgagtcatctgttgactgtgttgtctgaacaacgacatcttgcttataatctatttgatcaacggaaccaattcaagcatgctattttcttattaggttctggaggaaagagtaaatctctatcatcaagccaaaatgtgctgctgagttccatgtggcagcaaaagactccaacttattgctcagaagcttcaaggattgccattataactcttgtaacaactttatagaagttgaagggatctcatctctccttggaaagttcatcttgaatttttctgaatccaaggagttgttagatgaatgcttgcttggatccactaatatatttgctggtgcatataagagcatgcctcattctgcaacagagatggaacaactttttactgataattgccagcatatagattcattgttggatggatacttgcctggatccaataatatatttccagatgcatataagagtattcctcttgctacaacagagatggagcaactttttgctgataattgccagcttatagattcattgagagaagatatgaaggttctatgccacagggatctttcagtgggatctgttaagaaagttcttatctctcgtttggaagaattgttggagaagggcaagatggcaatggagaaccgaagacatgttgaagaaaatcataagctatgcttaaagcttgaagcttcgtatatagaaattttgaaggaaactttcatgttagttgttggtgctgtcagaaagctcactgatcatgaagtatgcagtaatggaactgaaaaatcgccagttggtaatgttgcatcatggaaagatactttgcagacatgcattatgaatcttaaattggatgatatttgtgttgctggtgaaaagattcgtattctagtgaggttgctggttgactataaacctgatatacgtactagtatagagctgcacctaatgcatcttcatgcttggctgagtgtgatcctatcatcagcagaagggatactttccgaacttttagaagcacacataacaacttctgaaatgactcttgcacttggggacctttttattcatttatttacggatgggtttggttccactgaagatacagccgaagatgcagatgaactacagcaagatgctgttggaagtggaactggaatgggtgagggggatggtcaaaagagtgtaagctctgatatagatgatgaatcacaacttggtgacagtaaggacttgacatgtaaggcagatcccgctcctaagaacgatgataaagctgttgaaatgcaagacggttttaatgcacaattatctgatgtttctgaggatcttgaaggcaaagactcgggtggcgaagatgaggataccttggataatcagatgggtgatactggtgatgcaagtgaagtggttggcaagaaatcatgggataaggatgaagatgatgatcctaagacatctattgagaaatatgagtcaggctcatcagccaagggaacacaacaggatgatagggaaatgagagctaaggatgatggttctattgaggaggaagatccgatggaaatggattctgaggaaggaaagaataataatcttgaacatgatcctagtacccatgatgaaaccgaactgaatactgatgaagtcatggacaaagctgatgcatatgatgaccggactggacctgaactccctgaaccagagaatgattccattgatgttgacatggtggaacaagaacaaacggatgaaataaatgctgacaatgaagatataggtacagaagaagctgaacaagcagatcagaggttagatgcttcagatgatatggaggaaggagatatggcacaacatagcgatggtgtggtagataatgaaggggagcatgttgaagatgcaaatacagacgcaggtgagatggattcacaccaattggacaaggcggattcacttatgcctctgtcacaaggcctacagcctgacaatatgcaaataaattctaatggagaatctgaagcgaacttggccaacagcagtgatatgcatggcgctgttgctccttcagtaaatttttcaggaaatgaagtgcccaatatggaaatatctatgcccaatactggtaacgattcaatactatcgtctaactccaagccagatatgcaaaatgatgctcagcagcacatcaagcagacaaatcctttcagaagcatcggagatgcattggaggactggaaagaacgggccagagtctcagctgatactcaggatcatcaaccagaaactggaaaagatagtagtgagaacactactgaatttcgttatgtgcctgagggtgaggagagcacctctcaggcattgggtgctgcaacagctgaccagatcaattatgacaatcagattaatcaatctttcttggaagatgaaagctgtatcaggaatttggaacatagtgatgagagaacacctgataaccctgaggtgccttaccttcaaacttcacaagcacttcccaacaagtctgaaaatgccaatgaattggatggaagagaaattcaaactgatgcatccgttcaaaatttagttgaaagaacagatcacactttccaagatctagtttctttcaaacaacccccggcagatgataaaatagctcttattgacctaactactgacagggaattgccttctcagatggatctcgacatcactgatgcagagacaaaaagatctaatgcggtctggaaaaatcttgagctcgcaaccatgaaattgtcccaagaactggcagagcaattgcgcctggttatggaaccaactcttgctagtaagcttcaaggggattatagaactggaaagagaataaacatgaagaaggttattccatatattgcgagtcatttccgcagggacaagatatggttgcgccgaactaagcctaataaacggaattaccaagtggttattgctgttgatgactctagaagtatgtctgagggcaaatgtggaaaatttgctatcgaggcattagttactgtgtgccgtgctatgtcacagcttgaggttggacaatttgcagttgcaagttttgggaagaaggggaacgttagtgtgctacacgattttgatcagatctttaatagtgaagctggagttaatgtgatctctagcttgtcgtttgagcaagataacaaaattgaggatgaaccggtgtctgatctcttgacacatctgaatgttatgcttgatactgccgttgcacgggcacgcaccccatcagggcaaaatcctctccagcaactgatactgataatatctgatggaaaattccatgaaaaggaaaacttgaggcgccatgttagagacgttctaaatcgaaagaggatggtcgcgtatgtgctcctggatagccccgaggattctattattaatctaaaggaagcatgcttcagagtaggggagaaggtagagctgaaaaaatacatggattcctttccgttcccgtattatgttatgctacagaacattgaagctcttcctcgcacattggccgacctgcttagacagtggtttgagctcatgcagagcgccaacgagtgacccttgggagttgggagtagtgccacgcatttagctgtacagcaaactacattctagcttccatttttgcttgggcctggacagttctgtggtggcaagcttgattgtgcacaaatgccttcacggttcaaatcgctttcctgaaatatgatctctggtcgcaggcttgattgtctaaaagcatcatcacaattcaaattgtttttgggaaatttgaatagaatttccgctttcctgaaatatggtctctgctcgcaggctttattgtgtaaaaacatcatcacaatttaaattgtttctggcaaatttgaatagaatttccgtgctcaagagttatagtttgttttttttttcaatggagaattgttgctcacgtgctacatgcgacctgagtgtgattgatccttcaatcttgccctgctgttcatcttgtgttgtttgtcatgtttggctttgttgatgtacatgtttcttccactgcatgtgctacgcgttgacgatgtacgcaactgtcgctgccaacgcgaccactttatatatgtgacagtgacacatgccaggggcagatctagaaatctacaaaatctcttcaagctctttctctcttgtaagggattgtttgtttgag

SEQ ID NO: 59795 - DNA, 14838 bp, Zea Mays
tggaattgcaagttggtagagttacattgccatgctgcgacaaacctacattaatccagaaagggccttttgctgatattcggcgtgcattagaaattcttgaaagggttgcatgttctataaaattcaatgagcccattcttcttgttggtgaaactggtactgggaagaccactactgtgcagaatcttgctgcctggcttaaacaaccgttgactgtggtgaacttaagccagcaaagtgacatttctgatctccttgggggatttaagcctacagatgctcgatcgatatgttttcctctttatatggagttcaaggatcttttttctcgaagtttttctgcaaaggacaatgaagctatgatacgttattgtgatgagtttgtaatgaacaagaattggaaaaaactactaaccactttggaaagatatgttgcgaaggctcagaagctaattgaagggtctaagtcttcaagtggttcaaagaggaaacgacctttgccagcccatgttgtttctgattgggacaccttctcttccagactgaatatggcttgtagtcaaattggttcagcaactggcatgtcatttcagtttgtggagggtgcttttatttcagctttaaggaaaggccattggattttgcttgatgaggttaaccttgcacctccagagacacttcaaagaattggtgctgtactggatggagagaggggcacactttgcctagcagagaggggagacgtggattatgttgaacgtcatccttgcttcaggatatttgcctgcatgaatccagcaactgatgctgggaaaagggaactgccgtacacttttaggaaccgctttactgaatactttgttgatgatcttatggatgacgatgatctacgtctttttgtcaggaaatatctggatggtctgaatgctgcaaatggagttatagatagtattgtgcgattttataaagtggcaaaaaaggagtgtgaggagagactgcaggatggagctaatcagaagcctcaatttagtttgagatctctatctcgtgctttaggatatataaaaaacgcagagaaaaaatttggcttcaggaaagccatttatgatggtttctgtatgttctttcttacattgttggatcctcctagtggaaaaatcatgaagaacttaatagtttcacttctgttagatggaagagtgccacctaacatttcttttgttgactacttcactgataagcctttgcaattaggtggctgtgaatcggatgattttttgcagagctatgttttaactcaaagtgttactgagcacataatcaaccttgcccgtgctgtttacattagaagataccctgttcttctacaagggccaacatcaagtggcaaaactagccttgtgaggtatcttgctgcaaaaactggacatgagtttgtccgaatcaacaaccatgagcatactgatctccaagaatatctgggtacttatgtgacagatagtcaagggaagcttcagtttcaggagggtgctttggtgaaggctgtgcgggaggggcactggattgttttggatgagctaaatcttgcaccgtctgatgtcctggaagctttaaataggctgttagatgacaacagggaacttttcattccagagctgcaagagactataccagcacaccctaattttatgctcttcgctacacaaaacccacctatgctttatggggggcgtaaaatgctgtcccgggcgttccgcaatcgttttgttgaagtgcatgttgatgaaataccagaagatgagctagccacaattttggagcagcgatgtagaattgctcccagttatgcgaaaaggatggttgaggttatgaaagaattgcaaacacatagacaaaatagtagagtgtttgctggcaaacatggtttcataacacctagggatctatttcgttgggccaatcggtacaggacatttgaagggaagtcatacgaagatctggcgaaagatggttatttactgctggcagagagattaagggatgtcaatgagaaagttgttgttaaagaagctttggagcgtcacctacgtgtaaaactcaatatagctgatttgtataactcggaagtcacccgtgaagataatttattcattgatgttatcaaactaagagtacaagattgcgttgggaatatcacttggacaaaaagtatgtggaggctatacttccttattgagcgttgctacagatcacgcgaacctgtcctccttgttggcgaaactggtggtgggaaaacaactgtttgccagattctaagtgctgtccttgggttgaagttacatattttgaactgccatcagtatacagagacatcagacttcattgggggattctgccctatacgtgatagatcaagaatagcaattgagttcaaagatcttgttgcaaaaatcaaacagatgaaaatgtttttttatgttgcagggaatgttccgcttgaaactgatgtatctggagctgatagtgtcatcagtcatctggatgaaatacttgacagatacagaaagaaaaaatatctgtttcctgaggtgtctgctcaagatcttggtgccatggagcaaatcaagttggatttgatgcatctccacaagaggtggcaagcaattttcctgtggcaggatggaccgcttgttcaagcaatgaagaatggtgatcttttcctcattgatgaaatttctttagctgatgacagtgtgcttgaacgcttgaacagtgttctagaacctgaaagaaaattgtcattggctgagaaaggtggttctgtgttagagaagattgtagcacatccaaacttcttcatccttgcaacgatgaaccctggtggtgactatggaaaaaaagagctttctcctgcattaagaaatcgatttactgaaatttgggttcctgctgttattgatgttgatgaacttaggagcataacttttgggaggttcaccaaaactgacttctcttgccttggagattgcattgttaacttctggaagtggttcaaccaattgcacatcgggagaacattgacgatacgggacctgctgtcatggatttcatttataaacgtgactgaacaaaatcttgggcccgagcaagctttgatacatggcctgtttcttattttgcttgatgggctctcattaggtctaaatgtttctaaaactgaggctactgagatgaggaatacttgcttgtccttccttctagaagaattgcagaaagttgggggcacggcagtagattcatacttgaatgatctaaataattatggctggggtgacaatatgaaaaaaaaagatatagatcatggttgtttggaagatcatttcggcattgcaccattctatattcctaaaggccattttccttgtaagcaacaggactttgaaataatggcgcccacgaccagtaagaatgtcttgcgagttttgcgtggtatgcaactacctaaacctctccttctggaaggtagtcctggagttggaaaaacaagtttaattgtagcattagctggattttctggtcatgatgttgtacggataaatctatctgaacagacagatatgatggatcttctaggttcagacctgccagctcaagggggaaatggaatggaattttcctggtctgatggtattcttctccaggctttaaagaatggaagctgggttcttttggatgagctcaatcttgctccacaatctgtcttagagggcctgaatgccattctggaccaccgtgctgaggtcttcatacctgagcttggtcaaacttacaaatgctcatcgtcttttcgggtctttgcatgccagaatccttcatcgcagggtggtggacggaaaggccttcccaagtcctttctgaaccgcttcaccaaagtttatgttgatgagctatcagaggaagattatctattcatctgtaaatcacgatatggttcattgatttctgaaagtttcatccgaaatcttattcactttaatagcagactgtatatggataccatggtatataggaagtatggccaacaaggttctccctgggaatttaatctacgtgatattatcagatcttgtgagatgatagcaggttccccaaatcctatgatggatgattcttttttaaatactgtttatctgcaaagaatgcgcacattggttgatcgccatgaagttgtcaagctttatgaggatgtctttaagaaaaagatcagcattcaccaaccaaaaatgctccatgttaatccacattgcttggttgttggaagtgcctctattagaagaaataacatccaatcatataaagtgcaaaacaatcaactcaacatatttccaggtgtccttaatagtcttgaagcagccatgcactgtatccagcaaggttggttgtgcattcttattggacaaaattcagctggtaaaacatcattaatccgcttgctggctcagctttctggaaatacgttgaatgagttaaatctgtcgtctgcaactgatgtgtccgaattgttgggatgctttgagcagtataacttctttaggcactacaaaactgttttatcagaagttgagcattatgttgatgtgtatttcagcctgagtattgatacgaaccagaagaattttgttgcagaaagaaggggtttgtttaccaaatggtttgaatttgtggctgcaaaagggcactcctcaattaagacttcgaaattaatgagtgggaatgcatctttgccttcattaagcttgcttgctgaaatagttgagcagatgaaatgtgatctggaaatgtttgacttctctataccattgacaaaagatgatcttagtgaaacactgaagtccatcaacaacttgcagcaaaatggagctgcacaccaaccagttagattcaaatgggttgcgggagatttgattagagccattgagcgtggtgaatggattgttttagataatgcaaatttttgtaaccctactgtacttgataggataaactccttggttgagcaagaaaggtctattatggtcaatgagtgtggtcttgttgatggaaatcctgtagttatcaaagcccaccctaagtttcgaatgtttttgacagtaaattcaaactatggtgaagtttcaagagccatgcgaaacagaggagtggagatctttctgatggaccaaagttggaatctgaaaggatttagcaatgtacctggggacagtgaacggaaggatgtgataagatttttaatttcttgcggaatacccagaatggaactggtctcgtcaatgtgtgaagcacacatgtacgcaaaaggtgaaggttcacgtgttggtgtgaacattacccttcttgaaatcacgcgctgggttcagttgttccaacaactgattgttaaaggaaatcagttcctttggagcctgcatttgagctgggaacacacatatctaccatgtttgggtgaaattaatggatctggcattgtggaggaaggaaaaaataagtttttgactaattttgacagatctgaaattttggctagaaactttagttttttgactgtttttgatggttgttcaactagtttgcattctggattatctttgtccttgccgggtggttggccaattgagcaaaaactaagggatctcatttggtattcaaaagaaacttgtgtcatgaggaattgcatgtttctacagtcattgggtgcccaatacgctgcttatcagataagcagtttgaatgataattcattattgttgggtcagattagtctcatccacccatctattcttcctgctgcaagcttacgcgaattacagtttcctacggttaatggtcagcctgtcaaaatttgtgtcactggggcattcaattcatacttagctgatcagatgcttttctttgctgcaaactgggtaatggagcaatgtactaaaaacgatcttgaactatatggcaaatggtttaattggtataactctctggtccagccttattgcaacttctttgagagctattggtatattctggagcaagaaagtgagcatcctatttggcataacatccttgaatattacagggaaatagttgcctatcacaatattgatattgttactcagcatattccattactctcgaagaagttgctggatatggctggttgtgatagcctgaaagcatgccaaaaccggctgcatcgttcttttaaggctttgggcttgttgcggcttactctgcagcaatggcaaattgagacaaaatgtcctgatctttctgtcctggaatgtactttgttgccagcattgaagtccctcagatgcttagagggcgaggtacttaaaacgattgcgaaatcttggaagcggctcaaaatatactctctccttcttgattaccacagatcaatatggaaaatgatgattgcatctcagttagaggggctaccaattgtttggaatcttttgaggaaagaaatactgaagttgcagcagaagttcccggttgaagttgacgtctttttgatggaatgtgtgaatctcaacaatataaatgataccaattttcaatatggtaaaccaactttgtgggattatggtggtcatcctcatctgccatcatctagcgagatatttgacaaaatgcaagaacttttgtccttcacaacagatgtgtggccaaggaagaatcttttgaatatagagcttgatgataggaaacagttgactgatgctatgctgtcagccaacaaggatcttagacaccttgcaatggaaggtgtctctatggcttgcattgctacaatgaaaactgaggaagatgttttagctgttgtcccccaattggatgaagttcacaagcggcttgtaggaaaggttaactctgtgagggataatcttggattattgtccaagacatcagtgcctgaaattcttgttaattctgagtacctgctgaagtatgctatggattactcactgggttcatcttcaagatctcctctggactatattcaacatcagatcatttggtggatttgtcatgactgggccaaagttgacaatgcacatttaaaagttgctagttgtattcttgaaatgtggtacaactatcactcttccttgtggacttattgctcaggaagcccaaagtgtctattctcagtcacacatgatgattcctgtgacttggcacacctgacaaaaatggacgccatcaatactattatccagcaggatttacatgtggtggattatctgaagagtggtgtaatgcttaaagttgcatctagaaacctctgggaaggtgtttcgtgtttgggaaactttgtttctagtctgcactctgctgctgattccctctttaagcagattatatttgtccataagaagcatttcgaggaagagaactataaccagttagagtctctcctgttccaacaatcgagacgtttgatagagaaagaagatctggacactgtttgtgctctgttatcatcttcaagctgtagagtattggcttcgctctcagagtcagataaactcgtagaatccttgcttatggacttgtattcatcctactcccgtgactctttgttgcataccggagctgcttgggtccgtattggagagttacgcttccggttattgttgagctcatacagtccagatcctacatttaagtctagatacaagcattcacatattttggaaaaaattacacttgtgaagcttgaggaaaaggttcgtcatgattgtgaggaattagctggttctaactcccctgaagatagccatgacaacgagttattgcaattgctggaaattaaagagaaagacacccgtgcaaaggttgtatttcgtcctcgacaatctaagcataagagtctcattgctgcatgccttgagtttgaggaccgcctgtctgagtgcaaggacttgttagctagcttaacttgcgaaggacttgggcaactagaggttgaccgagtgtgcaattggcagataatatccatgaactttatcaagaggctgacagaagattatagggaatatgttgatttgatccagccaattcaagttgctgtatatgaaatgaaacttggcttagcaattgctctatctggttctcttcagagggagtatttgaagaagattaaagaagatgatattaatagagttcttggagcaatttatgcttttatgcagtttccctctggatcttttactgaaagggttgtaactgacgtgactgatgatcttacaaattatacaatcactggccaactaggaaccctaaacagttgttctggagatgtagatatgttgaagaagcttgctgctatgtcaagtcagttgaatgtttgtaaagttgctggcaaagtgaagtccctgtccgagatgcttgcttcagtgcatcatatttttttagtaagaacagctgattgtgtcagctgttcccttgtcatggataagtcatcttatgcgtcattgaaggatacctttgatcattttacaagcatgtggatcaacatgaaataccgtttgaaggctaaagaaagcgatgattctcagtacttcaagttcaaatcgcgaatgatcagtatagacgacatctttaaagatgtgccgttgctttctgatatggaatcagaagacagcattttagataatgaagaaaaactagagcatgaatttttcaaaattacggaaagtattgatgacgataatggtgttgttgaagacaactgggatttgataccagagtctgctcttaaatgtattgtgaccatacatgaccaattgtttggttcgcccgatctttttgagaagcgccgcaaatgtcaagttagtgatgcacagaaagtccagtctttcatagaatcatatgagctgggaacaagaatacttaaagacctcccggaattaacatgttctatgtttgatgaaaagctcatgcctgagcacctatttcgtgtttgtcttgaataccaacgatcctgtgcaaaaacacatcaagattgtagtggttataatgcttacaaggatccaaatcctcctgtcttgtttaaaatggttgagtcactaactacacttcaggagagagttaatagctatctggatgaatggcctgatcatcctggtctcttgaaaatactggacctaatcgcttcccttttagcgatgcccctaagcacgccaatttcgaaggtcttgcttggattgcaattgctggctgggaaagctcaaacattgcaggaaaatgactccaagttctttgtaaaagatcatcttgcatcgatatttttgcttgtgtattcatggcaaaggctcgagttagattgttggcctatactgcttgaggaggtccagacaaagtatgagttgaatgctgcaaagctgtggtttccattgcgagccttacttactcaaacttctggtattccagtggatgatgatttgtctattatcagaagtgttgaggaatttgttcaaacatcaagtcttggagaatacaagagacgattgcatatcctctttgccttccatggtgagatttctgctggtgctagcttgggtagttattcaagtaatgcggtgaagaaaatccagaatattctgtacagtgtgtttggttactatatgcagtttttgtcactcgttcatgggaaaattgaagaaggtaaaaaaaacattgagaaggagttgaaagatcacgtcaagctttacagctgggagcaagcaccatatagcagcgcttctattgaaaattttaaaaggactaggcaaaagatttttaagcttctgcaacggttcaatgatattttgaaaagtcctgtcatctttctactgaatgaagaagccacatcaaggaagattccatgctggcttgatcctcagaggcctgaatcacaccttcctgttgactctgaaaaatttaacaaaaggtttctgtggtaccacaagtgggcaagtgagacgtctttatcattacaaacattgcagcaatcaaatggtagtactgttggagttcctactgccaaagatatggtatatgatgtgaagcactggcagaatgaaattgagctcaatgacagattgcagttcttctggatctcacttgagagaatatgtggggcagctaattttggtagtacagtgaagcatgggaaaaagaatcagaagaaaacagctctatccaatctgttcaagactcttgaggaatgtggactatctaagcacaggccaatgagtcatgagtggggagatgagctggcagcaccaagtccattgttcttggagcagtcatatgattctgcacatttattacagcaaataaactctcagaaaatgctggaagatgttagcatcaatcattccacactattgaacacagataactggaagcatgcaaatcagcaatacttcaaatgtttagcaatgatgcaacaacttcgacaggtttctttgaagtttaacaaagatctaggtttggaagaggttaacaaggctatgtcatttatgagtcatctgttgactgtgttgtctgaacaacgacatcttgcttataatctatttgatcaacggaaccaattcaagcatgctattttcttattaggttctggaggaaagagtaaatctctatcatcaagccaaaatgtgctgctgagttccatgtggcagcaaaagaaattgtttgatgctgtaatcactttgataacagactccaacttattgctcagaagcttcaaggattgccattataactcttgtaacaactttatagaagttgaagggatctcatctctccttggaaagttcatcttgaatttttctgaatccaaggagttgttagatgaatgcttgcttggatccactaatatatttgctggtgcatataagagcatgcctcattctgcaacagagatggaacaactttttactgataattgccagcatatagattcattgttggatggatacttgcctggatccaataatatatttccagatgcatataagagtattcctcttgctacaacagagatggagcaactttttgctgataattgccagcttatagattcattgagagaagatatgaaggttctatgccacagggatctttcagtgggatctgttaagaaagttcttatctctcgtttggaagaattgttggagaagggcaagatggcaatggagaaccgaagacatgttgaagaaaatcataagctatgcttaaagcttgaagcttcgtatatagaaattttgaaggaaactttcatgttagttgttggtgctgtcagaaagctcactgatcatgaagtatgcagtaatggaactgaaaaatcgccagttggtaatgttgcatcatggaaagatactttgcagacatgcattatgaatcttaaattggatgatatttgtgttgctggtgaaaagattcgtattctagtgaggttgctggttgactataaacctgatatacgtactagtatagagctgcacctaatgcatcttcatgcttggctgagtgtgatcctatcatcagcagaagggatactttccgaacttttagaagcacacataacaacttctgaaatgactcttgcacttggggacctttttattcatttatttacggatgggtttggttccactgaagatacagccgaagatgcagatgaactacagcaagatgctgttggaagtggaactggaatgggtgagggggatggtcaaaagagtgtaagctctgatatagatgatgaatcacaacttggtgacagtaaggacttgacatgtaaggcagatcccgctcctaagaacgatgataaagctgttgaaatgcaagacggttttaatgcacaattatctgatgtttctgaggatcttgaaggcaaagactcgggtggcgaagatgaggataccttggataatcagatgggtgatactggtgatgcaagtgaagtggttggcaagaaatcatgggataaggatgaagatgatgatcctaagacatctattgagaaatatgagtcaggctcatcagccaagggaacacaacaggatgatagggaaatgagagctaaggatgatggttctattgaggaggaagatccgatggaaatggattctgaggaaggaaagaataataatcttgaacatgatcctagtacccatgatgaaaccgaactgaatactgatgaagtcatggacaaagctgatgcatatgatgaccggactggacctgaactccctgaaccagagaatgattccattgatgttgacatggtggaacaagaacaaacggatgaaataaatgctgacaatgaagatataggtacagaagaagctgaacaagcagatcagaggttagatgcttcagatgatatggaggaaggagatatggcacaacatagcgatggtgtggtagataatgaaggggagcatgttgaagatgcaaatacagacgcaggtgagatggattcacaccaattggacaaggcggattcacttatgcctctgtcacaaggcctacagcctgacaatatgcaaataaattctaatggagaatctgaagcgaacttggccaacagcagtgatatgcatggcgctgttgctccttcagtaaatttttcaggaaatgaagtgcccaatatggaaatatctatgcccaatactggtaacgattcaatactatcgtctaactccaagccagatatgcaaaatgatgctcagcagcacatcaagcagacaaatcctttcagaagcatcggagatgcattggaggactggaaagaacgggccagagtctcagctgatactcaggatcatcaaccagaaactggaaaagatagtagtgagaacactactgaatttcgttatgtgcctgagggtgaggagagcacctctcaggcattgggtgctgcaacagctgaccagatcaattatgacaatcagattaatcaatctttcttggaagatgaaagctgtatcaggaatttggaacatagtgatgagagaacacctgataaccctgaggtgccttaccttcaaacttcacaagcacttcccaacaagtctgaaaatgccaatgaattggatggaagagaaattcaaactgatgcatccgttcaaaatttagttgaaagaacagatcacactttccaagatctagtttctttcaaacaacccccggcagatgataaaatagctcttattgacctaactactgacagggaattgccttctcagatggatctcgacatcactgatgcagagacaaaaagatctaatgcggtctggaaaaatcttgagctcgcaaccatgaaattgtcccaagaactggcagagcaattgcgcctggttatggaaccaactcttgctagtaagcttcaaggggattatagaactggaaagagaataaacatgaagaaggttattccatatattgcgagtcatttccgcagggacaagatatggttgcgccgaactaagcctaataaacggaattaccaagtggttattgctgttgatgactctagaagtatgtctgagggcaaatgtggaaaatttgctatcgaggcattagttactgtgtgccgtgctatgtcacagcttgaggttggacaatttgcagttgcaagttttgggaagaaggggaacgttagtgtgctacacgattttgatcagatctttaatagtgaagctggagttaatgtgatctctagcttgtcgtttgagcaagataacaaaattgaggatgaaccggtgtctgatctcttgacacatctgaatgttatgcttgatactgccgttgcacgggcacgcaccccatcagggcaaaatcctctccagcaactgatactgataatatctgatggaaaattccatgaaaaggaaaacttgaggcgccatgttagagacgttctaaatcgaaagaggatggtcgcgtatgtgctcctggatagccccgaggattctattattaatctaaaggaagcatgcttcagagtaggggagaaggtagagctgaaaaaatacatggattcctttccgttcccgtattatgttatgctacagaacattgaagctcttcctcgcacattggccgacctgcttagacagtggtttgagctcatgcagagcgccaacgagtgacccttgggagttgggagtagtgccacgcatttagctgtacagcaaactacattctagcttccatttttgcttgggcctggacagttctgtggtggcaagcttgattgtgcacaaatgccttcacggttcaaatcgctttcctgaaatatgatctctggtcgcaggcttgattgtctaaaagcatcatcacaattcaaattgtttttgggaaatttgaatagaatttccgctttcctgaaatatggtctctgctcgcaggctttattgtgtaaaaacatcatcacaatttaaattgtttctggcaaatttgaatagaatttccgtgctcaagagttatagtttgttttttttttcaatggagaattgttgctcacgtgctacatgcgacctgagtgtgattgatccttcaatcttgccctgctgttcatcttgtgttgtttgtcatgtttggctttgttgatgtacatgtttcttccactgcatgtgctacgcgttgacgatgtacgcaactgtcgctgccaacgcgaccactttatatatgtgacagtgacacatgccaggggcagatctagaaatctacaaaatctcttcaagctctttctctcttgtaagggattgtttgtttgag

SEQ ID NO: 59796 - DNA, 7161 bp, Zea Mays
atgagtgctaagcccatgagggcatgcccaccatggggttgtagaagcctggaggaggtgccacacactggctcttggcaccggcggcctgtggcaggcaatgtcgccagaggtgattggttctcgggccacatgtggatggatctggttcacagaagtttgtatgtctggttaattggaggttatcttcagagaatgtactggctactggaccaattttgtaatgcgatctgtttgtgcttgaaatgtgatggagaactggttgtatttcgtcctcgacaatctaagcataagagtctcattgctgcatgccttgagtttgaggaccgcctgtctgagtgcaaggacttgttagctagcttaacttgcgaaggacttgggcaactagaggttgaccgagtgtgcaattggcagataatatccatgaactttatcaagaggctgacagaagattatagggaatatgttgatttgatccagccaattcaagttgctgtatatgaaatgaaacttggcttagcaattgctctatctggttctcttcagagggagtatttgaagaagattaaagaagatgatattaatagagttcttggagcaatttatgcttttatgcagtttccctctggatcttttactgaaagggttgtaactgacgtgactgatgatcttacaaattatacaatcactggccaactaggaaccctaaacagttgttctggagatgtagatatgttgaagaagcttgctgctatgtcaagtcagttgaatgtttgtaaagttgctggcaaagtgaagtccctgtccgagatgcttgcttcagtgcatcatatttttttagtaagaacagctgattgtgtcagctgttcccttgtcatggataagtcatcttatgcgtcattgaaggatacctttgatcattttacaagcatgtggatcaacatgaaataccgtttgaaggctaaagaaagcgatgattctcagtacttcaagttcaaatcgcgaatgatcagtatagacgacatctttaaagatgtgccgttgctttctgatatggaatcagaagacagcattttagataatgaagaaaaactagagcatgaatttttcaaaattacggaaagtattgatgacgataatggtgttgttgaagacaactgggatttgataccagagtctgctcttaaatgtattgtgaccatacatgaccaattgtttggttcgcccgatctttttgagaagcgccgcaaatgtcaagttagtgatgcacagaaagtccagtctttcatagaatcatatgagctgggaacaagaatacttaaagacctcccggaattaacatgttctatgtttgatgaaaagctcatgcctgagcacctatttcgtgtttgtcttgaataccaacgatcctgtgcaaaaacacatcaagattgtagtggttataatgcttacaaggatccaaatcctcctgtcttgtttaaaatggttgagtcactaactacacttcaggagagagttaatagctatctggatgaatggcctgatcatcctggtctcttgaaaatactggacctaatcgcttcccttttagcgatgcccctaagcacgccaatttcgaaggtcttgcttggattgcaattgctggctgggaaagctcaaacattgcaggaaaatgactccaagttctttgtaaaagatcatcttgcatcgatatttttgcttgtgtattcatggcaaaggctcgagttagattgttggcctatactgcttgaggaggtccagacaaagtatgagttgaatgctgcaaagctgtggtttccattgcgagccttacttactcaaacttctggtattccagtggatgatgatttgtctattatcagaagtgttgaggaatttgttcaaacatcaagtcttggagaatacaagagacgattgcatatcctctttgccttccatgtaatgcggtgaagaaaatccagaatattctgtacagtgtgtttggttactatatgcagtttttgtcactcgttcatgggaaaattgaagaaggtaaaaaaaacattgagaaggagttgaaagatcacgtcaagctttacagctgggagcaagcaccatatagcagcgcttctattgaaaattttaaaaggactaggcaaaagatttttaagcttctgcaacggttcaatgatattttgaaaagtcctgtcatctttctactgaatgaagaagccacatcaaggaagattccatgctggcttgatcctcagaggcctgaatcacaccttcctgttgactctgaaaaatttaacaaaaggtttctgtggtaccacaagtgggcaagtgagacgtctttatcattacaaacattgcagcaatcaaatggtagtactgttggagttcctactgccaaagatatggtatatgatgtgaagcactggcagaatgaaattgagctcaatgacagattgcagttcttctggatctcacttgagagaatatgtggggcagctaattttggtagtacagtgaagcatgggaaaaagaatcagaagaaaacagctctatccaatctgttcaagactcttgaggaatgtggactatctaagcacaggccaatgagtcatgagtggggagatgagctggcagcaccaagtccattgttcttggagcagtcatatgattctgcacatttattacagcaaataaactctcagaaaatgctggaagatgttagcatcaatcattccacactattgaacacagataactggaagcatgcaaatcagcaatacttcaaatgtttagcaatgatgcaacaacttcgacaggtttctttgaagtttaacaaagatctaggtttggaagaggttaacaaggctatgtcatttatgagtcatctgttgactgtgttgtctgaacaacgacatcttgcttataatctatttgatcaacggaaccaattcaagcatgctattttcttattaggttctggaggaaagagtaaatctctatcatcaagccaaaatgtgctgctgagttccatgtggcagcaaaagaaattgtttgatgctgtaatcactttgataacagactccaacttattgctcagaagcttcaaggattgccattataactcttgtaacaactttatagaagttgaagggatctcatctctccttggaaagttcatcttgaatttttctgaatccaaggagttgttagatgaatgcttgcttggatccactaatatatttgctggtgcatataagagcatgcctcattctgcaacagagatggaacaactttttactgataattgccagcatatagattcattgttggatggatacttgcctggatccaataatatatttccagatgcatataagagtattcctcttgctacaacagagatggagcaactttttgctgataattgccagcttatagattcattgagagaagatatgaaggttctatgccacagggatctttcagtgggatctgttaagaaagttcttatctctcgtttggaagaattgttggagaagggcaagatggcaatggagaaccgaagacatgttgaagaaaatcataagctatgcttaaagcttgaagcttcgtatatagaaattttgaaggaaactttcatgttagttgttggtgctgtcagaaagctcactgatcatgaagtatgcagtaatggaactgaaaaatcgccagttggtaatgttgcatcatggaaagatactttgcagacatgcattatgaatcttaaattggatgatatttgtgttgctggtgaaaagattcgtattctagtgaggttgctggttgactataaacctgatatacgtactagtatagagctgcacctaatgcatcttcatgcttggctgagtgtgatcctatcatcagcagaagggatactttccgaacttttagaagcacacataacaacttctgaaatgactcttgcacttggggacctttttattcatttatttacggatgggtttggttccactgaagatacagccgaagatgcagatgaactacagcaagatgctgttggaagtggaactggaatgggtgagggggatggtcaaaagagtgtaagctctgatatagatgatgaatcacaacttggtgacagtaaggacttgacatgtaaggcagatcccgctcctaagaacgatgataaagctgttgaaatgcaagacggttttaatgcacaattatctgatgtttctgaggatcttgaaggcaaagactcgggtggcgaagatgaggataccttggataatcagatgggtgatactggtgatgcaagtgaagtggttggcaagaaatcatgggataaggatgaagatgatgatcctaagacatctattgagaaatatgagtcaggctcatcagccaagggaacacaacaggatgatagggaaatgagagctaaggatgatggttctattgaggaggaagatccgatggaaatggattctgaggaaggaaagaataataatcttgaacatgatcctagtacccatgatgaaaccgaactgaatactgatgaagtcatggacaaagctgatgcatatgatgaccggactggacctgaactccctgaaccagagaatgattccattgatgttgacatggtggaacaagaacaaacggatgaaataaatgctgacaatgaagatataggtacagaagaagctgaacaagcagatcagaggttagatgcttcagatgatatggaggaaggagatatggcacaacatagcgatggtgtggtagataatgaaggggagcatgttgaagatgcaaatacagacgcaggtgagatggattcacaccaattggacaaggcggattcacttatgcctctgtcacaaggcctacagcctgacaatatgcaaataaattctaatggagaatctgaagcgaacttggccaacagcagtgatatgcatggcgctgttgctccttcagtaaatttttcaggaaatgaagtgcccaatatggaaatatctatgcccaatactggtaacgattcaatactatcgtctaactccaagccagatatgcaaaatgatgctcagcagcacatcaagcagacaaatcctttcagaagcatcggagatgcattggaggactggaaagaacgggccagagtctcagctgatactcaggatcatcaaccagaaactggaaaagatagtagtgagaacactactgaatttcgttatgtgcctgagggtgaggagagcacctctcaggcattgggtgctgcaacagctgaccagatcaattatgacaatcagattaatcaatctttcttggaagatgaaagctgtatcaggaatttggaacatagtgatgagagaacacctgataaccctgaggtgccttaccttcaaacttcacaagcacttcccaacaagtctgaaaatgccaatgaattggatggaagagaaattcaaactgatgcatccgttcaaaatttagttgaaagaacagatcacactttccaagatctagtttctttcaaacaacccccggcagatgataaaatagctcttattgacctaactactgacagggaattgccttctcagatggatctcgacatcactgatgcagagacaaaaagatctaatgcggtctggaaaaatcttgagctcgcaaccatgaaattgtcccaagaactggcagagcaattgcgcctggttatggaaccaactcttgctagtaagcttcaaggggattatagaactggaaagagaataaacatgaagaaggttattccatatattgcgagtcatttccgcagggacaagatatggttgcgccgaactaagcctaataaacggaattaccaagtggttattgctgttgatgactctagaagtatgtctgagggcaaatgtggaaaatttgctatcgaggcattagttactgtgtgccgtgctatgtcacagcttgaggttggacaatttgcagttgcaagttttgggaagaaggggaacgttagtgtgctacacgattttgatcagatctttaatagtgaagctggagttaatgtgatctctagcttgtcgtttgagcaagataacaaaattgaggatgaaccggtgtctgatctcttgacacatctgaatgttatgcttgatactgccgttgcacgggcacgcaccccatcagggcaaaatcctctccagcaactgatactgataatatctgatggaaaattccatgaaaaggaaaacttgaggcgccatgttagagacgttctaaatcgaaagaggatggtcgcgtatgtgctcctggatagccccgaggattctattattaatctaaaggaagcatgcttcagagtaggggagaaggtagagctgaaaaaatacatggattcctttccgttcccgtattatgttatgctacagaacattgaagctcttcctcgcacattggccgacctgcttagacagtggtttgagctcatgcagagcgccaacgagtgacccttgggagttgggagtagtgccacgcatttagctgtacagcaaactacattctagcttccatttttgcttgggcctggacagttctgtggtggcaagcttgattgtgcacaaatgccttcacggttcaaatcgctttcctgaaatatgatctctggtcgcaggcttgattgtctaaaagcatcatcacaattcaaattgtttttgggaaatttgaatagaatttccgctttcctgaaatatggtctctgctcgcaggctttattgtgtaaaaacatcatcacaatttaaattgtttctggcaaatttgaatagaatttccgtgctcaagagttatagtttgttttttttttcaatggagaattgttgctcacgtgctacatgcgacctgagtgtgattgatccttcaatcttgccctgctgttcatcttgtgttgtttgtcatgtttggctttgttgatgtacatgtttcttccactgcatgtgctacgcgttgacgatgtacgcaactgtcgctgccaacgcgaccactttatatatgtgacagtgacacatgccaggggcagatctagaaatctacaaaatctcttcaagctctttctctcttgtaagggattgtttgtttgag

SEQ ID NO: 59797 - DNA, 7201 bp, Zea Mays
atgagtgctaagcccatgagggcatgcccaccatggggttgtagaagcctggaggaggtgccacacactggctcttggcaccggcggcctgtggcaggcaatgtcgccagaggtgattggttctcgggccacatgtggatggatctggttcacagaagtttgtatgtctggttaattggaggttatcttcagagaatgtactggctactggaccaattttgtaatgcgatctgtttgtgcttgaaatgtgatggagaactggttgtatttcgtcctcgacaatctaagcataagagtctcattgctgcatgccttgagtttgaggaccgcctgtctgagtgcaaggacttgttagctagcttaacttgcgaaggacttgggcaactagaggttgaccgagtgtgcaattggcagataatatccatgaactttatcaagaggctgacagaagattatagggaatatgttgatttgatccagccaattcaagttgctgtatatgaaatgaaacttggcttagcaattgctctatctggttctcttcagagggagtatttgaagaagattaaagaagatgatattaatagagttcttggagcaatttatgcttttatgcagtttccctctggatcttttactgaaagggttgtaactgacgtgactgatgatcttacaaattatacaatcactggccaactaggaaccctaaacagttgttctggagatgtagatatgttgaagaagcttgctgctatgtcaagtcagttgaatgtttgtaaagttgctggcaaagtgaagtccctgtccgagatgcttgcttcagtgcatcatatttttttagtaagaacagctgattgtgtcagctgttcccttgtcatggataagtcatcttatgcgtcattgaaggatacctttgatcattttacaagcatgtggatcaacatgaaataccgtttgaaggctaaagaaagcgatgattctcagtacttcaagttcaaatcgcgaatgatcagtatagacgacatctttaaagatgtgccgttgctttctgatatggaatcagaagacagcattttagataatgaagaaaaactagagcatgaatttttcaaaattacggaaagtattgatgacgataatggtgttgttgaagacaactgggatttgataccagagtctgctcttaaatgtattgtgaccatacatgaccaattgtttggttcgcccgatctttttgagaagcgccgcaaatgtcaagttagtgatgcacagaaagtccagtctttcatagaatcatatgagctgggaacaagaatacttaaagacctcccggaattaacatgttctatgtttgatgaaaagctcatgcctgagcacctatttcgtgtttgtcttgaataccaacgatcctgtgcaaaaacacatcaagattgtagtggttataatgcttacaaggatccaaatcctcctgtcttgtttaaaatggttgagtcactaactacacttcaggagagagttaatagctatctggatgaatggcctgatcatcctggtctcttgaaaatactggacctaatcgcttcccttttagcgatgcccctaagcacgccaatttcgaaggtcttgcttggattgcaattgctggctgggaaagctcaaacattgcaggaaaatgactccaagttctttgtaaaagatcatcttgcatcgatatttttgcttgtgtattcatggcaaaggctcgagttagattgttggcctatactgcttgaggaggtccagacaaagtatgagttgaatgctgcaaagctgtggtttccattgcgagccttacttactcaaacttctggtattccagtggatgatgatttgtctattatcagaagtgttgaggaatttgttcaaacatcaagtcttggagaatacaagagacgattgcatatcctctttgccttccatggtgagatttctgctggtgctagcttgggtagttattcaagtaatgcggtgaagaaaatccagaatattctgtacagtgtgtttggttactatatgcagtttttgtcactcgttcatgggaaaattgaagaaggtaaaaaaaacattgagaaggagttgaaagatcacgtcaagctttacagctgggagcaagcaccatatagcagcgcttctattgaaaattttaaaaggactaggcaaaagatttttaagcttctgcaacggttcaatgatattttgaaaagtcctgtcatctttctactgaatgaagaagccacatcaaggaagattccatgctggcttgatcctcagaggcctgaatcacaccttcctgttgactctgaaaaatttaacaaaaggtttctgtggtaccacaagtgggcaagtgagacgtctttatcattacaaacattgcagcaatcaaatggtagtactgttggagttcctactgccaaagatatggtatatgatgtgaagcactggcagaatgaaattgagctcaatgacagattgcagttcttctggatctcacttgagagaatatgtggggcagctaattttggtagtacagtgaagcatgggaaaaagaatcagaagaaaacagctctatccaatctgttcaagactcttgaggaatgtggactatctaagcacaggccaatgagtcatgagtggggagatgagctggcagcaccaagtccattgttcttggagcagtcatatgattctgcacatttattacagcaaataaactctcagaaaatgctggaagatgttagcatcaatcattccacactattgaacacagataactggaagcatgcaaatcagcaatacttcaaatgtttagcaatgatgcaacaacttcgacaggtttctttgaagtttaacaaagatctaggtttggaagaggttaacaaggctatgtcatttatgagtcatctgttgactgtgttgtctgaacaacgacatcttgcttataatctatttgatcaacggaaccaattcaagcatgctattttcttattaggttctggaggaaagagtaaatctctatcatcaagccaaaatgtgctgctgagttccatgtggcagcaaaagaaattgtttgatgctgtaatcactttgataacagactccaacttattgctcagaagcttcaaggattgccattataactcttgtaacaactttatagaagttgaagggatctcatctctccttggaaagttcatcttgaatttttctgaatccaaggagttgttagatgaatgcttgcttggatccactaatatatttgctggtgcatataagagcatgcctcattctgcaacagagatggaacaactttttactgataattgccagcatatagattcattgttggatggatacttgcctggatccaataatatatttccagatgcatataagagtattcctcttgctacaacagagatggagcaactttttgctgataattgccagcttatagattcattgagagaagatatgaaggttctatgccacagggatctttcagtgggatctgttaagaaagttcttatctctcgtttggaagaattgttggagaagggcaagatggcaatggagaaccgaagacatgttgaagaaaatcataagctatgcttaaagcttgaagcttcgtatatagaaattttgaaggaaactttcatgttagttgttggtgctgtcagaaagctcactgatcatgaagtatgcagtaatggaactgaaaaatcgccagttggtaatgttgcatcatggaaagatactttgcagacatgcattatgaatcttaaattggatgatatttgtgttgctggtgaaaagattcgtattctagtgaggttgctggttgactataaacctgatatacgtactagtatagagctgcacctaatgcatcttcatgcttggctgagtgtgatcctatcatcagcagaagggatactttccgaacttttagaagcacacataacaacttctgaaatgactcttgcacttggggacctttttattcatttatttacggatgggtttggttccactgaagatacagccgaagatgcagatgaactacagcaagatgctgttggaagtggaactggaatgggtgagggggatggtcaaaagagtgtaagctctgatatagatgatgaatcacaacttggtgacagtaaggacttgacatgtaaggcagatcccgctcctaagaacgatgataaagctgttgaaatgcaagacggttttaatgcacaattatctgatgtttctgaggatcttgaaggcaaagactcgggtggcgaagatgaggataccttggataatcagatgggtgatactggtgatgcaagtgaagtggttggcaagaaatcatgggataaggatgaagatgatgatcctaagacatctattgagaaatatgagtcaggctcatcagccaagggaacacaacaggatgatagggaaatgagagctaaggatgatggttctattgaggaggaagatccgatggaaatggattctgaggaaggaaagaataataatcttgaacatgatcctagtacccatgatgaaaccgaactgaatactgatgaagtcatggacaaagctgatgcatatgatgaccggactggacctgaactccctgaaccagagaatgattccattgatgttgacatggtggaacaagaacaaacggatgaaataaatgctgacaatgaagatataggtacagaagaagctgaacaagcagatcagaggttagatgcttcagatgatatggaggaaggagatatggcacaacatagcgatggtgtggtagataatgaaggggagcatgttgaagatgcaaatacagacgcaggtgagatggattcacaccaattggacaaggcggattcacttatgcctctgtcacaaggcctacagcctgacaatatgcaaataaattctaatggagaatctgaagcgaacttggccaacagcagtgatatgcatggcgctgttgctccttcagtaaatttttcaggaaatgaagtgcccaatatggaaatatctatgcccaatactggtaacgattcaatactatcgtctaactccaagccagatatgcaaaatgatgctcagcagcacatcaagcagacaaatcctttcagaagcatcggagatgcattggaggactggaaagaacgggccagagtctcagctgatactcaggatcatcaaccagaaactggaaaagatagtagtgagaacactactgaatttcgttatgtgcctgagggtgaggagagcacctctcaggcattgggtgctgcaacagctgaccagatcaattatgacaatcagattaatcaatctttcttggaagatgaaagctgtatcaggaatttggaacatagtgatgagagaacacctgataaccctgaggtgccttaccttcaaacttcacaagcacttcccaacaagtctgaaaatgccaatgaattggatggaagagaaattcaaactgatgcatccgttcaaaatttagttgaaagaacagatcacactttccaagatctagtttctttcaaacaacccccggcagatgataaaatagctcttattgacctaactactgacagggaattgccttctcagatggatctcgacatcactgatgcagagacaaaaagatctaatgcggtctggaaaaatcttgagctcgcaaccatgaaattgtcccaagaactggcagagcaattgcgcctggttatggaaccaactcttgctagtaagcttcaaggggattatagaactggaaagagaataaacatgaagaaggttattccatatattgcgagtcatttccgcagggacaagatatggttgcgccgaactaagcctaataaacggaattaccaagtggttattgctgttgatgactctagaagtatgtctgagggcaaatgtggaaaatttgctatcgaggcattagttactgtgtgccgtgctatgtcacagcttgaggttggacaatttgcagttgcaagttttgggaagaaggggaacgttagtgtgctacacgattttgatcagatctttaatagtgaagctggagttaatgtgatctctagcttgtcgtttgagcaagataacaaaattgaggatgaaccggtgtctgatctcttgacacatctgaatgttatgcttgatactgccgttgcacgggcacgcaccccatcagggcaaaatcctctccagcaactgatactgataatatctgatggaaaattccatgaaaaggaaaacttgaggcgccatgttagagacgttctaaatcgaaagaggatggtcgcgtatgtgctcctggatagccccgaggattctattattaatctaaaggaagcatgcttcagagtaggggagaaggtagagctgaaaaaatacatggattcctttccgttcccgtattatgttatgctacagaacattgaagctcttcctcgcacattggccgacctgcttagacagtggtttgagctcatgcagagcgccaacgagtgacccttgggagttgggagtagtgccacgcatttagctgtacagcaaactacattctagcttccatttttgcttgggcctggacagttctgtggtggcaagcttgattgtgcacaaatgccttcacggttcaaatcgctttcctgaaatatgatctctggtcgcaggcttgattgtctaaaagcatcatcacaattcaaattgtttttgggaaatttgaatagaatttccgctttcctgaaatatggtctctgctcgcaggctttattgtgtaaaaacatcatcacaatttaaattgtttctggcaaatttgaatagaatttccgtgctcaagagttatagtttgttttttttttcaatggagaattgttgctcacgtgctacatgcgacctgagtgtgattgatccttcaatcttgccctgctgttcatcttgtgttgtttgtcatgtttggctttgttgatgtacatgtttcttccactgcatgtgctacgcgttgacgatgtacgcaactgtcgctgccaacgcgaccactttatatatgtgacagtgacacatgccaggggcagatctagaaatctacaaaatctcttcaagctctttctctcttgtaagggattgtttgtttgag

SEQ ID NO: 59798 - DNA, 7210 bp, Zea Mays
atgagtgctaagcccatgagggcatgcccaccatggggttgtagaagcctggaggaggtgccacacactggctcttggcaccggcggcctgtggcaggcaatgtcgccagaggtgattggttctcgggccacatgtggatggatctggttcacagaagtttgtatgtctggttaattggaggttatcttcagagaatgtactggctactggaccaattttgtaatgcgatctgtttgtgcttgaaatgtgatggagaactggttgtatttcgtcctcgacaatctaagcataagagtctcattgctgcatgccttgagtttgaggaccgcctgtctgagtgcaaggacttgttagctagcttaacttgcgaaggacttgggcaactagaggttgaccgagtgtgcaattggcagataatatccatgaactttatcaagaggctgacagaagattatagggaatatgttgatttgatccagccaattcaagttgctgtatatgaaatgaaacttggcttagcaattgctctatctggttctcttcagagggagtatttgaagaagattaaagaagatgatattaatagagttcttggagcaatttatgcttttatgcagtttccctctggatcttttactgaaagggttgtaactgacgtgactgatgatcttacaaattatacaatcactggccaactaggaaccctaaacagttgttctggagatgtagatatgttgaagaagcttgctgctatgtcaagtcagttgaatgtttgtaaagttgctggcaaagtgaagtccctgtccgagatgcttgcttcagtgcatcatatttttttagtaagaacagctgattgtgtcagctgttcccttgtcatggataagtcatcttatgcgtcattgaaggatacctttgatcattttacaagcatgtggatcaacatgaaataccgtttgaaggctaaagaaagcgatgattctcagtacttcaagttcaaatcgcgaatgatcagtatagacgacatctttaaagatgtgccgttgctttctgatatggaatcagaagacagcattttagataatgaagaaaaactagagcatgaatttttcaaaattacggaaagtattgatgacgataatggtgttgttgaagacaactgggatttgataccagagtctgctcttaaatgtattgtgaccatacatgaccaattgtttggttcgcccgatctttttgagaagcgccgcaaatgtcaagttagtgatgcacagaaagtccagtctttcatagaatcatatgagctgggaacaagaatacttaaagacctcccggaattaacatgttctatgtttgatgaaaagctcatgcctgagcacctatttcgtgtttgtcttgaataccaacgatcctgtgcaaaaacacatcaagattgtagtggttataatgcttacaaggatccaaatcctcctgtcttgtttaaaatggttgagtcactaactacacttcaggagagagttaatagctatctggatgaatggcctgatcatcctggtctcttgaaaatactggacctaatcgcttcccttttagcgatgcccctaagcacgccaatttcgaaggtcttgcttggattgcaattgctggctgggaaagctcaaacattgcaggaaaatgactccaagttctttgtaaaagatcatcttgcatcgatatttttgcttgtgtattcatggcaaaggctcgagttagattgttggcctatactgcttgaggaggtccagacaaagtatgagttgaatgctgcaaagctgtggtttccattgcgagccttacttactcaaacttctggtattccagtggatgatgatttgtctattatcagaagtgttgaggaatttgttcaaacatcaagtcttggagaatacaagagacgattgcatatcctctttgccttccatggtgagatttctgctggtgctagcttgggtagttattcaagtaatgcggtgaagaaaatccagaatattctgtacagtgtgtttggttactatatgcagtttttgtcactcgttcatgggaaaattgaagaaggtaaaaaaaacattgagaaggagttgaaagatcacgtcaagctttacagctgggagcaagcaccatatagcagcgcttctattgaaaattttaaaaggactaggcaaaagatttttaagcttctgcaacggttcaatgatattttgaaaagtcctgtcatctttctactgaatgaagaagccacatcaaggaagattccatgctggcttgatcctcagaggcctgaatcacaccttcctgttgactctgaaaaatttaacaaaaggtttctgtggtaccacaagtgggcaagtgagacgtctttatcattacaaacattgcagcaatcaaatggtagtactgttggagttcctactgccaaagaatatgcagatatggtatatgatgtgaagcactggcagaatgaaattgagctcaatgacagattgcagttcttctggatctcacttgagagaatatgtggggcagctaattttggtagtacagtgaagcatgggaaaaagaatcagaagaaaacagctctatccaatctgttcaagactcttgaggaatgtggactatctaagcacaggccaatgagtcatgagtggggagatgagctggcagcaccaagtccattgttcttggagcagtcatatgattctgcacatttattacagcaaataaactctcagaaaatgctggaagatgttagcatcaatcattccacactattgaacacagataactggaagcatgcaaatcagcaatacttcaaatgtttagcaatgatgcaacaacttcgacaggtttctttgaagtttaacaaagatctaggtttggaagaggttaacaaggctatgtcatttatgagtcatctgttgactgtgttgtctgaacaacgacatcttgcttataatctatttgatcaacggaaccaattcaagcatgctattttcttattaggttctggaggaaagagtaaatctctatcatcaagccaaaatgtgctgctgagttccatgtggcagcaaaagaaattgtttgatgctgtaatcactttgataacagactccaacttattgctcagaagcttcaaggattgccattataactcttgtaacaactttatagaagttgaagggatctcatctctccttggaaagttcatcttgaatttttctgaatccaaggagttgttagatgaatgcttgcttggatccactaatatatttgctggtgcatataagagcatgcctcattctgcaacagagatggaacaactttttactgataattgccagcatatagattcattgttggatggatacttgcctggatccaataatatatttccagatgcatataagagtattcctcttgctacaacagagatggagcaactttttgctgataattgccagcttatagattcattgagagaagatatgaaggttctatgccacagggatctttcagtgggatctgttaagaaagttcttatctctcgtttggaagaattgttggagaagggcaagatggcaatggagaaccgaagacatgttgaagaaaatcataagctatgcttaaagcttgaagcttcgtatatagaaattttgaaggaaactttcatgttagttgttggtgctgtcagaaagctcactgatcatgaagtatgcagtaatggaactgaaaaatcgccagttggtaatgttgcatcatggaaagatactttgcagacatgcattatgaatcttaaattggatgatatttgtgttgctggtgaaaagattcgtattctagtgaggttgctggttgactataaacctgatatacgtactagtatagagctgcacctaatgcatcttcatgcttggctgagtgtgatcctatcatcagcagaagggatactttccgaacttttagaagcacacataacaacttctgaaatgactcttgcacttggggacctttttattcatttatttacggatgggtttggttccactgaagatacagccgaagatgcagatgaactacagcaagatgctgttggaagtggaactggaatgggtgagggggatggtcaaaagagtgtaagctctgatatagatgatgaatcacaacttggtgacagtaaggacttgacatgtaaggcagatcccgctcctaagaacgatgataaagctgttgaaatgcaagacggttttaatgcacaattatctgatgtttctgaggatcttgaaggcaaagactcgggtggcgaagatgaggataccttggataatcagatgggtgatactggtgatgcaagtgaagtggttggcaagaaatcatgggataaggatgaagatgatgatcctaagacatctattgagaaatatgagtcaggctcatcagccaagggaacacaacaggatgatagggaaatgagagctaaggatgatggttctattgaggaggaagatccgatggaaatggattctgaggaaggaaagaataataatcttgaacatgatcctagtacccatgatgaaaccgaactgaatactgatgaagtcatggacaaagctgatgcatatgatgaccggactggacctgaactccctgaaccagagaatgattccattgatgttgacatggtggaacaagaacaaacggatgaaataaatgctgacaatgaagatataggtacagaagaagctgaacaagcagatcagaggttagatgcttcagatgatatggaggaaggagatatggcacaacatagcgatggtgtggtagataatgaaggggagcatgttgaagatgcaaatacagacgcaggtgagatggattcacaccaattggacaaggcggattcacttatgcctctgtcacaaggcctacagcctgacaatatgcaaataaattctaatggagaatctgaagcgaacttggccaacagcagtgatatgcatggcgctgttgctccttcagtaaatttttcaggaaatgaagtgcccaatatggaaatatctatgcccaatactggtaacgattcaatactatcgtctaactccaagccagatatgcaaaatgatgctcagcagcacatcaagcagacaaatcctttcagaagcatcggagatgcattggaggactggaaagaacgggccagagtctcagctgatactcaggatcatcaaccagaaactggaaaagatagtagtgagaacactactgaatttcgttatgtgcctgagggtgaggagagcacctctcaggcattgggtgctgcaacagctgaccagatcaattatgacaatcagattaatcaatctttcttggaagatgaaagctgtatcaggaatttggaacatagtgatgagagaacacctgataaccctgaggtgccttaccttcaaacttcacaagcacttcccaacaagtctgaaaatgccaatgaattggatggaagagaaattcaaactgatgcatccgttcaaaatttagttgaaagaacagatcacactttccaagatctagtttctttcaaacaacccccggcagatgataaaatagctcttattgacctaactactgacagggaattgccttctcagatggatctcgacatcactgatgcagagacaaaaagatctaatgcggtctggaaaaatcttgagctcgcaaccatgaaattgtcccaagaactggcagagcaattgcgcctggttatggaaccaactcttgctagtaagcttcaaggggattatagaactggaaagagaataaacatgaagaaggttattccatatattgcgagtcatttccgcagggacaagatatggttgcgccgaactaagcctaataaacggaattaccaagtggttattgctgttgatgactctagaagtatgtctgagggcaaatgtggaaaatttgctatcgaggcattagttactgtgtgccgtgctatgtcacagcttgaggttggacaatttgcagttgcaagttttgggaagaaggggaacgttagtgtgctacacgattttgatcagatctttaatagtgaagctggagttaatgtgatctctagcttgtcgtttgagcaagataacaaaattgaggatgaaccggtgtctgatctcttgacacatctgaatgttatgcttgatactgccgttgcacgggcacgcaccccatcagggcaaaatcctctccagcaactgatactgataatatctgatggaaaattccatgaaaaggaaaacttgaggcgccatgttagagacgttctaaatcgaaagaggatggtcgcgtatgtgctcctggatagccccgaggattctattattaatctaaaggaagcatgcttcagagtaggggagaaggtagagctgaaaaaatacatggattcctttccgttcccgtattatgttatgctacagaacattgaagctcttcctcgcacattggccgacctgcttagacagtggtttgagctcatgcagagcgccaacgagtgacccttgggagttgggagtagtgccacgcatttagctgtacagcaaactacattctagcttccatttttgcttgggcctggacagttctgtggtggcaagcttgattgtgcacaaatgccttcacggttcaaatcgctttcctgaaatatgatctctggtcgcaggcttgattgtctaaaagcatcatcacaattcaaattgtttttgggaaatttgaatagaatttccgctttcctgaaatatggtctctgctcgcaggctttattgtgtaaaaacatcatcacaatttaaattgtttctggcaaatttgaatagaatttccgtgctcaagagttatagtttgttttttttttcaatggagaattgttgctcacgtgctacatgcgacctgagtgtgattgatccttcaatcttgccctgctgttcatcttgtgttgtttgtcatgtttggctttgttgatgtacatgtttcttccactgcatgtgctacgcgttgacgatgtacgcaactgtcgctgccaacgcgaccactttatatatgtgacagtgacacatgccaggggcagatctagaaatctacaaaatctcttcaagctctttctctcttgtaagggattgtttgtttgag

SEQ ID NO: 59799 - DNA, 6033 bp, Zea Mays
atagtagtaaagagtaaaatgcaggagcgctcgttaaaacttgtctcgtggtatcacttattcagcgccgcaaatgtcaagttagtgatgcacagaaagtccagtctttcatagaatcatatgagctgggaacaagaatacttaaagacctcccggaattaacatgttctatgtttgatgaaaagctcatgcctgagcacctatttcgtgtttgtcttgaataccaacgatcctgtgcaaaaacacatcaagattgtagtggttataatgcttacaaggatccaaatcctcctgtcttgtttaaaatggttgagtcactaactacacttcaggagagagttaatagctatctggatgaatggcctgatcatcctggtctcttgaaaatactggacctaatcgcttcccttttagcgatgcccctaagcacgccaatttcgaaggtcttgcttggattgcaattgctggctgggaaagctcaaacattgcaggaaaatgactccaagttctttgtaaaagatcatcttgcatcgatatttttgcttgtgtattcatggcaaaggctcgagttagattgttggcctatactgcttgaggaggtccagacaaagtatgagttgaatgctgcaaagctgtggtttccattgcgagccttacttactcaaacttctggtattccagtggatgatgatttgtctattatcagaagtgttgaggaatttgttcaaacatcaagtcttggagaatacaagagacgattgcatatcctctttgccttccatggtgagatttctgctggtgctagcttgggtagttattcaagtaatgcggtgaagaaaatccagaatattctgtacagtgtgtttggttactatatgcagtttttgtcactcgttcatgggaaaattgaagaaggtaaaaaaaacattgagaaggagttgaaagatcacgtcaagctttacagctgggagcaagcaccatatagcagcgcttctattgaaaattttaaaaggactaggcaaaagatttttaagcttctgcaacggttcaatgatattttgaaaagtcctgtcatctttctactgaatgaagaagccacatcaaggaagattccatgctggcttgatcctcagaggcctgaatcacaccttcctgttgactctgaaaaatttaacaaaaggtttctgtggtaccacaagtgggcaagtgagacgtctttatcattacaaacattgcagcaatcaaatggtagtactgttggagttcctactgccaaagaatatgcagatatggtatatgatgtgaagcactggcagaatgaaattgagctcaatgacagattgcagttcttctggatctcacttgagagaatatgtggggcagctaattttggtagtacagtgaagcatgggaaaaagaatcagaagaaaacagctctatccaatctgttcaagactcttgaggaatgtggactatctaagcacaggccaatgagtcatgagtggggagatgagctggcagcaccaagtccattgttcttggagcagtcatatgattctgcacatttattacagcaaataaactctcagaaaatgctggaagatgttagcatcaatcattccacactattgaacacagataactggaagcatgcaaatcagcaatacttcaaatgtttagcaatgatgcaacaacttcgacaggtttctttgaagtttaacaaagatctaggtttggaagaggttaacaaggctatgtcatttatgagtcatctgttgactgtgttgtctgaacaacgacatcttgcttataatctatttgatcaacggaaccaattcaagcatgctattttcttattaggttctggaggaaagagtaaatctctatcatcaagccaaaatgtgctgctgagttccatgtggcagcaaaagaaattgtttgatgctgtaatcactttgataacagactccaacttattgctcagaagcttcaaggattgccattataactcttgtaacaactttatagaagttgaagggatctcatctctccttggaaagttcatcttgaatttttctgaatccaaggagttgttagatgaatgcttgcttggatccactaatatatttgctggtgcatataagagcatgcctcattctgcaacagagatggaacaactttttactgataattgccagcatatagattcattgttggatggatacttgcctggatccaataatatatttccagatgcatataagagtattcctcttgctacaacagagatggagcaactttttgctgataattgccagcttatagattcattgagagaagatatgaaggttctatgccacagggatctttcagtgggatctgttaagaaagttcttatctctcgtttggaagaattgttggagaagggcaagatggcaatggagaaccgaagacatgttgaagaaaatcataagctatgcttaaagcttgaagcttcgtatatagaaattttgaaggaaactttcatgttagttgttggtgctgtcagaaagctcactgatcatgaagtatgcagtaatggaactgaaaaatcgccagttggtaatgttgcatcatggaaagatactttgcagacatgcattatgaatcttaaattggatgatatttgtgttgctggtgaaaagattcgtattctagtgaggttgctggttgactataaacctgatatacgtactagtatagagctgcacctaatgcatcttcatgcttggctgagtgtgatcctatcatcagcagaagggatactttccgaacttttagaagcacacataacaacttctgaaatgactcttgcacttggggacctttttattcatttatttacggatgggtttggttccactgaagatacagccgaagatgcagatgaactacagcaagatgctgttggaagtggaactggaatgggtgagggggatggtcaaaagagtgtaagctctgatatagatgatgaatcacaacttggtgacagtaaggacttgacatgtaaggcagatcccgctcctaagaacgatgataaagctgttgaaatgcaagacggttttaatgcacaattatctgatgtttctgaggatcttgaaggcaaagactcgggtggcgaagatgaggataccttggataatcagatgggtgatactggtgatgcaagtgaagtggttggcaagaaatcatgggataaggatgaagatgatgatcctaagacatctattgagaaatatgagtcaggctcatcagccaagggaacacaacaggatgatagggaaatgagagctaaggatgatggttctattgaggaggaagatccgatggaaatggattctgaggaaggaaagaataataatcttgaacatgatcctagtacccatgatgaaaccgaactgaatactgatgaagtcatggacaaagctgatgcatatgatgaccggactggacctgaactccctgaaccagagaatgattccattgatgttgacatggtggaacaagaacaaacggatgaaataaatgctgacaatgaagatataggtacagaagaagctgaacaagcagatcagaggttagatgcttcagatgatatggaggaaggagatatggcacaacatagcgatggtgtggtagataatgaaggggagcatgttgaagatgcaaatacagacgcaggtgagatggattcacaccaattggacaaggcggattcacttatgcctctgtcacaaggcctacagcctgacaatatgcaaataaattctaatggagaatctgaagcgaacttggccaacagcagtgatatgcatggcgctgttgctccttcagtaaatttttcaggaaatgaagtgcccaatatggaaatatctatgcccaatactggtaacgattcaatactatcgtctaactccaagccagatatgcaaaatgatgctcagcagcacatcaagcagacaaatcctttcagaagcatcggagatgcattggaggactggaaagaacgggccagagtctcagctgatactcaggatcatcaaccagaaactggaaaagatagtagtgagaacactactgaatttcgttatgtgcctgagggtgaggagagcacctctcaggcattgggtgctgcaacagctgaccagatcaattatgacaatcagattaatcaatctttcttggaagatgaaagctgtatcaggaatttggaacatagtgatgagagaacacctgataaccctgaggtgccttaccttcaaacttcacaagcacttcccaacaagtctgaaaatgccaatgaattggatggaagagaaattcaaactgatgcatccgttcaaaatttagttgaaagaacagatcacactttccaagatctagtttctttcaaacaacccccggcagatgataaaatagctcttattgacctaactactgacagggaattgccttctcagatggatctcgacatcactgatgcagagacaaaaagatctaatgcggtctggaaaaatcttgagctcgcaaccatgaaattgtcccaagaactggcagagcaattgcgcctggttatggaaccaactcttgctagtaagcttcaaggggattatagaactggaaagagaataaacatgaagaaggttattccatatattgcgagtcatttccgcagggacaagatatggttgcgccgaactaagcctaataaacggaattaccaagtggttattgctgttgatgactctagaagtatgtctgagggcaaatgtggaaaatttgctatcgaggcattagttactgtgtgccgtgctatgtcacagcttgaggttggacaatttgcagttgcaagttttgggaagaaggggaacgttagtgtgctacacgattttgatcagatctttaatagtgaagctggagttaatgtgatctctagcttgtcgtttgagcaagataacaaaattgaggatgaaccggtgtctgatctcttgacacatctgaatgttatgcttgatactgccgttgcacgggcacgcaccccatcagggcaaaatcctctccagcaactgatactgataatatctgatggaaaattccatgaaaaggaaaacttgaggcgccatgttagagacgttctaaatcgaaagaggatggtcgcgtatgtgctcctggatagccccgaggattctattattaatctaaaggaagcatgcttcagagtaggggagaaggtagagctgaaaaaatacatggattcctttccgttcccgtattatgttatgctacagaacattgaagctcttcctcgcacattggccgacctgcttagacagtggtttgagctcatgcagagcgccaacgagtgacccttgggagttgggagtagtgccacgcatttagctgtacagcaaactacattctagcttccatttttgcttgggcctggacagttctgtggtggcaagcttgattgtgcacaaatgccttcacggttcaaatcgctttcctgaaatatgatctctggtcgcaggcttgattgtctaaaagcatcatcacaattcaaattgtttttgggaaatttgaatagaatttccgctttcctgaaatatggtctctgctcgcaggctttattgtgtaaaaacatcatcacaatttaaattgtttctggcaaatttgaatagaatttccgtgctcaagagttatagtttgttttttttttcaatggagaattgttgctcacgtgctacatgcgacctgagtgtgattgatccttcaatcttgccctgctgttcatcttgtgttgtttgtcatgtttggctttgttgatgtacatgtttcttccactgcatgtgctacgcgttgacgatgtacgcaactgtcgctgccaacgcgaccactttatatatgtgacagtgacacatgccaggggcagatctagaaatctacaaaatctcttcaagctctttctctcttgtaagggattgtttgtttgag

SEQ ID NO: 59800 - DNA, 1438 bp, Zea Mays
atgcactcgatcatcacgcgcaaaaaaaaaaaaaaaaacaaacaaatcgacagtaccgtaactaattatccaatagctagccgcgcgcgcgctagctgttcatcctcagaactggccgccctcgaaggtctggccgaactgccagccagcggggacggcgccgttgctggtgacggtgcggccgtcgctggcggtgacctggaacgagagcgcctgcctgtccaggtacgagttgctctgccagttctggccccagttccgggacatgggctgccaccccgtgcgggagccccggatggagacggagcgcacgtcgccggcgcccgccacgttggtcaccagcaccaggttgaagtaggagtgcccgttgatggtgaaccggatgccgcccttcttcacgcacggcactctgcgccatagacatgtagattaattaatgtcgggttaagaacgacgttagctaatgggatcgagcgttggcaagttatacgacgttagctatataacaacattaagtaaatcgtcggtgctggtactgtctacgtaggtcagcgcgtcacatgcaaataacggtcactacgtacgtgcgtgcgtgactgaggttttactgggttgggacggccgagagttggtatgggagcgaggtgcgacactggcagcagtggcagggctgagggcacatgcgcgccgcctgcagctgcagctgcagctgcagccacagactagcctatccccacgcccgtatcaaatctgcagggtggcccactaaactaatgggccgaacttaggctccgggcccaccaaccttcgaaccgacgtccgacgcgtttgggtcgttttgaaatcgaattgatcgagccaggacgtaggtggtggtggtgcgagccgtcgtagcagctgggggccggcgtgcatgtgtcacgtgtgcagtgcagtgcagtgtgcgtgaccaccgccgagtcgcaggcagcacagcatgtgaagagcaactgaagtacctcctgaacgcgacgggcacgatgccggcgcggtactgcgcgatgcggaggaaggccggctcggccatgtcgaagtgcgggcgcggcgggttgcaccagccgccgtcgtcgctggggaggccgtagttgggcgggcagaagttggtggccgtgacggtgatggtgcccggcaggcaccaccgcccgtcgttgtcgcaccgcagctcgtagcaggacccgcacgccgcgccgtcgttgaacagcgccgtgctcagcgccgccgtgctcgtgccgtaccccgtgctgtacaggttgccgtacccgcaggcgccgcccattgtgccggacgcgtccccgccgccgtagaacgtggcgtgcgcgctctgccacccgccggcagcggcctcccgcgcgaggagtccgagcaggaggagaagagcgccggcaatggccatcgctga

SEQ ID NO: 59801 - DNA, 1925 bp, Zea Mays
ctggagaccaacggtccacggacggcacacctccaaatcttcgtcctcttcgcgcacccgaaaacctcctcgatcgcctgcatcgacccggccaatagaaccctacgaaatctcgattctcgcaaactgtcagggcggcagaaaacgcgttgaccattcacaccccttcgccccaccctccagatcccgaccaggcggcgcgcccccgccctcgccggggataccggatctgccgtcgagccgccggggcaccacggccgatgcgaccagcacagcaccgctgccagaatcgccgacgaatcggctgacgcggtaaactagtctcccgcccggctgccagccgatgggcacctgcgggctcgccgcggtcgtcgcgctactcctcgcctcggctctactccctggccccgattccgcttcagccagaagccttctggaaggcgagaaccccagctccggcgaggacgctcctgcaccagccgtttctggccagtcttcagccgcggggcagcagactgagaacaagcggcatcaggaatcactgccgccggtgacgtcaccaccgccgccgccgcccacgcaggagactaattcgcagaaggcagccagtcctcccccaggacccaatgtcgggacggggcaggaggacacagggagtcaagggaggagggaggagactgacaaactgaaggaggccatggagaagtgtgacgcctcgcataagtgttcctctggaaacgaattttctgcttgccttcaggttcctgataatgctttagttgggccatacattattgtccacaatgaaggccaacatgatatggacattgatgtcaaagaaccatcatcaaatacaaacaatgataaaaagcctctacatcttgtcaaaggtgcctttggacaggtatgtaatttactcagttacaacatttgctttaggtgttcttgaatagtatacatattcaagtcaaatagatgatgaaagttacctgagtgactgatcagtcaaattaattttgggtcaaatatggtgaggcacgtatttcaaaattggttcacttttggtgtaacacatttcatagtgccccattgcctcacttgttcatttggggcctgtagtagtagggtatgtacttttgagttgttagactggatagattgcctgtgcattccatttgatatttggattttagaagctacatgtgacatttggaactaacaagaatactagacctttgagcataaaagctgagtctttgttccttacatatctcatgcaactgaattgcattttatttattttaagaggattaaatgcatgctcctctaaatataatactcccttcgtttacatattatagtttgctttagctttgttctaagttaaacttttctaacttcgataaaagttttagaaaaatatataacatctacaagttcaaatatgacctcatctttgatggaggttgcccttctttctgttcctggaagaggttgttccacgaggaagctaagcttcaagcccttagattcagtgatggtaatcggccttccttattctgtttagactctctatcttagctttcccttttgcctccctcagtcttgccgttcctctctttctctcttcttttatattaataaaattcttttacaatatgtgtgtgtgtgtggtggtgggggggggggggtctcccctgctgtatctttcgctaaaagagttgaaatatatgcactatcaagacatactttatggataatttaatgaaactaatttgatgccgtatatatcggtttatttttctgtaaacttggtcagagctagagaagttagacttaggataaagctaaagtgattcactccataacttgtagcagagggagcaattactattccaagttttttgtatgaaattttagtatgt

SEQ ID NO: 59802 - DNA, 1315 bp, Zea Mays
ggcacacctccaaatcttcgtcctcttcgcgcacccgaaaacctcctcgatcgcctgcatcgacccggccaatagaaccctacgaaatctcgattctcgcaaactgtcagggcggcagaaaacgcgttgaccattcacaccccttcgccccaccctccagatcccgaccaggcggcgcgcccccgccctcgccggggataccggatctgccgtcgagccgccggggcaccacggccgatgcgaccagcacagcaccgctgccagaatcgccgacgaatcggctgacgcggtaaactagtctcccgcccggctgccagccgatgggcacctgcgggctcgccgcggtcgtcgcgctactcctcgcctcggctctactccctggccccgattccgcttcagccagaagccttctggaaggcgagaaccccagctccggcgaggacgctcctgcaccagccgtttctggccagtcttcagccgcggggcagcagactgagaacaagcggcatcaggaatcactgccgccggtgacgtcaccaccgccgccgccgcccacgcaggagactaattcgcagaaggcagccagtcctcccccaggacccaatgtcgggacggggcaggaggacacagggagtcaagggaggagggaggagactgacaaactgaaggaggccatggagaagtgtgacgcctcgcataagtgttcctctggaaacgaattttctgcttgccttcaggttcctgataatgctttagttgggccatacattattgtccacaatgaaggccaacatgatatggacattgatgtcaaagaaccatcatcaaatacaaacaatgataaaaagcctctacatcttgtcaaaggtgcctttggacagaggttgttccacgaggaagctaagcttcaagcccttagattcagtgatggtaatcggccttccttattctgtttagactctctatcttagctttcccttttgcctccctcagtcttgccgttcctctctttctctcttcttttatattaataaaattcttttacaatatgtgtgtgtgtgtggtggtgggggggggggggtctcccctgctgtatctttcgctaaaagagttgaaatatatgcactatcaagacatactttatggataatttaatgaaactaatttgatgccgtatatatcggtttatttttctgtaaacttggtcagagctagagaagttagacttaggataaagctaaagtgattcactccataacttgtagcagagggagcaattactattccaagttttttgtatgaaattttagtatgt

SEQ ID NO: 59803 - DNA, 1924 bp, Zea Mays
cacacctccaaatcttcgtcctcttcgcgcacccgaaaacctcctcgatcgcctgcatcgacccggccaatagaaccctacgaaatctcgattctcgcaaactgtcagggcggcagaaaacgcgttgaccattcacaccccttcgccccaccctccagatcccgaccaggcggcgcgcccccgccctcgccggggataccggatctgccgtcgagccgccggggcaccacggccgatgcgaccagcacagcaccgctgccagaatcgccgacgaatcggctgacgcggtaaactagtctcccgcccggctgccagccgatgggcacctgcgggctcgccgcggtcgtcgcgctactcctcgcctcggctctactccctggccccgattccgcttcagccagaagccttctggaaggcgagaaccccagctccggcgagaggaggttgtttgggtctccacaggacgctcctgcaccagccgtttctggccagtcttcagccgcggggcagcagactgagaacaagcggcatcaggaatcactgccgccggtgacgtcaccaccgccgccgccgcccacgcaggagactaattcgcagaaggcagccagtcctcccccaggacccaatgtcgggacggggcaggaggacacagggagtcaagggaggagggaggagactgacaaactgaaggaggccatggagaagtgtgacgcctcgcataagtgttcctctggaaacgaattttctgcttgccttcaggttcctgataatgctttagttgggccatacattattgtccacaatgaaggccaacatgatatggacattgatgtcaaagaaccatcatcaaatacaaacaatgataaaaagcctctacatcttgtcaaaggtgcctttggacaggtatgtaatttactcagttacaacatttgctttaggtgttcttgaatagtatacatattcaagtcaaatagatgatgaaagttacctgagtgactgatcagtcaaattaattttgggtcaaatatggtgaggcacgtatttcaaaattggttcacttttggtgtaacacatttcatagtgccccattgcctcacttgttcatttggggcctgtagtagtagggtatgtacttttgagttgttagactggatagattgcctgtgcattccatttgatatttggattttagaagctacatgtgacatttggaactaacaagaatactagacctttgagcataaaagctgagtctttgttccttacatatctcatgcaactgaattgcattttatttattttaagaggattaaatgcatgctcctctaaatataatactcccttcgtttacatattatagtttgctttagctttgttctaagttaaacttttctaacttcgataaaagttttagaaaaatatataacatctacaagttcaaatatgacctcatctttgatggaggttgcccttctttctgttcctggaagaggttgttccacgaggaagctaagcttcaagcccttagattcagtgatggtaatcggccttccttattctgtttagactctctatcttagctttcccttttgcctccctcagtcttgccgttcctctctttctctcttcttttatattaataaaattcttttacaatatgtgtgtgtgtgtggtggtgggggggggggggtctcccctgctgtatctttcgctaaaagagttgaaatatatgcactatcaagacatactttatggataatttaatgaaactaatttgatgccgtatatatcggtttatttttctgtaaacttggtcagagctagagaagttagacttaggataaagctaaagtgattcactccataacttgtagcagagggagcaattactattccaagttttttgtatgaaattttagtatgt

SEQ ID NO: 59804 - DNA, 1862 bp, Zea Mays
cttcgcgcacccgaaaacctcctcgatcgcctgcatcgacccggccaatagaaccctacgaaatctcgattctcgcaaactgtcagggcggcagaaaacgcgttgaccattcacaccccttcgccccaccctccagatcccgaccaggcggcgcgcccccgccctcgccggggataccggatctgccgtcgagccgccggggcaccacggccgatgcgaccagcacagcaccgctgccagaatcgccgacgaatcggctgacgcggtaaactagtctcccgcccggctgccagccgatgggcacctgcgggctcgccgcggtcgtcgcgctactcctcgcctcggctctactccctggccccgattccgcttcagccagaagccttctggaaggcgagaaccccagctccggcgagccgtttctggccagtcttcagccgcggggcagcagactgagaacaagcggcatcaggaatcactgccgccggtgacgtcaccaccgccgccgccgcccacgcaggagactaattcgcagaaggcagccagtcctcccccaggacccaatgtcgggacggggcaggaggacacagggagtcaagggaggagggaggagactgacaaactgaaggaggccatggagaagtgtgacgcctcgcataagtgttcctctggaaacgaattttctgcttgccttcaggttcctgataatgctttagttgggccatacattattgtccacaatgaaggccaacatgatatggacattgatgtcaaagaaccatcatcaaatacaaacaatgataaaaagcctctacatcttgtcaaaggtgcctttggacaggtatgtaatttactcagttacaacatttgctttaggtgttcttgaatagtatacatattcaagtcaaatagatgatgaaagttacctgagtgactgatcagtcaaattaattttgggtcaaatatggtgaggcacgtatttcaaaattggttcacttttggtgtaacacatttcatagtgccccattgcctcacttgttcatttggggcctgtagtagtagggtatgtacttttgagttgttagactggatagattgcctgtgcattccatttgatatttggattttagaagctacatgtgacatttggaactaacaagaatactagacctttgagcataaaagctgagtctttgttccttacatatctcatgcaactgaattgcattttatttattttaagaggattaaatgcatgctcctctaaatataatactcccttcgtttacatattatagtttgctttagctttgttctaagttaaacttttctaacttcgataaaagttttagaaaaatatataacatctacaagttcaaatatgacctcatctttgatggaggttgcccttctttctgttcctggaagaggttgttccacgaggaagctaagcttcaagcccttagattcagtgatggtaatcggccttccttattctgtttagactctctatcttagctttcccttttgcctccctcagtcttgccgttcctctctttctctcttcttttatattaataaaattcttttacaatatgtgtgtgtgtgtggtggtgggggggggggggtctcccctgctgtatctttcgctaaaagagttgaaatatatgcactatcaagacatactttatggataatttaatgaaactaatttgatgccgtatatatcggtttatttttctgtaaacttggtcagagctagagaagttagacttaggataaagctaaagtgattcactccataacttgtagcagagggagcaattactattccaagttttttgtatgaaattttagtatgt

SEQ ID NO: 59805 - DNA, 1364 bp, Zea Mays
cccgaaaacctcctcgatcgcctgcatcgacccggccaatagaaccctacgaaatctcgattctcgcaaactgtcagggcggcagaaaacgcgttgaccattcacaccccttcgccccaccctccagatcccgaccaggcggcgcgcccccgccctcgccggggataccggatctgccgtcgagccgccggggcaccacggccgatgcgaccagcacagcaccgctgccagaatcgccgacgaatcggctgacgcggtaaactagtctcccgcccggctgccagccgatgggcacctgcgggctcgccgcggtcgtcgcgctactcctcgcctcggctctactccctggccccgattccgcttcagccagaagccttctggaaggcgagaaccccagctccggcgaggacgctcctgcaccagccgtttctggccagtcttcagccgcggggcagcagactgagaacaagcggcatcaggaatcactgccgccggtgacgtcaccaccgccgccgccgcccacgcaggagactaattcgcagaaggcagccagtcctcccccaggacccaatgtcgggacggggcaggaggacacagggagtcaagggaggagggaggagactgacaaactgaaggaggccatggagaagtgtgacgcctcgcataagtgttcctctggaaacgaattttctgcttgccttcaggttcctgataatgctttagttgggccatacattattgtccacaatgaaggccaacatgatatggacattgatgtcaaagaaccatcatcaaatacaaacaatgataaaaagcctctacatcttgtcaaaggtgcctttggacagttttagaaaaatatataacatctacaagttcaaatatgacctcatctttgatggaggttgcccttctttctgttcctggaagaggttgttccacgaggaagctaagcttcaagcccttagattcagtgatggtaatcggccttccttattctgtttagactctctatcttagctttcccttttgcctccctcagtcttgccgttcctctctttctctcttcttttatattaataaaattcttttacaatatgtgtgtgtgtgtggtggtgggggggggggggtctcccctgctgtatctttcgctaaaagagttgaaatatatgcactatcaagacatactttatggataatttaatgaaactaatttgatgccgtatatatcggtttatttttctgtaaacttggtcagagctagagaagttagacttaggataaagctaaagtgattcactccataacttgtagcagagggagcaattactattccaagttttttgtatgaaattttagtatgt

SEQ ID NO: 59806 - DNA, 1915 bp, Zea Mays
cccgaaaacctcctcgatcgcctgcatcgacccggccaatagaaccctacgaaatctcgattctcgcaaactgtcagggcggcagaaaacgcgttgaccattcacaccccttcgccccaccctccagatcccgaccaggcggcgcgcccccgccctcgccggggataccggatctgccgtcgagccgccggggcaccacggccgatgcgaccagcacagcaccgctgccagaatcgccgacgaatcggctgacgcggtaaactagtctcccgcccggctgccagccgatgggcacctgcgggctcgccgcggtcgtcgcgctactcctcgcctcggctctactccctggccccgattccgcttcagccagaagccttctggaaggcgagaaccccagctccggcgagattggtgcgggtttggattcagaggaggttgtttgggtctccacaggacgctcctgcaccagccgtttctggccagtcttcagccgcggggcagcagactgagaacaagcggcatcaggaatcactgccgccggtgacgtcaccaccgccgccgccgcccacgcaggagactaattcgcagaaggcagccagtcctcccccaggacccaatgtcgggacggggcaggaggacacagggagtcaagggaggagggaggagactgacaaactgaaggaggccatggagaagtgtgacgcctcgcataagtgttcctctggaaacgaattttctgcttgccttcaggttcctgataatgctttagttgggccatacattattgtccacaatgaaggccaacatgatatggacattgatgtcaaagaaccatcatcaaatacaaacaatgataaaaagcctctacatcttgtcaaaggtgcctttggacaggtatgtaatttactcagttacaacatttgctttaggtgttcttgaatagtatacatattcaagtcaaatagatgatgaaagttacctgagtgactgatcagtcaaattaattttgggtcaaatatggtgaggcacgtatttcaaaattggttcacttttggtgtaacacatttcatagtgccccattgcctcacttgttcatttggggcctgtagtagtagggtatgtacttttgagttgttagactggatagattgcctgtgcattccatttgatatttggattttagaagctacatgtgacatttggaactaacaagaatactagacctttgagcataaaagctgagtctttgttccttacatatctcatgcaactgaattgcattttatttattttaagaggattaaatgcatgctcctctaaatataatactcccttcgtttacatattatagtttgctttagctttgttctaagttaaacttttctaacttcgataaaagttttagaaaaatatataacatctacaagttcaaatatgacctcatctttgatggaggttgcccttctttctgttcctggaagaggttgttccacgaggaagctaagcttcaagcccttagattcagtgatggtaatcggccttccttattctgtttagactctctatcttagctttcccttttgcctccctcagtcttgccgttcctctctttctctcttcttttatattaataaaattcttttacaatatgtgtgtgtgtgtggtggtgggggggggggggtctcccctgctgtatctttcgctaaaagagttgaaatatatgcactatcaagacatactttatggataatttaatgaaactaatttgatgccgtatatatcggtttatttttctgtaaacttggtcagagctagagaagttagacttaggataaagctaaagtgattcactccataacttgtagcagagggagcaattactattccaagttttttgtatgaaattttagtatgt

SEQ ID NO: 59807 - DNA, 3369 bp, Zea Mays
ccagcagcaagcgcagcagacagcagtgcatctgcgccgcgaaccgccgctccagtccaatcaatggacggacacttcccatgatctcgtcgcccacctcctcttccgccgccgccgccgcggcaatgccgactccctcccgcctcctcttccccgtcctggtcctcctcgccgcgtcggccggggcggccacggccgccaccgtgagcgacgacgtgctcgcgctggtcgtcctcaagtcgggcctcttcgacccggcgggccgcctcgcgccctggtccgaggacgccgaccgcgcctgcgcctggccgggggtctcctgcgactcgcgcacggaccgcgtcgccgcgctcgacctccccgccgcgtcgctcgcgggccgcctcccgcgggccgcgctgctccgcctcgacgcgctcgtctcgctcgcgctcccggggaaccgcctctccggcacgctccctgacgcgctgccccctcgcctccgttctctcgacctctcgggcaacgcgatctcgggcggcatccccgcctcgctcgcgtcctgcgagtcgctcgtgtcgctcaacctctctcgcaatcggctcaccggcccggtccccgatggcatctggtcactgccgtcgctcaggtcggtggacctctccgggaacctgctctccgggagcgtacccggcgggttcccgcggagcagctcgctgcgtgaggtggacctgagccgcaacctgctccaaggggagataccggcggacatcggtgaagccgggctgcttaagtcccttgacctcgggcacaactcgttcaccggcgggctgcccgagtcgctgcgtgggctgtccgggctgagttttctcggcgctggtggcaatgacctatcagaggagctccagccgtggattggggaaatggcggcgctggagagactggatttgtctgccaaccgctttaccggcaccatcccggacgccatttcaggctgcaagaacctggtcgaggtcgacctcagccggaacgcgctcactggggagctcccatggtgggtgtttggggtacctctgcagcgcgtctccgtctctggaaatgcactgtcagggtgggtcaaggttccccgtgatgctgctgccaccctggaagccctggacctttcagccaatgctttcactggtgtgatcccgcctgagatttccacccttgcaagattgcagtacctgaatttgtcctcaaattccatgtcggggcagcttcctgcaagcattgggctgatgctgatgcttgaggtgttggacgtgagtgctaacaagttggatggggttgtgccactggagatcggaggtgccgttgcgctccgacagctgctgatgggtaggaattcacttactggatggattccggtgcagattggcacatgcaaatccttgattgctttggatctatcacacaacaaacttgcaggatcaattcctatatccatgggtaatcttactagtcttcaaacagttgatctctcagataacttgctgaacggcagcttaccgatggagctctcaaaacttgacagcctgcgtttcttcaatgtctctcacaattcgctgtcagggagccttcccaatagtcgcttctttgacagcatcccttattctttcctctccgataatgctggcctttgcagttcacagaagaacagttcctgcaatggtgtcatgccaaagccaattgttttcaaccctaattcttcgtcagacccctggatggatgttgccccaagttccccaagcaaccggcaccagaggaagatgatattgagcatctcaacactcatcgcaattgtgggtggagcagttattgttatcggtgtggtcaccataacagtgctcaacctccgtgcccatgcaacagcttcccgctctgcacttcccacttcattgtcagatgattatcatagccaatcagctgaatctccagaaaatgaggccaagtctgggaagctagtcatgtttggcagaggcagctcggattttagtgctgatgggcatgcgttgttgaataaggattgtgaacttgggcgtggaggctttggtactgtttacaaggcagtgctcagagatggccagccagtggccatcaagaagctgacagtttcaagtatggtcaagtcagagcatgacttcaagcagcacgtcaagcttctaggcaaggtgcggcaccataacattgtcaccctcaaaggcttctactggacttcctcactgcagctccttatatatgaattcattcctgctgggagtttgcatcagcacctccatgagtgctcatacgagagctcgctttcatgggtggagaggtttgacataatcgttggcgtggcccgcgcacttgtgcacttgcatcgctacggtataatccactacaatctgaagtccagcaatgtcttgctagacacgaatggtgagcccagggttggtgattatggtcttgtgaacctgctgccgatgctggatcgctatgtgctcagcagtaagatccagagcgtgctgggatacatggcacctgagttcacttgcacaacggtcaaggtcacggagaagtgcgacatatacagcttcggagtgctagtccttgagattttgtcaggcagaaggcccgtagaatatctggaagatagtgtggttgtgctttctgatcttgtcagtgatgcactcgatgatgacaggctggaggactgcatggatccacggctatcaggtgagttctcgatggtggaggccacactgatcatcaagctgggcctggtctgtgcatctcaggtgccttctcaacgaccggacatggctgaggtggtcagtatgcttgagatggtgaggagtcctcagggtaccccagaggatgatctggtttgagatccatttagggtatgtgtattcgttttcggagccattttcgccaatgccctggcacttcacatctcttcatatcttgctgagattcagtacatatgcggcctgtgccctgcccactgccagagtgctcgacccatcgaccgggtccagttggctgtctggtaagacactaggcagtaggcacgtcggggagtttggcccagcgtggagtgctgtcgtggagtgcggactctcatacacatttgtacattcattaattatactaggtgactgcccgtgcgttgcaacggaaacatataatgttataataacttatgtacaaatgtatgttatattatgaacgcctactttgctctcttatagagtaataaagacttcacctttggatctttacctttggcttaatggagagttttacagggaccgacatgcaaaacctaaagccatatccgcttaaaaaagctagggatcc

SEQ ID NO: 59808 - DNA, 3411 bp, Zea Mays
ccagcagcaagcgcagcagacagcagtgcatctgcgccgcgaaccgccgctccagtccaatcaatggacggacacttcccatgatctcgtcgcccacctcctcttccgccgccgccgccgcggcaatgccgactccctcccgcctcctcttccccgtcctggtcctcctcgccgcgtcggccggggcggccacggccgccaccgtgagcgacgacgtgctcgcgctggtcgtcctcaagtcgggcctcttcgacccggcgggccgcctcgcgccctggtccgaggacgccgaccgcgcctgcgcctggccgggggtctcctgcgactcgcgcacggaccgcgtcgccgcgctcgacctccccgccgcgtcgctcgcgggccgcctcccgcgggccgcgctgctccgcctcgacgcgctcgtctcgctcgcgctcccggggaaccgcctctccggcacgctccctgacgcgctgccccctcgcctccgttctctcgacctctcgggcaacgcgatctcgggcggcatccccgcctcgctcgcgtcctgcgagtcgctcgtgtcgctcaacctctctcgcaatcggctcaccggcccggtccccgatggcatctggtcactgccgtcgctcaggtcggtggacctctccgggaacctgctctccgggagcgtacccggcgggttcccgcggagcagctcgctgcgtgaggtggacctgagccgcaacctgctccaaggggagataccggcggacatcggtgaagccgggctgcttaagtcccttgacctcgggcacaactcgttcaccggcgggctgcccgagtcgctgcgtgggctgtccgggctgagttttctcggcgctggtggcaatgacctatcagaggagctccagccgtggattggggaaatggcggcgctggagagactggatttgtctgccaaccgctttaccggcaccatcccggacgccatttcaggctgcaagaacctggtcgaggtcgacctcagccggaacgcgctcactggggagctcccatggtgggtgtttggggtacctctgcagcgcgtctccgtctctggaaatgcactgtcagggtgggtcaaggttccccgtgatgctgctgccaccctggaagccctggacctttcagccaatgctttcactggtgtgatcccgcctgagatttccacccttgcaagattgcagtacctgaatttgtcctcaaattccatgtcggggcagcttcctgcaagcattgggctgatgctgatgcttgaggtgttggacgtgagtgctaacaagttggatggggttgtgccactggagatcggaggtgccgttgcgctccgacagctgctgatgggtaggaattcacttactggatggattccggtgcagattggcacatgcaaatccttgattgctttggatctatcacacaacaaacttgcaggatcaattcctatatccatgggtaatcttactagtcttcaaacagttgatctctcagataacttgctgaacggcagcttaccgatggagctctcaaaacttgacagcctgcgtttcttcaatgtctctcacaattcgctgtcagggagccttcccaatagtcgcttctttgacagcatcccttattctttcctctccgataatgctggcctttgcagttcacagaagaacagttcctgcaatggtgtcatgccaaagccaattgttttcaaccctaattcttcgtcagacccctggatggatgttgccccaagttccccaagcaaccggcaccagaggaagatgatattgagcatctcaacactcatcgcaattgtgggtggagcagttattgttatcggtgtggtcaccataacagtgctcaacctccgtgcccatgcaacagcttcccgctctgcacttcccacttcattgtcagatgattatcatagccaatcagctgaatctccagaaaatgaggccaagtctgggaagctagtcatgtttggcagaggcagctcggattttagtgctgatgggcatgcgttgttgaataaggattgtgaacttgggcgtggaggctttggtactgtttacaaggcagtgctcagagatggccagccagtggccatcaagaagctgacagtttcaagtatggtcaagtcagagcatgacttcaagcagcacgtcaagcttctaggcaaggtgcggcaccataacattgtcaccctcaaaggcttctactggacttcctcactgcagctccttatatatgaattcattcctgctgggagtttgcatcagcacctccatgagtgctcatacgagagctcgctttcatgggtggagaggtttgacataatcgttggcgtggcccgcgcacttgtgcacttgcatcgctacggtataatccactacaatctgaagtccagcaatgtcttgctagacacgaatggtgagcccagggttggtgattatggtcttgtgaacctgctgccgatgctggatcgctatgtgctcagcagtaagatccagagcgtgctgggatacatggcacctgagttcacttgcacaacggtcaaggtcacggagaagtgcgacatatacagcttcggagtgctagtccttgagattttgtcaggcagaaggcccgtagaatatctggaagatagtgtggttgtgctttctgatcttgtcagtgatgcactcgatgatgacaggctggaggactgcatggatccacggctatcaggtgagttctcgatggtggaggccacactgatcatcaagctgggcctggtctgtgcatctcaggtgccttctcaacgaccggacatggctgaggtggtcagtatgcttgagatggtgaggagtcctcagggtaccccagaggatgatctggtttgagatccatttagggtgcgttcttttgttcaggattgatgccaggattggttccaggtatgtgtattcgttttcggagccattttcgccaatgccctggcacttcacatctcttcatatcttgctgagattcagtacatatgcggcctgtgccctgcccactgccagagtgctcgacccatcgaccgggtccagttggctgtctggtaagacactaggcagtaggcacgtcggggagtttggcccagcgtggagtgctgtcgtggagtgcggactctcatacacatttgtacattcattaattatactaggtgactgcccgtgcgttgcaacggaaacatataatgttataataacttatgtacaaatgtatgttatattatgaacgcctactttgctctcttatagagtaataaagacttcacctttggatctttacctttggcttaatggagagttttacagggaccgacatgcaaaacctaaagccatatccgcttaaaaaagctagggatcc

SEQ ID NO: 59809 - DNA, 3202 bp, Zea Mays
ccagcagcaagcgcagcagacagcagtgcatctgcgccgcgaaccgccgctccagtccaatcaatggacggacacttcccatgatctcgtcgcccacctcctcttccgccgccgccgccgcggcaatgccgactccctcccgcctcctcttccccgtcctggtcctcctcgccgcgtcggccggggcggccacggccgccaccgtgagcgacgacgtgctcgcgctggtcgtcctcaagtcgggcctcttcgacccggcgggccgcctcgcgccctggtccgaggacgccgaccgcgcctgcgcctggccgggggtctcctgcgactcgcgcacggaccgcgtcgccgcgctcgacctccccgccgcgtcgctcgcgggccgcctcccgcgggccgcgctgctccgcctcgacgcgctcgtctcgctcgcgctcccggggaaccgcctctccggcacgctccctgacgcgctgccccctcgcctccgttctctcgacctctcgggcaacgcgatctcgggcggcatccccgcctcgctcgcgtcctgcgagtcgctcgtgtcgctcaacctctctcgcaatcggctcaccggcccggtccccgatggcatctggtcactgccgtcgctcaggtcggtggacctctccgggaacctgctctccgggagcgtacccggcgggttcccgcggagcagctcgctgcgtgaggtggacctgagccgcaacctgctccaaggggagataccggcggacatcggtgaagccgggctgcttaagtcccttgacctcgggcacaactcgttcaccggcgggctgcccgagtcgctgcgtgggctgtccgggctgagttttctcggcgctggtggcaatgacctatcagaggagctccagccgtggattggggaaatggcggcgctggagagactggatttgtctgccaaccgctttaccggcaccatcccggacgccatttcaggctgcaagaacctggtcgaggtcgacctcagccggaacgcgctcactggggagctcccatggtgggtgtttggggtacctctgcagcgcgtctccgtctctggaaatgcactgtcagggtgggtcaaggttccccgtgatgctgctgccaccctggaagccctggacctttcagccaatgctttcactggtgtgatcccgcctgagatttccacccttgcaagattgcagtacctgaatttgtcctcaaattccatgtcggggcagcttcctgcaagcattgggctgatgctgatgcttgaggtgttggacgtgagtgctaacaagttggatggggttgtgccactggagatcggaggtgccgttgcgctccgacagctgctgatgggtaggaattcacttactggatggattccggtgcagattggcacatgcaaatccttgattgctttggatctatcacacaacaaacttgcaggatcaattcctatatccatgggtaatcttactagtcttcaaacagttgatctctcagataacttgctgaacggcagcttaccgatggagctctcaaaacttgacagcctgcgtttcttcaatgtctctcacaattcgctgtcagggagccttcccaatagtcgcttctttgacagcatcccttattctttcctctccgataatgctggcctttgcagttcacagaagaacagttcctgcaatggtgtcatgccaaagccaattgttttcaaccctaattcttcgtcagacccctggatggatgttgccccaagttccccaagcaaccggcaccagaggaagatgatattgagcatctcaacactcatcgcaattgtgggtggagcagttattgttatcggtgtggtcaccataacagtgctcaacctccgtgcccatgcaacagcttcccgctctgcacttcccacttcattgtcagatgattatcatagccaatcagctgaatctccagaaaatgaggccaagtctgggaagctagtcatgtttggcagaggcagctcggattttagtgctgatgggcatgcgttgttgaataaggattgtgaacttgggcgtggaggctttggtactgtttacaaggcagtgctcagagatggccagccagtggccatcaagaagctgacagtttcaagtatggtcaagtcagagcatgacttcaagcagcacgtcaagcttctaggcaaggtgcggcaccataacattgtcaccctcaaaggcttctactggacttcctcactgcagctccttatatatgaattcattcctgctgggagtttgcatcagcacctccatgagtgctcatacgagagctcgctttcatgggtggagaggtttgacataatcgttggcgtggcccgcgcacttgtgcacttgcatcgctacggtataatccactacaatctgaagtccagcaatgtcttgctagacacgaatggtgagcccagggttggtgattatggtcttgtgaacctgctgccgatgctggatcgctatgtgctcagcagtaagatccagagcgtgctgggatacatggcacctgagttcacttgcacaacggtcaaggtcacggagaagtgcgacatatacagcttcggagtgctagtccttgagattttgtcaggcagaaggcccgtagaatatctggaagatagtgtggttgtgctttctgatcttgtcagtgatgcactcgatgatgacaggctggaggactgcatggatccacggctatcaggtatgtgtattcgttttcggagccattttcgccaatgccctggcacttcacatctcttcatatcttgctgagattcagtacatatgcggcctgtgccctgcccactgccagagtgctcgacccatcgaccgggtccagttggctgtctggtaagacactaggcagtaggcacgtcggggagtttggcccagcgtggagtgctgtcgtggagtgcggactctcatacacatttgtacattcattaattatactaggtgactgcccgtgcgttgcaacggaaacatataatgttataataacttatgtacaaatgtatgttatattatgaacgcctactttgctctcttatagagtaataaagacttcacctttggatctttacctttggcttaatggagagttttacagggaccgacatgcaaaacctaaagccatatccgcttaaaaaagctagggatcc

SEQ ID NO: 59810 - DNA, 5657 bp, Zea Mays
atattattttgctagctagctactccatgcatgcaagcagttatataagcatatgtctgcctctacgatcccatccgatggcaatgaggcaatcaaagctgagagcagtgtcggcaaggccgtggttgttactcctttgcctcgcgctagcagccaccgccggcgtaatgcaagctcgcgcccagcctaacagcatcggtaatctcatggggcgcgcgggcgatcgagcacgtattatattatctatctatgatccagtatgcttacgaatagacaactgttgcaggtttcatcagcatcgactgtggtttcccggggacgacgagctacgtggacgacgccacgacgctgccgtacgccccggacgctgcgttcaccgacgccggcgagaaccacaacgtctcgtctgagcacgtcacgccggagctcccgaggatctaccgcgacgtgcgcagcttcgtggacggcgcgcgtaactgctacacgctcccgtcgaccctcgcggtggggctcaacaagtacctcttccgcgccgccttcatgtacggcaactacgacggcctcaaccggccgcccgtcttcgatctctacataggcgtcaacctctggaagacggtgaacctgtcgtcgtcggacccggccgccccagtcatcgcggaggccatcgttgtcgtaccggacgacttcgtccaggtttgcctggtgaacaccggcaccgggacgccgttcatctccgggctggagctgaggcctctcaagaactccatctacccgcaagtgaatgcgacacaggggctggtcctgcaaagcaggcgcaacttcggcccgactgatatgacagacattatcaggtaccctgacgatcaatacgacagattatggacacctatgattattgacgccatcgactggctggtgctatccacgacggaaaaggtgcggaacatatatgatgacctcttcgaggtgccgtcgaaggtgatgcagacggcgatcacgccgcgtgacgctaccagcagcatcaacttctattggaactccaagggctcgtcgcttgggtacataccggtcttccacttctccgaggtgctgcaggcgggcgccggcgttgttcgccagttcaacatcaacatcaacggcaagcggttcacctcccatgattattacacaccacggcacctcgaaagtggctacgtatacggtaccagaccttacaccaaccagatccggtataacgtctccatcgttaagacagacacgtcaacgctcccgcctatcatcaacgccgacgagattttcatcgtcatctctacgaccaacgttggcacggactcggaggacgtctctgctatgaaggctatcaaggcgaagtatcaggtgaagaagaactggatgggagacccgtgcgttgctgggacttttaggtgggatggactgacgtgcagctatgccatttctgatcctccaaaaattactgccctaaacatgtccttcagtggtctgaccggtgacatatcatctgctttcgcaaatctcaaggctgtccaatccttggatttgtcacacaacaacctgacgggctcaatccctagctccctgtcacaactgccgtcactgacaactctagatttgacggggaatcagctcagcggaccaataccctctagtcttctcaaaagaatccaagacggctccttaaacctaatctatgccgataatccagacctttgcaccaacgccggggattcatgtcagacggcgccgcaaggaaagagcaagctagtcatctactacgtcgctgttcctatggctctgatcgtggtggcgttggcagtactgctgtgttgtcttctgcggcggcgaaagacgcgagggctagcggacgtctctgtgaagccccgggacaagactccgacgagccttgcttcaatggcggccgacgaacacagacttagctcgctgcggcttgagaaccgccggttcacatacgaggacctagagatgatcaccgacagcttcaagcgtgtcattggccggggcggctttggatacgtctacgagggcttcttggaggatggcactcaggtggcggtgaagatgaggtctcagtcgtccaatcagggtgccaaggagttcctcacggaggcacagatcttgacacggatccatcacaagaaccttgtctccatggtcggctactgcaaagatggggtgtacatggcgcttgtctacgagtacatgtcagaaggatccctgcaggagcacattgcaggaaaacgcttgacttgggggcagaggcttcgaatcgcattggaatcagcgcaagggctagagtatctgcacaggggctgcaacccgcctctgattcacagggacgtgaagaccagcaacatcctactgaacgcgaaactggaggccaaggttgctgatttcggcatgtcaaaggctctagaccgcgacacctatgcgtccacgaacactcttgttggcacaccaggatacgtcgacccagagtacctggaaacaatgcagccaagcaccaagagcgacgtgtacagtttcggcgtggtgctcctggaactggtcacagggagacctcctatcctgcacagcccacagcccaccagcgtgatccagtgggcacggcagcacctggcgcgcggcgacatcgaggtcgtggtggacgcgtccatgggaggcaaccacgacgtcaacagcgtgtggaaagccgcggaggtcgcgctccagtgcaccgagcaggcgtcggcgcagcgccccaccatgggcgacgtggtggcgcagctcctggagtgcctcgacctcgagaagggccgctccgccaacgaaagtttctgcgacggagacgacagcggctccgcgaccgcgagcttgagccacagcagcgcatttgtgacggggcgtatttttgggacggtgccaatggtggagacaggccctgccacgagacgcgcgctcgtgtgtgtctcactgtctcccctgtcccctctcccgcgtgctcgtctaccttcggctcccccatgggatgagagcgccttcctcgccatggccgcctcccacctgccccccgcagccaccctcgtcaagaagtacccaactctcctccacccgttcggcgccaaaccacacgcccagaggctgatcttcaggtgccgcgcgaccagcagcgagggtgcggacgatggctgggcgtcctttgtggacgagctcaagaggtcgctgcaggtggacccgtccgacgcggtgattagcaacgccggcgcgggtctcacatcaaataacgacctcgtcaccgcgctgccactggaaccctccgctggtccggctgcgggagacgcgaccactgccgctgccggcgcggtgagcgagctcctgggcgtggacgcgtcaggcgcggtggccacccccgaccgcctcctgagctccctgctgcacctggacgcgtccaacccggtggcgagcgtggcgggcggcgcgctgtctcgcctggacgcgctcacgtcgggactgtcggacgcgcagcggtgggcgctgttcgggttcctggccgcgacgtggctgtacctgaccgcgcggcccggggtgctgagcggcgccgtggacatgtacgtgctggcgccgctgcagctggcgctggacagcgtgctgggccggcggagcctcaagatgagcgacttcgtcgtcggcgagcgcatcggggagggctccttcggggtggtgtatgccggcgccgtggtgccgaagaacggcgccgtcgtggaggagcggtccggcaaggccaagacgagcctccagaacgacgacaggtacaaggagaaggtcatactcaagaagatcaaggtcatgacggtgggggcgaaggagtgtggggactacgaggagtggttcaactaccgcgtgtcgagagcggcgccggagtcgtgcgccgacttcctcgggagcttcgtcgccgacaagaacaaggcggagttcgtcaagggcggcaagtggctcgtctggaagtttgagggcgacaggacgctggccaattacctgagcgagcgcggcttcccgtccaacctggagcgtctcatgttcgggcgcgtgctgcagggcctgggcccgctggagcgcgaggcgctggtggtgaagcaggtgatgcggcagctgatcacgtcgctgaagcgcatccacgccacgggcatcgtgcaccgcgacatcaagccgtccaacctcgtcgtgacccgccgcgggcaggtgaagctcatcgacttcggagccgccaccgacctccgcatcggcaagaactacgtgcccgaccgcgcgctgctcgacccggactactgcccgcccgagctctacgtcctccccgaggagacgcccgagcccccgccggagcccatcgccgccatcctctccccgatcctctggcagctgaacagcccggacctgttcgacatgtactcggcggggatagtgctgatgcagatggccataccgacgctgcggacgcagtcggggctcaagaacttcaacgccgagctcaggtccgccggctacgacctcaacaggtggcggcagagcgcgcggcggaggcccgacctgcagatcctggacctcgactccggccgaggctgggacctcgccaccaagctcatctcggagaggggcgccaacggcggtggccgcctgtctgccgcggccgcgttgcgccacccgtattttctcctgggtggcgaccaggccgcggcggtgctgtccaagttctcgctcagtaaatagcatccatccatggcccatggctgggtacctacgacctacgggatatatacacatcggcttattggaatcctccgatcgattcaccatccttgtatattgcgcattattgaatccttgggcataccataccggcagtgggaggcatcccaaattcaaaagggagtcatctggtaactgatgttacaacttttctgtatgggaatgctgtgaacaatgtggtgcagagtttcacacactaactaaccttacattatgctagacagagatcctacttcctttgcttcagttcctcgaatctatgcagatgcagacactcgcagagagagctcatcaactggctgcaaaattctgacctgctccttctttcagccaatcagatgtttggccatgctcgttctgatcctatactgacagacgaatccggccatggatcgcctctactgtcactggcagtacggatcgaacttcttctggagttcttcctggttgcccccgaccagcttgtcgatctccttcatgtctctcatgaagatgaacgttggagttgcgcgtacatcgaattgcgtgaccaattcctggagaaccattttaatgtggtatttaacttaagactcttcttttgttctatggacaaaagtaatagaacaaaatagataaagacagaaatcaatgtgtggaattttgaatattgatgtacgcaccggcagttcgtcgacgtcaatggagaagaaaacaagatcagaatgcttcaaggaaagctcggcgtatagtggagcagcgttcctgcatggtccacaccaagtcgcactgaactttaccacaacctgtacacgcgtggacatgccaacgtatacagttaacctgatgaacagctgaag

SEQ ID NO: 59811 - DNA, 5182 bp, Zea Mays
cgatcccatccgatggcaatgaggcaatcaaagctgagagcagtgtcggcaaggccgtggttgttactcctttgcctcgcgctagcagccaccgccggcgtaatgcaagctcgcgcccagcctaacagcatcggtaatctcatggggcgcgcgggcgatcgagcacgtattatattatctatctatgatccagtatgcttacgaatagacaactgttgcaggtttcatcagcatcgactgtggtttcccggggacgacgagctacgtggacgacgccacgacgctgccgtacgccccggacgctgcgttcaccgacgccggcgagaaccacaacgtctcgtctgagcacgtcacgccggagctcccgaggatctaccgcgacgtgcgcagcttcgtggacggcgcgcgtaactgctacacgctcccgtcgaccctcgcggtggggctcaacaagtacctcttccgcgccgccttcatgtacggcaactacgacggcctcaaccggccgcccgtcttcgatctctacataggcgtcaacctctggaagacggtgaacctgtcgtcgtcggacccggccgccccagtcatcgcggaggccatcgttgtcgtaccggacgacttcgtccaggtttgcctggtgaacaccggcaccgggacgccgttcatctccgggctggagctgaggcctctcaagaactccatctacccgcaagtgaatgcgacacaggggctggtcctgcaaagcaggcgcaacttcggcccgactgatatgacagacattatcagtctctgctatgaaggctatcaaggcgaagtatcaggtgaagaagaactggatgggagacccgtgcgttgctgggacttttaggtgggatggactgacgtgcagctatgccatttctgatcctccaaaaattactgccctaaacatgtccttcagtggtctgaccggtgacatatcatctgctttcgcaaatctcaaggctgtccaatccttggatttgtcacacaacaacctgacgggctcaatccctagctccctgtcacaactgccgtcactgacaactctagatttgacggggaatcagctcagcggaccaataccctctagtcttctcaaaagaatccaagacggctccttaaacctaatctatgccgataatccagacctttgcaccaacgccggggattcatgtcagacggcgccgcaaggaaagagcaagctagtcatctactacgtcgctgttcctatggctctgatcgtggtggcgttggcagtactgctgtgttgtcttctgcggcggcgaaagacgcgagggctagcggacgtctctgtgaagccccgggacaagactccgacgagccttgcttcaatggcggccgacgaacacagacttagctcgctgcggcttgagaaccgccggttcacatacgaggacctagagatgatcaccgacagcttcaagcgtgtcattggccggggcggctttggatacgtctacgagggcttcttggaggatggcactcaggtggcggtgaagatgaggtctcagtcgtccaatcagggtgccaaggagttcctcacggaggcacagatcttgacacggatccatcacaagaaccttgtctccatggtcggctactgcaaagatggggtgtacatggcgcttgtctacgagtacatgtcagaaggatccctgcaggagcacattgcaggaaaacgcttgacttgggggcagaggcttcgaatcgcattggaatcagcgcaagggctagagtatctgcacaggggctgcaacccgcctctgattcacagggacgtgaagaccagcaacatcctactgaacgcgaaactggaggccaaggttgctgatttcggcatgtcaaaggctctagaccgcgacacctatgcgtccacgaacactcttgttggcacaccaggatacgtcgacccagagtacctggaaacaatgcagccaagcaccaagagcgacgtgtacagtttcggcgtggtgctcctggaactggtcacagggagacctcctatcctgcacagcccacagcccaccagcgtgatccagtgggcacggcagcacctggcgcgcggcgacatcgaggtcgtggtggacgcgtccatgggaggcaaccacgacgtcaacagcgtgtggaaagccgcggaggtcgcgctccagtgcaccgagcaggcgtcggcgcagcgccccaccatgggcgacgtggtggcgcagctcctggagtgcctcgacctcgagaagggccgctccgccaacgaaagtttctgcgacggagacgacagcggctccgcgaccgcgagcttgagccacagcagcgcatttgtgacggggcgtatttttgggacggtgccaatggtggagacaggccctgccacgagacgcgcgctcgtgtgtgtctcactgtctcccctgtcccctctcccgcgtgctcgtctaccttcggctcccccatgggatgagagcgccttcctcgccatggccgcctcccacctgccccccgcagccaccctcgtcaagaagtacccaactctcctccacccgttcggcgccaaaccacacgcccagaggctgatcttcaggtgccgcgcgaccagcagcgagggtgcggacgatggctgggcgtcctttgtggacgagctcaagaggtcgctgcaggtggacccgtccgacgcggtgattagcaacgccggcgcgggtctcacatcaaataacgacctcgtcaccgcgctgccactggaaccctccgctggtccggctgcgggagacgcgaccactgccgctgccggcgcggtgagcgagctcctgggcgtggacgcgtcaggcgcggtggccacccccgaccgcctcctgagctccctgctgcacctggacgcgtccaacccggtggcgagcgtggcgggcggcgcgctgtctcgcctggacgcgctcacgtcgggactgtcggacgcgcagcggtgggcgctgttcgggttcctggccgcgacgtggctgtacctgaccgcgcggcccggggtgctgagcggcgccgtggacatgtacgtgctggcgccgctgcagctggcgctggacagcgtgctgggccggcggagcctcaagatgagcgacttcgtcgtcggcgagcgcatcggggagggctccttcggggtggtgtatgccggcgccgtggtgccgaagaacggcgccgtcgtggaggagcggtccggcaaggccaagacgagcctccagaacgacgacaggtacaaggagaaggtcatactcaagaagatcaaggtcatgacggtgggggcgaaggagtgtggggactacgaggagtggttcaactaccgcgtgtcgagagcggcgccggagtcgtgcgccgacttcctcgggagcttcgtcgccgacaagaacaaggcggagttcgtcaagggcggcaagtggctcgtctggaagtttgagggcgacaggacgctggccaattacctgagcgagcgcggcttcccgtccaacctggagcgtctcatgttcgggcgcgtgctgcagggcctgggcccgctggagcgcgaggcgctggtggtgaagcaggtgatgcggcagctgatcacgtcgctgaagcgcatccacgccacgggcatcgtgcaccgcgacatcaagccgtccaacctcgtcgtgacccgccgcgggcaggtgaagctcatcgacttcggagccgccaccgacctccgcatcggcaagaactacgtgcccgaccgcgcgctgctcgacccggactactgcccgcccgagctctacgtcctccccgaggagacgcccgagcccccgccggagcccatcgccgccatcctctccccgatcctctggcaggtggtggcacttctcctcgcgcagtcagcttggcggtgctgttctgtgaccggacactgacagcagcagccatctttgcagctgaacagcccggacctgttcgacatgtactcggcggggatagtgctgatgcagatggccataccgacgctgcggacgcagtcggggctcaagaacttcaacgccgagctcaggtccgccggctacgacctcaacaggtggcggcagagcgcgcggcggaggcccgacctgcagatcctggacctcgactccggccgaggctgggacctcgccaccaagctcatctcggagaggggcgccaacggcggtggccgcctgtctgccgcggccgcgttgcgccacccgtattttctcctgggtggcgaccaggccgcggcggtgctgtccaagttctcgctcagtaaatagcatccatccatggcccatggctgggtacctacgacctacgggatatatacacatcggcttattggaatcctccgatcgattcaccatccttgtatattgcgcattattgaatccttgggcataccataccggcagtgggaggcatcccaaattcaaaagggagtcatctggtaactgatgttacaacttttctgtatgggaatgctgtgaacaatgtggtgcagagtttcacacactaactaaccttacattatgctagacagagatcctacttcctttgcttcagttcctcgaatctatgcagatgcagacactcgcagagagagctcatcaactggctgcaaaattctgacctgctccttctttcagccaatcagatgtttggccatgctcgttctgatcctatactgacagacgaatccggccatggatcgcctctactgtcactggcagtacggatcgaacttcttctggagttcttcctggttgcccccgaccagcttgtcgatctccttcatgtctctcatgaagatgaacgttggagttgcgcgtacatcgaattgcgtgaccaattcctggagaaccattttaatgtggtatttaacttaagactcttcttttgttctatggacaaaagtaatagaacaaaatagataaagacagaaatcaatgtgtggaattttgaatattgatgtacgcaccggcagttcgtcgacgtcaatggagaagaaaacaagatcagaatgcttcaaggaaagctcggcgtatagtggagcagcgttcctgcatggtccacaccaagtcgcactgaactttaccacaacctgtacacgcgtggacatgccaacgtatacagttaacctgatgaacagctgaag

SEQ ID NO: 59812 - DNA, 5537 bp, Zea Mays
atgaggcaatcaaagctgagagcagtgtcggcaaggccgtggttgttactcctttgcctcgcgctagcagccaccgccggcgtaatgcaagctcgcgcccagcctaacagcatcggtaatctcatggggcgcgcgggcgatcgagcacgtttcatcagcatcgactgtggtttcccggggacgacgagctacgtggacgacgccacgacgctgccgtacgccccggacgctgcgttcaccgacgccggcgagaaccacaacgtctcgtctgagcacgtcacgccggagctcccgaggatctaccgcgacgtgcgcagcttcgtggacggcgcgcgtaactgctacacgctcccgtcgaccctcgcggtggggctcaacaagtacctcttccgcgccgccttcatgtacggcaactacgacggcctcaaccggccgcccgtcttcgatctctacataggcgtcaacctctggaagacggtgaacctgtcgtcgtcggacccggccgccccagtcatcgcggaggccatcgttgtcgtaccggacgacttcgtccaggtttgcctggtgaacaccggcaccgggacgccgttcatctccgggctggagctgaggcctctcaagaactccatctacccgcaagtgaatgcgacacaggggctggtcctgcaaagcaggcgcaacttcggcccgactgatatgacagacattatcaggtaccctgacgatcaatacgacagattatggacacctatgattattgacgccatcgactggctggtgctatccacgacggaaaaggtgcggaacatatatgatgacctcttcgaggtgccgtcgaaggtgatgcagacggcgatcacgccgcgtgacgctaccagcagcatcaacttctattggaactccaagggctcgtcgcttgggtacataccggtcttccacttctccgaggtgctgcaggcgggcgccggcgttgttcgccagttcaacatcaacatcaacggcaagcggttcacctcccatgattattacacaccacggcacctcgaaagtggctacgtatacggtaccagaccttacaccaaccagatccggtataacgtctccatcgttaagacagacacgtcaacgctcccgcctatcatcaacgccgacgagattttcatcgtcatctctacgaccaacgttggcacggactcggaggacgtctctgctatgaaggctatcaaggcgaagtatcaggtgaagaagaactggatgggagacccgtgcgttgctgggacttttaggtgggatggactgacgtgcagctatgccatttctgatcctccaaaaattactgccctaaacatgtccttcagtggtctgaccggtgacatatcatctgctttcgcaaatctcaaggctgtccaatccttggatttgtcacacaacaacctgacgggctcaatccctagctccctgtcacaactgccgtcactgacaactctagatttgacggggaatcagctcagcggaccaataccctctagtcttctcaaaagaatccaagacggctccttaaacctaatctatgccgataatccagacctttgcaccaacgccggggattcatgtcagacggcgccgcaaggaaagagcaagctagtcatctactacgtcgctgttcctatggctctgatcgtggtggcgttggcagtactgctgtgttgtcttctgcggcggcgaaagacgcgagggctagcggacgtctctgtgaagccccgggacaagactccgacgagccttgcttcaatggcggccgacgaacacagacttagctcgctgcggcttgagaaccgccggttcacatacgaggacctagagatgatcaccgacagcttcaagcgtgtcattggccggggcggctttggatacgtctacgagggcttcttggaggatggcactcaggtggcggtgaagatgaggtctcagtcgtccaatcagggtgccaaggagttcctcacggaggcacagatcttgacacggatccatcacaagaaccttgtctccatggtcggctactgcaaagatggggtgtacatggcgcttgtctacgagtacatgtcagaaggatccctgcaggagcacattgcaggaaaacgcttgacttgggggcagaggcttcgaatcgcattggaatcagcgcaagggctagagtatctgcacaggggctgcaacccgcctctgattcacagggacgtgaagaccagcaacatcctactgaacgcgaaactggaggccaaggttgctgatttcggcatgtcaaaggctctagaccgcgacacctatgcgtccacgaacactcttgttggcacaccaggatacgtcgacccagagtacctggaaacaatgcagccaagcaccaagagcgacgtgtacagtttcggcgtggtgctcctggaactggtcacagggagacctcctatcctgcacagcccacagcccaccagcgtgatccagtgggcacggcagcacctggcgcgcggcgacatcgaggtcgtggtggacgcgtccatgggaggcaaccacgacgtcaacagcgtgtggaaagccgcggaggtcgcgctccagtgcaccgagcaggcgtcggcgcagcgccccaccatgggcgacgtggtggcgcagctcctggagtgcctcgacctcgagaagggccgctccgccaacgaaagtttctgcgacggagacgacagcggctccgcgaccgcgagcttgagccacagcagcgcatttgtgacggggcgtatttttgggacggtgccaatggtggagacaggccctgccacgagacgcgcgctcgtgtgtgtctcactgtctcccctgtcccctctcccgcgtgctcgtctaccttcggctcccccatgggatgagagcgccttcctcgccatggccgcctcccacctgccccccgcagccaccctcgtcaagaagtacccaactctcctccacccgttcggcgccaaaccacacgcccagaggctgatcttcaggtgccgcgcgaccagcagcgagggtgcggacgatggctgggcgtcctttgtggacgagctcaagaggtcgctgcaggtggacccgtccgacgcggtgattagcaacgccggcgcgggtctcacatcaaataacgacctcgtcaccgcgctgccactggaaccctccgctggtccggctgcgggagacgcgaccactgccgctgccggcgcggtgagcgagctcctgggcgtggacgcgtcaggcgcggtggccacccccgaccgcctcctgagctccctgctgcacctggacgcgtccaacccggtggcgagcgtggcgggcggcgcgctgtctcgcctggacgcgctcacgtcgggactgtcggacgcgcagcggtgggcgctgttcgggttcctggccgcgacgtggctgtacctgaccgcgcggcccggggtgctgagcggcgccgtggacatgtacgtgctggcgccgctgcagctggcgctggacagcgtgctgggccggcggagcctcaagatgagcgacttcgtcgtcggcgagcgcatcggggagggctccttcggggtggtgtatgccggcgccgtggtgccgaagaacggcgccgtcgtggaggagcggtccggcaaggccaagacgagcctccagaacgacgacaggtacaaggagaaggtcatactcaagaagatcaaggtcatgacggtgggggcgaaggagtgtggggactacgaggagtggttcaactaccgcgtgtcgagagcggcgccggagtcgtgcgccgacttcctcgggagcttcgtcgccgacaagaacaaggcggagttcgtcaagggcggcaagtggctcgtctggaagtttgagggcgacaggacgctggccaattacctgagcgagcgcggcttcccgtccaacctggagcgtctcatgttcgggcgcgtgctgcagggcctgggcccgctggagcgcgaggcgctggtggtgaagcaggtgatgcggcagctgatcacgtcgctgaagcgcatccacgccacgggcatcgtgcaccgcgacatcaagccgtccaacctcgtcgtgacccgccgcgggcaggtgaagctcatcgacttcggagccgccaccgacctccgcatcggcaagaactacgtgcccgaccgcgcgctgctcgacccggactactgcccgcccgagctctacgtcctccccgaggagacgcccgagcccccgccggagcccatcgccgccatcctctccccgatcctctggcagcagcagccatctttgcagctgaacagcccggacctgttcgacatgtactcggcggggatagtgctgatgcagatggccataccgacgctgcggacgcagtcggggctcaagaacttcaacgccgagctcaggtccgccggctacgacctcaacaggtggcggcagagcgcgcggcggaggcccgacctgcagatcctggacctcgactccggccgaggctgggacctcgccaccaagctcatctcggagaggggcgccaacggcggtggccgcctgtctgccgcggccgcgttgcgccacccgtattttctcctgggtggcgaccaggccgcggcggtgctgtccaagttctcgctcagtaaatagcatccatccatggcccatggctgggtacctacgacctacgggatatatacacatcggcttattggaatcctccgatcgattcaccatccttgtatattgcgcattattgaatccttgggcataccataccggcagtgggaggcatcccaaattcaaaagggagtcatctggtaactgatgttacaacttttctgtatgggaatgctgtgaacaatgtggtgcagagtttcacacactaactaaccttacattatgctagacagagatcctacttcctttgcttcagttcctcgaatctatgcagatgcagacactcgcagagagagctcatcaactggctgcaaaattctgacctgctccttctttcagccaatcagatgtttggccatgctcgttctgatcctatactgacagacgaatccggccatggatcgcctctactgtcactggcagtacggatcgaacttcttctggagttcttcctggttgcccccgaccagcttgtcgatctccttcatgtctctcatgaagatgaacgttggagttgcgcgtacatcgaattgcgtgaccaattcctggagaaccattttaatgtggtatttaacttaagactcttcttttgttctatggacaaaagtaatagaacaaaatagataaagacagaaatcaatgtgtggaattttgaatattgatgtacgcaccggcagttcgtcgacgtcaatggagaagaaaacaagatcagaatgcttcaaggaaagctcggcgtatagtggagcagcgttcctgcatggtccacaccaagtcgcactgaactttaccacaacctgtacacgcgtggacatgccaacgtatacagttaacctgatgaacagctgaag

SEQ ID NO: 59813 - DNA, 4757 bp, Zea Mays
acggccagcaggtaccctgacgatcaatacgacagattatggacacctatgattattgacgccatcgactggctggtgctatccacgacggaaaaggtgcggaacatatatgatgacctcttcgaggtgccgtcgaaggtgatgcagacggcgatcacgccgcgtgacgctaccagcagcatcaacttctattggaactccaagggctcgtcgcttgggtacataccggtcttccacttctccgaggtgctgcaggcgggcgccggcgttgttcgccagttcaacatcaacatcaacggcaagcggttcacctcccatgattattacacaccacggcacctcgaaagtggctacgtatacggtaccagaccttacaccaaccagatccggtataacgtctccatcgttaagacagacacgtcaacgctcccgcctatcatcaacgccgacgagattttcatcgtcatctctacgaccaacgttggcacggactcggaggacgtctctgctatgaaggctatcaaggcgaagtatcaggtgaagaagaactggatgggagacccgtgcgttgctgggacttttaggtgggatggactgacgtgcagctatgccatttctgatcctccaaaaattactgccctaaacatgtccttcagtggtctgaccggtgacatatcatctgctttcgcaaatctcaaggctgtccaatccttctatgccgataatccagacctttgcaccaacgccggggattcatgtcagacggcgccgcaaggaaagagcaagctagtcatctactacgtcgctgttcctatggctctgatcgtggtggcgttggcagtactgctgtgttgtcttctgcggcggcgaaagacgcgagggctagcggacgtctctgtgaagccccgggacaagactccgacgagccttgcttcaatggcggccgacgaacacagacttagctcgctgcggcttgagaaccgccggttcacatacgaggacctagagatgatcaccgacagcttcaagcgtgtcattggccggggcggctttggatacgtctacgagggcttcttggaggatggcactcaggtggcggtgaagatgaggtctcagtcgtccaatcagggtgccaaggagttcctcacggaggcacagatcttgacacggatccatcacaagaaccttgtctccatggtcggctactgcaaagatggggtgtacatggcgcttgtctacgagtacatgtcagaaggatccctgcaggagcacattgcaggaaaacgcttgacttgggggcagaggcttcgaatcgcattggaatcagcgcaagggctagagtatctgcacaggggctgcaacccgcctctgattcacagggacgtgaagaccagcaacatcctactgaacgcgaaactggaggccaaggttgctgatttcggcatgtcaaaggctctagaccgcgacacctatgcgtccacgaacactcttgttggcacaccaggatacgtcgacccagagtacgtacgtcgtccatgatcatggaattatccataacgtacgtacgatagaaatagaattcagaattacccatacggacgtcgtgcatgcaggtacctggaaacaatgcagccaagcaccaagagcgacgtgtacagtttcggcgtggtgctcctggaactggtcacagggagacctcctatcctgcacagcccacagcccaccagcgtgatccagtgggcacggcagcacctggcgcgcggcgacatcgaggtcgtggtggacgcgtccatgggaggcaaccacgacgtcaacagcgtgtggaaagccgcggaggtcgcgctccagtgcaccgagcaggcgtcggcgcagcgccccaccatgggcgacgtggtggcgcagctcctggagtgcctcgacctcgagaagggccgctccgccaacgaaagtttctgcgacggagacgacagcggctccgcgaccgcgagcttgagccacagcagcgcatttgtgacggggcgtatttttgggacggtgccaatggtggagacaggccctgccacgagacgcgcgctcgtgtgtgtctcactgtctcccctgtcccctctcccgcgtgctcgtctaccttcggctcccccatgggatgagagcgccttcctcgccatggccgcctcccacctgccccccgcagccaccctcgtcaagaagtacccaactctcctccacccgttcggcgccaaaccacacgcccagaggctgatcttcaggtgccgcgcgaccagcagcgagggtgcggacgatggctgggcgtcctttgtggacgagctcaagaggtcgctgcaggtggacccgtccgacgcggtgattagcaacgccggcgcgggtctcacatcaaataacgacctcgtcaccgcgctgccactggaaccctccgctggtccggctgcgggagacgcgaccactgccgctgccggcgcggtgagcgagctcctgggcgtggacgcgtcaggcgcggtggccacccccgaccgcctcctgagctccctgctgcacctggacgcgtccaacccggtggcgagcgtggcgggcggcgcgctgtctcgcctggacgcgctcacgtcgggactgtcggacgcgcagcggtgggcgctgttcgggttcctggccgcgacgtggctgtacctgaccgcgcggcccggggtgctgagcggcgccgtggacatgtacgtgctggcgccgctgcagctggcgctggacagcgtgctgggccggcggagcctcaagatgagcgacttcgtcgtcggcgagcgcatcggggagggctccttcggggtggtgtatgccggcgccgtggtgccgaagaacggcgccgtcgtggaggagcggtccggcaaggccaagacgagcctccagaacgacgacaggtacaaggagaaggtcatactcaagaagatcaaggtcatgacggtgggggcgaaggagtgtggggactacgaggagtggttcaactaccgcgtgtcgagagcggcgccggagtcgtgcgccgacttcctcgggagcttcgtcgccgacaagaacaaggcggagttcgtcaagggcggcaagtggctcgtctggaagtttgagggcgacaggacgctggccaattacctgagcgagcgcggcttcccgtccaacctggagcgtctcatgttcgggcgcgtgctgcagggcctgggcccgctggagcgcgaggcgctggtggtgaagcaggtgatgcggcagctgatcacgtcgctgaagcgcatccacgccacgggcatcgtgcaccgcgacatcaagccgtccaacctcgtcgtgacccgccgcgggcaggtgaagctcatcgacttcggagccgccaccgacctccgcatcggcaagaactacgtgcccgaccgcgcgctgctcgacccggactactgcccgcccgagctctacgtcctccccgaggagacgcccgagcccccgccggagcccatcgccgccatcctctccccgatcctctggcagctgaacagcccggacctgttcgacatgtactcggcggggatagtgctgatgcagatggccataccgacgctgcggacgcagtcggggctcaagaacttcaacgccgagctcaggtccgccggctacgacctcaacaggtggcggcagagcgcgcggcggaggcccgacctgcagatcctggacctcgactccggccgaggctgggacctcgccaccaagctcatctcggagaggggcgccaacggcggtggccgcctgtctgccgcggccgcgttgcgccacccgtattttctcctgggtggcgaccaggccgcggcggtgctgtccaagttctcgctcagtaaatagcatccatccatggcccatggctgggtacctacgacctacgggatatatacacatcggcttattggaatcctccgatcgattcaccatccttgtatattgcgcattattgaatccttgggcataccataccggcagtgggaggcatcccaaattcaaaagggagtcatctggtaactgatgttacaacttttctgtatgggaatgctgtgaacaatgtggtgcagagtttcacacactaactaaccttacattatgctagacagagatcctacttcctttgcttcagttcctcgaatctatgcagatgcagacactcgcagagagagctcatcaactggctgcaaaattctgacctgctccttctttcagccaatcagatgtttggccatgctcgttctgatcctatactgacagacgaatccggccatggatcgcctctactgtcactggcagtacggatcgaacttcttctggagttcttcctggttgcccccgaccagcttgtcgatctccttcatgtctctcatgaagatgaacgttggagttgcgcgtacatcgaattgcgtgaccaattcctggagaaccattttaatgtggtatttaacttaagactcttcttttgttctatggacaaaagtaatagaacaaaatagataaagacagaaatcaatgtgtggaattttgaatattgatgtacgcaccggcagttcgtcgacgtcaatggagaagaaaacaagatcagaatgcttcaaggaaagctcggcgtatagtggagcagcgttcctgcatggtccacaccaagtcgcactgaactttaccacaacctgtacacgcgtggacatgccaacgtatacagttaacctgatgaacagctgaag

SEQ ID NO: 59814 - DNA, 4532 bp, Zea Mays
acggccagcaggtaccctgacgatcaatacgacagattatggacacctatgattattgacgccatcgactggctggtgctatccacgacggaaaaggtgcggaacatatatgatgacctcttcgaggtgccgtcgaaggtgatgcagacggcgatcacgccgcgtgacgctaccagcagcatcaacttctattggaactccaagggctcgtcgcttgggtacataccggtcttccacttctccgaggtgctgcaggcgggcgccggcgttgttcgccagttcaacatcaacatcaacggcaagcggttcacctcccatgattattacacaccacggcacctcgaaagtggctacgtatacggtaccagaccttacaccaaccagatccggtataacgtctccatcgttaagacagacacgtcaacgctcccgcctatcatcaacgccgacgagattttcatcgtcatctctacgaccaacgttggcacggactcggaggacgtctctgctatgaaggctatcaaggcgaagtatcaggtgaagaagaactggatgggagacccgtgcgttgctgggacttttaggtgggatggactgacgtgcagctatgccatttctgatcctccaaaaattactgccctaaacatgtccttcagtggtctgaccggtgacatatcatctgctttcgcaaatctcaaggctgtccaatccttctatgccgataatccagacctttgcaccaacgccggggattcatgtcagacggcgccgcaaggaaagagcaagctagtcatctactacgtcgctgttcctatggctctgatcgtggtggcgttggcagtactgctgtgttgtcttctgcggcggcgaaagacgcgagggctagcggacgtctctgtgaagccccgggacaagactccgacgagccttgcttcaatggcggccgacgaacacagacttagctcgctgcggcttgagaaccgccggttcacatacgaggacctagagatgatcaccgacagcttcaagcgtgtcattggccggggcggctttggatacgtctacgagggcttcttggaggatggcactcaggtggcggtgaagatgaggtctcagtcgtccaatcagggtgccaaggagttcctcacggaggcacagatcttgacacggatccatcacaagaaccttgtctccatggtcggctactgcaaagatggggtgtacatggcgcttgtctacgagtacatgtcagaaggatccctgcaggagcacattgcaggaaaacgcttgacttgggggcagaggcttcgaatcgcattggaatcagcgcaagggctagagtatctgcacaggggctgcaacccgcctctgattcacagggacgtgaagaccagcaacatcctactgaacgcgaaactggaggccaaggttgctgatttcggcatgtcaaaggctctagaccgcgacacctatgcgtccacgaacactcttgttggcacaccaggatacgtcgacccagagtaccacctggcgcgcggcgacatcgaggtcgtggtggacgcgtccatgggaggcaaccacgacgtcaacagcgtgtggaaagccgcggaggtcgcgctccagtgcaccgagcaggcgtcggcgcagcgccccaccatgggcgacgtggtggcgcagctcctggagtgcctcgacctcgagaagggccgctccgccaacgaaagtttctgcgacggagacgacagcggctccgcgaccgcgagcttgagccacagcagcgcatttgtgacggggcgtatttttgggacggtgccaatggtggagacaggccctgccacgagacgcgcgctcgtgtgtgtctcactgtctcccctgtcccctctcccgcgtgctcgtctaccttcggctcccccatgggatgagagcgccttcctcgccatggccgcctcccacctgccccccgcagccaccctcgtcaagaagtacccaactctcctccacccgttcggcgccaaaccacacgcccagaggctgatcttcaggtgccgcgcgaccagcagcgagggtgcggacgatggctgggcgtcctttgtggacgagctcaagaggtcgctgcaggtggacccgtccgacgcggtgattagcaacgccggcgcgggtctcacatcaaataacgacctcgtcaccgcgctgccactggaaccctccgctggtccggctgcgggagacgcgaccactgccgctgccggcgcggtgagcgagctcctgggcgtggacgcgtcaggcgcggtggccacccccgaccgcctcctgagctccctgctgcacctggacgcgtccaacccggtggcgagcgtggcgggcggcgcgctgtctcgcctggacgcgctcacgtcgggactgtcggacgcgcagcggtgggcgctgttcgggttcctggccgcgacgtggctgtacctgaccgcgcggcccggggtgctgagcggcgccgtggacatgtacgtgctggcgccgctgcagctggcgctggacagcgtgctgggccggcggagcctcaagatgagcgacttcgtcgtcggcgagcgcatcggggagggctccttcggggtggtgtatgccggcgccgtggtgccgaagaacggcgccgtcgtggaggagcggtccggcaaggccaagacgagcctccagaacgacgacaggtacaaggagaaggtcatactcaagaagatcaaggtcatgacggtgggggcgaaggagtgtggggactacgaggagtggttcaactaccgcgtgtcgagagcggcgccggagtcgtgcgccgacttcctcgggagcttcgtcgccgacaagaacaaggcggagttcgtcaagggcggcaagtggctcgtctggaagtttgagggcgacaggacgctggccaattacctgagcgagcgcggcttcccgtccaacctggagcgtctcatgttcgggcgcgtgctgcagggcctgggcccgctggagcgcgaggcgctggtggtgaagcaggtgatgcggcagctgatcacgtcgctgaagcgcatccacgccacgggcatcgtgcaccgcgacatcaagccgtccaacctcgtcgtgacccgccgcgggcaggtgaagctcatcgacttcggagccgccaccgacctccgcatcggcaagaactacgtgcccgaccgcgcgctgctcgacccggactactgcccgcccgagctctacgtcctccccgaggagacgcccgagcccccgccggagcccatcgccgccatcctctccccgatcctctggcagctgaacagcccggacctgttcgacatgtactcggcggggatagtgctgatgcagatggccataccgacgctgcggacgcagtcggggctcaagaacttcaacgccgagctcaggtccgccggctacgacctcaacaggtggcggcagagcgcgcggcggaggcccgacctgcagatcctggacctcgactccggccgaggctgggacctcgccaccaagctcatctcggagaggggcgccaacggcggtggccgcctgtctgccgcggccgcgttgcgccacccgtattttctcctgggtggcgaccaggccgcggcggtgctgtccaagttctcgctcagtaaatagcatccatccatggcccatggctgggtacctacgacctacgggatatatacacatcggcttattggaatcctccgatcgattcaccatccttgtatattgcgcattattgaatccttgggcataccataccggcagtgggaggcatcccaaattcaaaagggagtcatctggtaactgatgttacaacttttctgtatgggaatgctgtgaacaatgtggtgcagagtttcacacactaactaaccttacattatgctagacagagatcctacttcctttgcttcagttcctcgaatctatgcagatgcagacactcgcagagagagctcatcaactggctgcaaaattctgacctgctccttctttcagccaatcagatgtttggccatgctcgttctgatcctatactgacagacgaatccggccatggatcgcctctactgtcactggcagtacggatcgaacttcttctggagttcttcctggttgcccccgaccagcttgtcgatctccttcatgtctctcatgaagatgaacgttggagttgcgcgtacatcgaattgcgtgaccaattcctggagaaccattttaatgtggtatttaacttaagactcttcttttgttctatggacaaaagtaatagaacaaaatagataaagacagaaatcaatgtgtggaattttgaatattgatgtacgcaccggcagttcgtcgacgtcaatggagaagaaaacaagatcagaatgcttcaaggaaagctcggcgtatagtggagcagcgttcctgcatggtccacaccaagtcgcactgaactttaccacaacctgtacacgcgtggacatgccaacgtatacagttaacctgatgaacagctgaag

SEQ ID NO: 59815 - DNA, 4586 bp, Zea Mays
acggccagcaggtaccctgacgatcaatacgacagattatggacacctatgattattgacgccatcgactggctggtgctatccacgacggaaaaggtgcggaacatatatgatgacctcttcgaggtgccgtcgaaggtgatgcagacggcgatcacgccgcgtgacgctaccagcagcatcaacttctattggaactccaagggctcgtcgcttgggtacataccggtcttccacttctccgaggtgctgcaggcgggcgccggcgttgttcgccagttcaacatcaacatcaacggcaagcggttcacctcccatgattattacacaccacggcacctcgaaagtggctacgtatacggtaccagaccttacaccaaccagatccggtataacgtctccatcgttaagacagacacgtcaacgctcccgcctatcatcaacgccgacgagattttcatcgtcatctctacgaccaacgttggcacggactcggaggacggtacgtgggatggactgacgtgcagctatgccatttctgatcctccaaaaattactgccctaaacatgtccttcagtggtctgaccggtgacatatcatctgctttcgcaaatctcaaggctgtccaatccttctatgccgataatccagacctttgcaccaacgccggggattcatgtcagacggcgccgcaaggaaagagcaagctagtcatctactacgtcgctgttcctatggctctgatcgtggtggcgttggcagtactgctgtgttgtcttctgcggcggcgaaagacgcgagggctagcggacgtctctgtgaagccccgggacaagactccgacgagccttgcttcaatggcggccgacgaacacagacttagctcgctgcggcttgagaaccgccggttcacatacgaggacctagagatgatcaccgacagcttcaagcgtgtcattggccggggcggctttggatacgtctacgagggcttcttggaggatggcactcaggtggcggtgaagatgaggtctcagtcgtccaatcagggtgccaaggagttcctcacggaggcacagatcttgacacggatccatcacaagaaccttgtctccatggtcggctactgcaaagatggggtgtacatggcgcttgtctacgagtacatgtcagaaggatccctgcaggagcacattgcaggaaaacgcttgacttgggggcagaggcttcgaatcgcattggaatcagcgcaagggctagagtatctgcacaggggctgcaacccgcctctgattcacagggacgtgaagaccagcaacatcctactgaacgcgaaactggaggccaaggttgctgatttcggcatgtcaaaggctctagaccgcgacacctatgcgtccacgaacactcttgttggcacaccaggatacgtcgacccagagtacctggaaacaatgcagccaagcaccaagagcgacgtgtacagtttcggcgtggtgctcctggaactggtcacagggagacctcctatcctgcacagcccacagcccaccagcgtgatccagtgggcacggcagcacctggcgcgcggcgacatcgaggtcgtggtggacgcgtccatgggaggcaaccacgacgtcaacagcgtgtggaaagccgcggaggtcgcgctccagtgcaccgagcaggcgtcggcgcagcgccccaccatgggcgacgtggtggcgcagctcctggagtgcctcgacctcgagaagggccgctccgccaacgaaagtttctgcgacggagacgacagcggctccgcgaccgcgagcttgagccacagcagcgcatttgtgacggggcgtatttttgggacggtgccaatggtggagacaggccctgccacgagacgcgcgctcgtgtgtgtctcactgtctcccctgtcccctctcccgcgtgctcgtctaccttcggctcccccatgggatgagagcgccttcctcgccatggccgcctcccacctgccccccgcagccaccctcgtcaagaagtacccaactctcctccacccgttcggcgccaaaccacacgcccagaggctgatcttcaggtgccgcgcgaccagcagcgagggtgcggacgatggctgggcgtcctttgtggacgagctcaagaggtcgctgcaggtggacccgtccgacgcggtgattagcaacgccggcgcgggtctcacatcaaataacgacctcgtcaccgcgctgccactggaaccctccgctggtccggctgcgggagacgcgaccactgccgctgccggcgcggtgagcgagctcctgggcgtggacgcgtcaggcgcggtggccacccccgaccgcctcctgagctccctgctgcacctggacgcgtccaacccggtggcgagcgtggcgggcggcgcgctgtctcgcctggacgcgctcacgtcgggactgtcggacgcgcagcggtgggcgctgttcgggttcctggccgcgacgtggctgtacctgaccgcgcggcccggggtgctgagcggcgccgtggacatgtacgtgctggcgccgctgcagctggcgctggacagcgtgctgggccggcggagcctcaagatgagcgacttcgtcgtcggcgagcgcatcggggagggctccttcggggtggtgtatgccggcgccgtggtgccgaagaacggcgccgtcgtggaggagcggtccggcaaggccaagacgagcctccagaacgacgacaggtacaaggagaaggtcatactcaagaagatcaaggtcatgacggtgggggcgaaggagtgtggggactacgaggagtggttcaactaccgcgtgtcgagagcggcgccggagtcgtgcgccgacttcctcgggagcttcgtcgccgacaagaacaaggcggagttcgtcaagggcggcaagtggctcgtctggaagtttgagggcgacaggacgctggccaattacctgagcgagcgcggcttcccgtccaacctggagcgtctcatgttcgggcgcgtgctgcagggcctgggcccgctggagcgcgaggcgctggtggtgaagcaggtgatgcggcagctgatcacgtcgctgaagcgcatccacgccacgggcatcgtgcaccgcgacatcaagccgtccaacctcgtcgtgacccgccgcgggcaggtgaagctcatcgacttcggagccgccaccgacctccgcatcggcaagaactacgtgcccgaccgcgcgctgctcgacccggactactgcccgcccgagctctacgtcctccccgaggagacgcccgagcccccgccggagcccatcgccgccatcctctccccgatcctctggcagctgaacagcccggacctgttcgacatgtactcggcggggatagtgctgatgcagatggccataccgacgctgcggacgcagtcggggctcaagaacttcaacgccgagctcaggtccgccggctacgacctcaacaggtggcggcagagcgcgcggcggaggcccgacctgcagatcctggacctcgactccggccgaggctgggacctcgccaccaagctcatctcggagaggggcgccaacggcggtggccgcctgtctgccgcggccgcgttgcgccacccgtattttctcctgggtggcgaccaggccgcggcggtgctgtccaagttctcgctcagtaaatagcatccatccatggcccatggctgggtacctacgacctacgggatatatacacatcggcttattggaatcctccgatcgattcaccatccttgtatattgcgcattattgaatccttgggcataccataccggcagtgggaggcatcccaaattcaaaagggagtcatctggtaactgatgttacaacttttctgtatgggaatgctgtgaacaatgtggtgcagagtttcacacactaactaaccttacattatgctagacagagatcctacttcctttgcttcagttcctcgaatctatgcagatgcagacactcgcagagagagctcatcaactggctgcaaaattctgacctgctccttctttcagccaatcagatgtttggccatgctcgttctgatcctatactgacagacgaatccggccatggatcgcctctactgtcactggcagtacggatcgaacttcttctggagttcttcctggttgcccccgaccagcttgtcgatctccttcatgtctctcatgaagatgaacgttggagttgcgcgtacatcgaattgcgtgaccaattcctggagaaccattttaatgtggtatttaacttaagactcttcttttgttctatggacaaaagtaatagaacaaaatagataaagacagaaatcaatgtgtggaattttgaatattgatgtacgcaccggcagttcgtcgacgtcaatggagaagaaaacaagatcagaatgcttcaaggaaagctcggcgtatagtggagcagcgttcctgcatggtccacaccaagtcgcactgaactttaccacaacctgtacacgcgtggacatgccaacgtatacagttaacctgatgaacagctgaag

SEQ ID NO: 59816 - DNA, 4329 bp, Zea Mays
tgcattatgcatggtctctgctatgaaggctatcaaggcgaagtatcaggtgaagaagaactggatgggagacccgtgcgttgctgggacttttaggtgggatggactgacgtgcagctatgccatttctgatcctccaaaaattactgccctaaacatgtccttcagtggtctgaccggtgacatatcatctgctttcgcaaatctcaaggctgtccaatccttggatttgtcacacaacaacctgacgggctcaatccctagctccctgtcacaactgccgtcactgacaactctagatttgacggggaatcagctcagcggaccaataccctctagtcttctcaaaagaatccaagacggctccttaaacctaatctatgccgataatccagacctttgcaccaacgccggggattcatgtcagacggcgccgcaaggaaagagcaagctagtcatctactacgtcgctgttcctatggctctgatcgtggtggcgttggcagtactgctgtgttgtcttctgcggcggcgaaagacgcgagggctagcggacgtctctgtgaagccccgggacaagactccgacgagccttgcttcaatggcggccgacgaacacagacttagctcgctgcggcttgagaaccgccggttcacatacgaggacctagagatgatcaccgacagcttcaagcgtgtcattggccggggcggctttggatacgtctacgagggcttcttggaggatggcactcaggtggcggtgaagatgaggtctcagtcgtccaatcagggtgccaaggagttcctcacggaggcacagatcttgacacggatccatcacaagaaccttgtctccatggtcggctactgcaaagatggggtgtacatggcgcttgtctacgagtacatgtcagaaggatccctgcaggagcacattgcaggaaaacgcttgacttgggggcagaggcttcgaatcgcattggaatcagcgcaagggctagagtatctgcacaggggctgcaacccgcctctgattcacagggacgtgaagaccagcaacatcctactgaacgcgaaactggaggccaaggttgctgatttcggcatgtcaaaggctctagaccgcgacacctatgcgtccacgaacactcttgttggcacaccaggatacgtcgacccagagtacctggaaacaatgcagccaagcaccaagagcgacgtgtacagtttcggcgtggtgctcctggaactggtcacagggagacctcctatcctgcacagcccacagcccaccagcgtgatccagtgggcacggcagcacctggcgcgcggcgacatcgaggtcgtggtggacgcgtccatgggaggcaaccacgacgtcaacagcgtgtggaaagccgcggaggtcgcgctccagtgcaccgagcaggcgtcggcgcagcgccccaccatgggcgacgtggtggcgcagctcctggagtgcctcgacctcgagaagggccgctccgccaacgaaagtttctgcgacggagacgacagcggctccgcgaccgcgagcttgagccacagcagcgcatttgtgacggggcgtatttttgggacggtgccaatggtggagacaggccctgccacgagacgcgcgctcgtgtgtgtctcactgtctcccctgtcccctctcccgcgtgctcgtctaccttcggctcccccatgggatgagagcgccttcctcgccatggccgcctcccacctgccccccgcagccaccctcgtcaagaagtacccaactctcctccacccgttcggcgccaaaccacacgcccagaggctgatcttcaggtgccgcgcgaccagcagcgagggtgcggacgatggctgggcgtcctttgtggacgagctcaagaggtcgctgcaggtggacccgtccgacgcggtgattagcaacgccggcgcgggtctcacatcaaataacgacctcgtcaccgcgctgccactggaaccctccgctggtccggctgcgggagacgcgaccactgccgctgccggcgcggtgagcgagctcctgggcgtggacgcgtcaggcgcggtggccacccccgaccgcctcctgagctccctgctgcacctggacgcgtccaacccggtggcgagcgtggcgggcggcgcgctgtctcgcctggacgcgctcacgtcgggactgtcggacgcgcagcggtgggcgctgttcgggttcctggccgcgacgtggctgtacctgaccgcgcggcccggggtgctgagcggcgccgtggacatgtacgtgctggcgccgctgcagctggcgctggacagcgtgctgggccggcggagcctcaagatgagcgacttcgtcgtcggcgagcgcatcggggagggctccttcggggtggtgtatgccggcgccgtggtgccgaagaacggcgccgtcgtggaggagcggtccggcaaggccaagacgagcctccagaacgacgacaggtacaaggagaaggtcatactcaagaagatcaaggtcatgacggtgggggcgaaggagtgtggggactacgaggagtggttcaactaccgcgtgtcgagagcggcgccggagtcgtgcgccgacttcctcgggagcttcgtcgccgacaagaacaaggcggagttcgtcaagggcggcaagtggctcgtctggaagtttgagggcgacaggacgctggccaattacctgagcgagcgcggcttcccgtccaacctggagcgtctcatgttcgggcgcgtgctgcagggcctgggcccgctggagcgcgaggcgctggtggtgaagcaggtgatgcggcagctgatcacgtcgctgaagcgcatccacgccacgggcatcgtgcaccgcgacatcaagccgtccaacctcgtcgtgacccgccgcgggcaggtgaagctcatcgacttcggagccgccaccgacctccgcatcggcaagaactacgtgcccgaccgcgcgctgctcgacccggactactgcccgcccgagctctacgtcctccccgaggagacgcccgagcccccgccggagcccatcgccgccatcctctccccgatcctctggcagctgaacagcccggacctgttcgacatgtactcggcggggatagtgctgatgcagatggccataccgacgctgcggacgcagtcggggctcaagaacttcaacgccgagctcaggtccgccggctacgacctcaacaggtggcggcagagcgcgcggcggaggcccgacctgcagatcctggacctcgactccggccgaggctgggacctcgccaccaagctcatctcggagaggggcgccaacggcggtggccgcctgtctgccgcggccgcgttgcgccacccgtattttctcctgggtggcgaccaggccgcggcggtgctgtccaagttctcgctcagtaaatagcatccatccatggcccatggctgggtacctacgacctacgggatatatacacatcggcttattggaatcctccgatcgattcaccatccttgtatattgcgcattattgaatccttgggcataccataccggcagtgggaggcatcccaaattcaaaagggagtcatctggtaactgatgttacaacttttctgtatgggaatgctgtgaacaatgtggtgcagagtttcacacactaactaaccttacattatgctagacagagatcctacttcctttgcttcagttcctcgaatctatgcagatgcagacactcgcagagagagctcatcaactggctgcaaaattctgacctgctccttctttcagccaatcagatgtttggccatgctcgttctgatcctatactgacagacgaatccggccatggatcgcctctactgtcactggcagtacggatcgaacttcttctggagttcttcctggttgcccccgaccagcttgtcgatctccttcatgtctctcatgaagatgaacgttggagttgcgcgtacatcgaattgcgtgaccaattcctggagaaccattttaatgtggtatttaacttaagactcttcttttgttctatggacaaaagtaatagaacaaaatagataaagacagaaatcaatgtgtggaattttgaatattgatgtacgcaccggcagttcgtcgacgtcaatggagaagaaaacaagatcagaatgcttcaaggaaagctcggcgtatagtggagcagcgttcctgcatggtccacaccaagtcgcactgaactttaccacaacctgtacacgcgtggacatgccaacgtatacagttaacctgatgaacagctgaag

SEQ ID NO: 59817 - DNA, 1280 bp, Zea Mays
gctgcagaccttatccaccaacctccggtccacggtgactggccgcaagctcctcctctcccgcaaacacccacgcccactccattgctcctctcctccaacatcgctcacgcggtctcctctccccgctcagctccgctccgctcccggagacacgcaagcttcccgttcccgggaacgcgcactaaagatgcctccagccttcgccgccgcaccttcctcctcgatatgtggcgttcgcatcccaactgtgcgccgtttcgaagcgcaaagcacggtttccacgcccagatttatgcgtaatcgggtggcagcaaaaacacggtctacatcagcttggtccttgaaggctggcttgtgggattctctcagatctggccttttgaagaataatagcagtacagagacagtagagccaccaccagcaccacttgaagtggaagagcctttgcctgtggaaatagtactcctagaaagaacactacctgatggaagcacagaacaaattttattttcttcagccggagatgttgatgtatatgatctccaagccttatgcaataaggtaggatggccacgcaggcctctttcaaagatagcagcctcattaagaaatagctacttggttgctacactatattcaataattagatcttcagaaacagagggagaagagaagaaacagctcattgggatggcacgagcaacctcagaccatgccttcaatgcaacgatttgggatgtccttgttgatccttcataccagggtcagggtcttggtaaagcactcatggagaaagtaattcgtactttgctccagcgagacatcaacaacattacactgtttgcggataacaaagttatagatttctacaagaacctggggttcgaagttgatcctcaaggcatcaagggcatgttctggtaccccagattttagcaccagcagccagatatatcgttcgaggggttgttgtacttgaagcatctccccgttctgaaagggtaattgacaggtcagggctccacgccctgatggatctcgcacttaatatttcatccttggtgagaagctgtaattttcttcaatgctaaaacgaccatgtgatcggctcaactctccgcacccctgttgtaaccataaccccaacaaaacacgctatttgtaatacccgtgtttcatacatgcgctctagactcttgccatctgtatgtaacgtacgctttcaaatttctacattcgaaatggaaaaaaaaactgtatccatcagttatccata

SEQ ID NO: 59818 - DNA, 1290 bp, Zea Mays
cagaccttatccaccaacctccggtccacggtgactggccgcaagctcctcctctcccgcaaacacccacgcccactccattgctcctctcctccaacatcgctcacgcggtctcctctccccgctcagctccgctccgctcccggagacacgcaagcttcccgttcccgggaacgcgcactaaagatgcctccagccttcgccgccgcaccttcctcctcgatatgtggcgttcgcatcccaactgtgcgccgtttcgaagcgcaaagcacggtttccacgcccagatttatgcgtaatcgggtggcagcaaaaacacggtctacatcagcttggtccttgaaggctggcttgtgggattctctcagatctggccttttgaagaataatagcagtacagagacagtagagccaccaccagcaccacttgaagtggaagagcctttgcctgtggaaatagtactcctagaaagaacactacctgatggaagcacagaacaaattttattttcttcagccggagatgttgatgtatatgatctccaagccttatgcaataaggtaggatggccacgcaggcctctttcaaagatagcagcctcattaagaaatagctacttggttgctacactatattcaataattagatcttcagaaacagaagttatttgacagagggagaagagaagaaacagctcattgggatggcacgagcaacctcagaccatgccttcaatgcaacgatttgggatgtccttgttgatccttcataccagggtcagggtcttggtaaagcactcatggagaaagtaattcgtactttgctccagcgagacatcaacaacattacactgtttgcggataacaaagttatagatttctacaagaacctggggttcgaagttgatcctcaaggcatcaagggcatgttctggtaccccagattttagcaccagcagccagatatatcgttcgaggggttgttgtacttgaagcatctccccgttctgaaagggtaattgacaggtcagggctccacgccctgatggatctcgcacttaatatttcatccttggtgagaagctgtaattttcttcaatgctaaaacgaccatgtgatcggctcaactctccgcacccctgttgtaaccataaccccaacaaaacacgctatttgtaatacccgtgtttcatacatgcgctctagactcttgccatctgtatgtaacgtacgctttcaaatttctacattcgaaatggaaaaaaaaactgtatccatcagttatccata

SEQ ID NO: 59819 - DNA, 1369 bp, Zea Mays
gaccttatccaccaacctccggtccacggtgactggccgcaagctcctcctctcccgcaaacacccacgcccactccattgctcctctcctccaacatcgctcacgcggtctcctctccccgctcagctccgctccgctcccggagacacgcaagcttcccgttcccgggaacgcgcactaaagatgcctccagccttcgccgccgcaccttcctcctcgatgtaagcgtctgagcgccgaaccactggccctcaaagcccttgtacttctgtactgctggtgcttgtaaaatatgtgtatatatatttcagatgtggcgttcgcatcccaactgtgcgccgtttcgaagcgcaaagcacggtttccacgcccagatttatgcgtaatcgggtggcagcaaaaacacggtctacatcagcttggtccttgaaggctggcttgtgggattctctcagatctggccttttgaagaataatagcagtacagagacagtagagccaccaccagcaccacttgaagtggaagagcctttgcctgtggaaatagtactcctagaaagaacactacctgatggaagcacagaacaaattttattttcttcagccggagatgttgatgtatatgatctccaagccttatgcaataaggtaggatggccacgcaggcctctttcaaagatagcagcctcattaagaaatagctacttggttgctacactatattcaataattagatcttcagaaacaggacagagggagaagagaagaaacagctcattgggatggcacgagcaacctcagaccatgccttcaatgcaacgatttgggatgtccttgttgatccttcataccagggtcagggtcttggtaaagcactcatggagaaagtaattcgtactttgctccagcgagacatcaacaacattacactgtttgcggataacaaagttatagatttctacaagaacctggggttcgaagttgatcctcaaggcatcaagggcatgttctggtaccccagattttagcaccagcagccagatatatcgttcgaggggttgttgtacttgaagcatctccccgttctgaaagggtaattgacaggtcagggctccacgccctgatggatctcgcacttaatatttcatccttggtgagaagctgtaattttcttcaatgctaaaacgaccatgtgatcggctcaactctccgcacccctgttgtaaccataaccccaacaaaacacgctatttgtaatacccgtgtttcatacatgcgctctagactcttgccatctgtatgtaacgtacgctttcaaatttctacattcgaaatggaaaaaaaaactgtatccatcagttatccata

SEQ ID NO: 59820 - DNA, 1081 bp, Zea Mays
gaccttatccaccaacctccggtccacggtgactggccgcaagctcctcctctcccgcaaacacccacgcccactccattgctcctctcctccaacatcgctcacgcggtctcctctccccgctcagctccgctccgctcccggagacacgcaagcttcccgttcccgggaacgcgcactaaagatgcctccagccttcgccgccgcaccttcctcctcgatatgtggcgttcgcatcccaactgtgcgccgtttcgaagcgcaaagcacggtttccacgcccagatttatgcgtaatcgggtggcagccggagatgttgatgtatatgatctccaagccttatgcaataaggtaggatggccacgcaggcctctttcaaagatagcagcctcattaagaaatagctacttggttgctacactatattcaataattagatcttcagaaacagaagttatttgacagagggagaagagaagaaacagctcattgggatggcacgagcaacctcagaccatgccttcaatgcaacgatttgggatgtccttgttgatccttcataccagggtcagggtcttggtaaagcactcatggagaaagtaattcgtactttgctccagcgagacatcaacaacattacactgtttgcggataacaaagttatagatttctacaagaacctggggttcgaagttgatcctcaaggcatcaagggcatgttctggtaccccagattttagcaccagcagccagatatatcgttcgaggggttgttgtacttgaagcatctccccgttctgaaagggtaattgacaggtcagggctccacgccctgatggatctcgcacttaatatttcatccttggtgagaagctgtaattttcttcaatgctaaaacgaccatgtgatcggctcaactctccgcacccctgttgtaaccataaccccaacaaaacacgctatttgtaatacccgtgtttcatacatgcgctctagactcttgccatctgtatgtaacgtacgctttcaaatttctacattcgaaatggaaaaaaaaactgtatccatcagttatccata

SEQ ID NO: 59821 - DNA, 1331 bp, Zea Mays
gaccttatccaccaacctccggtccacggtgactggccgcaagctcctcctctcccgcaaacacccacgcccactccattgctcctctcctccaacatcgctcacgcggtctcctctccccgctcagctccgctccgctcccggagacacgcaagcttcccgttcccgggaacgcgcactaaagatgcctccagccttcgccgccgcaccttcctcctcgatatgtggcgttcgcatcccaactgtgcgccgtttcgaagcgcaaagcacggtttccacgcccagatttatgcgtaatcgggtggcagcaaaaacacggtctacatcagcttggtccttgaaggctggcttgtgggattctctcagatctggccttttgaagaataatagcagtacagagacagtagagccaccaccagcaccacttgaagtggaagagcctttgcctgtggaaatagtactcctagaaagaacactacctgatggaagcacagaacaaattttattttcttcagccggagatgttgatgtatatgatctccaagccttatgcaataaggtaggatggccacgcaggcctctttcaaagatagcagcctcattaagaaatagctacttggttgctacactatattcaataattagatcttcagaaacagaaattcatttttctagatgatgaacatcttagtgtacttgtagaagttatttgacagagggagaagagaagaaacagctcattgggatggcacgagcaacctcagaccatgccttcaatgcaacgatttgggatgtccttgttgatccttcataccagggtcagggtcttggtaaagcactcatggagaaagtaattcgtactttgctccagcgagacatcaacaacattacactgtttgcggataacaaagttatagatttctacaagaacctggggttcgaagttgatcctcaaggcatcaagggcatgttctggtaccccagattttagcaccagcagccagatatatcgttcgaggggttgttgtacttgaagcatctccccgttctgaaagggtaattgacaggtcagggctccacgccctgatggatctcgcacttaatatttcatccttggtgagaagctgtaattttcttcaatgctaaaacgaccatgtgatcggctcaactctccgcacccctgttgtaaccataaccccaacaaaacacgctatttgtaatacccgtgtttcatacatgcgctctagactcttgccatctgtatgtaacgtacgctttcaaatttctacattcgaaatggaaaaaaaaactgtatccatcagttatccata

SEQ ID NO: 59822 - DNA, 1188 bp, Zea Mays
gaccttatccaccaacctccggtccacggtgactggccgcaagctcctcctctcccgcaaacacccacgcccactccattgctcctctcctccaacatcgctcacgcggtctcctctccccgctcagctccgctccgctcccggagacacgcaagcttcccgttcccgggaacgcgcactaaagatgcctccagccttcgccgccgcaccttcctcctcgatatgtggcgttcgcatcccaactgtgcgccgtttcgaagcgcaaagcacggtttccacgcccagatttatgcgtaatcgggtggcagcaaaaacacggtctacatcagcttggtccttgaaggctggcttgtgggattctctcagatctggccttttgaagaataatagcagtacagagacagtagagccaccaccagcaccacttgaagtggaagagcctttgcctgtggaaatagtactcctagaaagaacactacctgatggaagcacagaacaaattttattttcttcagccggagatgttgatgtatatgatctccaagccttatgcaataagaagttatttgacagagggagaagagaagaaacagctcattgggatggcacgagcaacctcagaccatgccttcaatgcaacgatttgggatgtccttgttgatccttcataccagggtcagggtcttggtaaagcactcatggagaaagtaattcgtactttgctccagcgagacatcaacaacattacactgtttgcggataacaaagttatagatttctacaagaacctggggttcgaagttgatcctcaaggcatcaagggcatgttctggtaccccagattttagcaccagcagccagatatatcgttcgaggggttgttgtacttgaagcatctccccgttctgaaagggtaattgacaggtcagggctccacgccctgatggatctcgcacttaatatttcatccttggtgagaagctgtaattttcttcaatgctaaaacgaccatgtgatcggctcaactctccgcacccctgttgtaaccataaccccaacaaaacacgctatttgtaatacccgtgtttcatacatgcgctctagactcttgccatctgtatgtaacgtacgctttcaaatttctacattcgaaatggaaaaaaaaactgtatccatcagttatccata

SEQ ID NO: 59823 - DNA, 981 bp, Zea Mays
gaccttatccaccaacctccggtccacggtgactggccgcaagctcctcctctcccgcaaacacccacgcccactccattgctcctctcctccaacatcgctcacgcggtctcctctccccgctcagctccgctccgctcccggagacacgcaagcttcccgttcccgggaacgcgcactaaagatgcctccagccttcgccgccgcaccttcctcctcgatatgtggcgttcgcatcccaactgtgcgccgtttcgaagcgcaaagcacggtttccacgcccagatttatgcgtaatcgggtggcagccggagatgttgatgtatatgatctccaagccttatgcaataagaagttatttgacagagggagaagagaagaaacagctcattgggatggcacgagcaacctcagaccatgccttcaatgcaacgatttgggatgtccttgttgatccttcataccagggtcagggtcttggtaaagcactcatggagaaagtaattcgtactttgctccagcgagacatcaacaacattacactgtttgcggataacaaagttatagatttctacaagaacctggggttcgaagttgatcctcaaggcatcaagggcatgttctggtaccccagattttagcaccagcagccagatatatcgttcgaggggttgttgtacttgaagcatctccccgttctgaaagggtaattgacaggtcagggctccacgccctgatggatctcgcacttaatatttcatccttggtgagaagctgtaattttcttcaatgctaaaacgaccatgtgatcggctcaactctccgcacccctgttgtaaccataaccccaacaaaacacgctatttgtaatacccgtgtttcatacatgcgctctagactcttgccatctgtatgtaacgtacgctttcaaatttctacattcgaaatggaaaaaaaaactgtatccatcagttatccata

SEQ ID NO: 59824 - DNA, 1067 bp, Zea Mays
gaccttatccaccaacctccggtccacggtgactggccgcaagctcctcctctcccgcaaacacccacgcccactccattgctcctctcctccaacatcgctcacgcggtctcctctccccgctcagctccgctccgctcccggagacacgcaagcttcccgttcccgggaacgcgcactaaagatgcctccagccttcgccgccgcaccttcctcctcgatatgtggcgttcgcatcccaactgtgcgccgtttcgaagcgcaaagcacggtttccacgcccagatttatgcgtaatcgggtggcagccggagatgttgatgtatatgatctccaagccttatgcaataaggtaggatggccacgcaggcctctttcaaagatagcagcctcattaagaaatagctacttggttgctacactatattcaataattagatcttcagaaacagagggagaagagaagaaacagctcattgggatggcacgagcaacctcagaccatgccttcaatgcaacgatttgggatgtccttgttgatccttcataccagggtcagggtcttggtaaagcactcatggagaaagtaattcgtactttgctccagcgagacatcaacaacattacactgtttgcggataacaaagttatagatttctacaagaacctggggttcgaagttgatcctcaaggcatcaagggcatgttctggtaccccagattttagcaccagcagccagatatatcgttcgaggggttgttgtacttgaagcatctccccgttctgaaagggtaattgacaggtcagggctccacgccctgatggatctcgcacttaatatttcatccttggtgagaagctgtaattttcttcaatgctaaaacgaccatgtgatcggctcaactctccgcacccctgttgtaaccataaccccaacaaaacacgctatttgtaatacccgtgtttcatacatgcgctctagactcttgccatctgtatgtaacgtacgctttcaaatttctacattcgaaatggaaaaaaaaactgtatccatcagttatccata

SEQ ID NO: 59825 - DNA, 3798 bp, Zea Mays
cgcgtagctgcgggagtcgctcttcccgcgggagcgggagctgaagtaagcaagcggataggatcgacaaggaggcaaggagcaacgccgccttctcagtttctcactcgcgtccctctcctgttcctcagcttcgtccagaacttgccttcctccgccgccctttattccaggcttcctgagaagaagagcttttcaattgattatttcaggaggatggctaagtttgcagacgtcctctgtgcagttacactacttgtgttgctcccctgctcggatgttgcattggggcagactactgacccttccgaggtcaatgggctcagggctatcaagggacgattagttgatcctatgcaaaaccttatgaattggaataggggagatccgtgcaggtcaaattggacaggagtcttctgccacaaagtgaatgatgatacatttcttcatgtgacagaattgcagttatttaagaggaatctctcaggaactctggcaccagaggtcagtcttttatctcatctgaaaacactggattttatgtggaacaacttaactggtagcatcccaaaggaaataggcaacatcactacgctcaaacttatacttttgaatggcaatcaactctctggtattttaccttatgagatcggtaaccttcaaagtttaaacagattacaggttgaccaaaaccaattgtccggccccatacctaaatcattttccaatttaagaagtgtgaaacatcttcatatgaacaataattcgttaagtggggccatcccgtctgaactttccacattgcctcttcttcttcacctgcttgttgacaataacaacctatctggacctctccctccagaatttgctgaagcgcctgccatgaaaatatttcaggctgataacaataacttcagtggaagttccatccctactacatataacaacatatccacactactaaagctgagtcttagaaattgcagcttgcaaggagatattccagatttgagtagcatacctcaacttggctatttggatattagctggaaccagttgacaggatctataccaactaataagctcgcttccaatatcactacaattgatttgtcgcacaacatgctcaatggaactatcccacagaacttctcagggctccccaagcttcagatattgtcacttgaggataattatctaaatggttctgttccctcgacaatctggaatggcatcgagcttactggaaatagaagccttattctagacttccaaaacaattctctcaagacaattccggacacatttgatcctcccccaaataccactgtaattcggacttcgtctgaagagtccaggaatcacagattttcgtccctatgaagatgactttgagatcaacttaacctctttattgcaactgtttcggtatcagttaagtattgaacgctacatatgggaggttggtccaaggctaaatatgcacatgaagttatttccaagtaattcaagtctattcaatatatctgagattgtgcgactcagacatgtacttgctggctgggaaattaccctttcagatgtatttggtccatatgagcttctcaacttcacactaggttcttatgcagatgaatttccaaatgcagtgtcaacaggtttaagtaaggctgcactgggcagtatctttgctagcacaattgctggcgctattttactttctgtggtagctaccacccttatagtgagaaggcgttcaagacacagaactgtctcaaaacgttcattgtcaaggttttctgtcaaagttgatggcgttagatgtttcacatttgaagaaatggctatagcaacaaataattttgatctatcagcccaagttggccaaggaggttacggcaaagtctacaagggaattctaggcgatggagcacttgtagcaatcaaacgagcacacgaggattcccttcaaggttcaagggagttctgcacggagatagagctactatcaagattgcatcatcgcaatttggtttcattggttggctattgcgatgaagaggatgagcaggtggaaccttttgattttaattatatatatatagttcgtcacagtgtcggagcacccgttatggcgtagtatggcggccgccatacctaaagtagatgtgtagtgtagtggttattgtgtaacatgtgtgtgcaagaggttacaggtttgaatcttcccattacacaataccctttcctccattttttgttctccacggccatagctcatttttaccctgtgctccgccactggtttgtcttcgtcagcatccctgaactgctcctcaaatctcgttttgcagatgctggtttatgaattcatgtcaaatggcactttacgtgatcatctttctgccaagtccaagagacctctaagttttggtttgaggttgaaaatcgcattgggtgctgcaaagggaattttgtatctacatactgaagcagatccacctatattccaccgtgatgttaaggccagcaacattctgttggactccaaattcgttgcaaaggtagccgattttggtctctcgaggcttgctccagtgccagatgtcgaagggacattgccagctcacgtatccactgttgtcaagggcaccccaggctatcttgatccggaatacttcctaactcacaaactgaccgacaagagtgatgtttacagcctgggtgtcgtgttccttgaaatgttaactggtatgaaaccaattgagcatggtaaaaacatagtgagagaggtatgcacttcttcagtaaactcagcttgccagtcgggcgcagtttctggaataatcgatggccggatgggcttataccccccagaatgcatcaagaggttcttatcactagcaaccaagtgttgccaggatgaaactgatgacaggccttccatgtgggagattgtcagagaacttgagctcatcttgaggatgatgcctgaagaggacctgattctgctggaaacctcagaaacagactcgaccgatgtcagtaagtcgttgtcatcttcagcgaccaggaccctcttcgtctcgtcacaggcctctgggagtcttgatgcgagcagcggcatgatctctggaagagtaactccccggtaggcatggtgtaatacttgtgaatatgcaagtttgttctgtaacattataggcttaccactcctaggacctgtcttttatgaattattcatattcagccgaacgtacagtagataatagcttatgatacactggaacatagctggcattgcattctttacctttctaatatgttaatctgctttctgtaaggtagcgtttggttccagacccagtttgggatggaacagctccatagctccatctccgggagtggctccatactaaagattttggagagccaaatggttcaacatttgagcataattttccatttttagaactgctctgtcctatatggaactgatctaaacaacaacaaattaggagcggagtgactctgtcccacgttagcatttggtttcagagctaattgggatggaacggttctgttcccgggagcagctccgtccggaatattctggagagctaaatggttcaacattttagcataattttctgtttttagaactactccatcctatatggaaccaatccaaacaacaacaaattaggaacgaagcggctccgtacttcggcaactttgagtgctgacatgtttaaggtcaattctttgtttagaagtaacaaggttttttttatagaa

SEQ ID NO: 59826 - DNA, 1433 bp, Zea Mays
gcgcagggtcaggagaggcagaggcctcagagatacgccgggacgcaacacgtcgtgccgcgcggagggttttgccgagattttccctcaaaagggtattgccacccgcaccgagaaaagaaaacgatacacaccgcgataaaaacataccctctccatcctctcctcttcttcctcctcccgtagcggcttcccccgatttgcacccgggcgcggccccatccccacctggccgccgcgcgccgccatggacggcctgcacggtacggacgcatgcttctcccccgcgagggctatctcgccgcaggtgaggccccccgggccgccggacgtaggcagtcagtacctggcggagctgctgcaggagcaccagaagctggggcccttcatgcaggtgctcccaatctgcagcaggctgctgaatcaagaaatagtgcgggtgtcgaatatacggcgccaacatggtgttgctggcgactttgagaggtttccagccgcaagccccaaccagatgcatccggcaccccccatgacaaacttttgtggaaacggttttagtccatggaatgggatgcattcagaggtgttccgcaaggagctatgggttggcaaggacccccacagagcccctcttcttatattgtcaagaagattttgcggttggaagtaccgacagaagcataccctaatttcaattttatcggccgtcttcttggaccaaggggaaactctttaaagaggattgaagcctccacaggctgtcgtgttttcatcagagggaaaggctcaattaaagattctggcaaggaggaacaactcaagggaagacctggctatgaacacttgagtgaacccctccatatcttgattgaagctgagttacctgctaatgtgattgatgcaagacttgcaaaggcacaagagatccttgaagagctgttgaaaccagtggacgaatcacaagactactacaagagacagcaactgcgagaacttgcaatgctaaattcgccactccgagaggagagtccacatccaggtggtgctcctcctagtcccttcagtaacggcggcatgaaaagagtgaaacaatgacaccgccgaggctcgttcctccatcttgactccccagcaaccccaatgcagtccataccttcacaccctatttttcaatgagcaagctttcatgacggtgttggtagtgtgtgacattcttcactgtactagcaggtgaattttgatctcccatcccatgttacattaaccttgagtgacagatgactatgcgtagtgtatcctctatggcagtataactagaacatttgatttatttgttactggtaatgctgagatatagtactgtgcagattctgagttacggtgaactagtgtgccggtatttatctcaattttgtttgcttttcaattttaac

SEQ ID NO: 59827 - DNA, 991 bp, Zea Mays
caaggattaagatccatggcatcttaatatgcctttactcatcacgtttatctatcaaggctttcacaaaatagagtcggctttcaaagagtacgaagtatgcagactcttatatattagatataaggcaacagagagtaggtgttccgcaaggagctatgggttggcaaggacccccacagagcccctcttcttatattgtcaagaagattttgcggttggaagtaccgacagaagcataccctaatttcaattttatcggccgtcttcttggaccaaggggaaactctttaaagaggattgaagcctccacaggctgtcgtgttttcatcagagggaaaggctcaattaaagattctggcaaggaggaacaactcaagggaagacctggctatgaacacttgagtgaacccctccatatcttgattgaagctgagttacctgctaatgtgattgatgcaagacttgcaaaggcacaagagatccttgaagagctgttgaaaccagtggacgaatcacaagactactacaagagacagcaactgcgagaacttgcaatgctaaattcgccactccgagaggagagtccacatccaggtggtgctcctcctagtcccttcagtaacggcggcatgaaaagagtgaaacaatgacaccgccgaggctcgttcctccatcttgactccccagcaaccccaatgcagtccataccttcacaccctatttttcaatgagcaagctttcatgacggtgttggtagtgtgtgacattcttcactgtactagcaggtgaattttgatctcccatcccatgttacattaaccttgagtgacagatgactatgcgtagtgtatcctctatggcagtataactagaacatttgatttatttgttactggtaatgctgagatatagtactgtgcagattctgagttacggtgaactagtgtgccggtatttatctcaattttgtttgcttttcaattttaac

SEQ ID NO: 59828 - DNA, 914 bp, Zea Mays
atttctatcttattttttttttcagttttctcatctgtaagtggatgatcagaacctagagtaggtgttccgcaaggagctatgggttggcaaggacccccacagagcccctcttcttatattgtcaagaagattttgcggttggaagtaccgacagaagcataccctaatttcaattttatcggccgtcttcttggaccaaggggaaactctttaaagaggattgaagcctccacaggctgtcgtgttttcatcagagggaaaggctcaattaaagattctggcaaggaggaacaactcaagggaagacctggctatgaacacttgagtgaacccctccatatcttgattgaagctgagttacctgctaatgtgattgatgcaagacttgcaaaggcacaagagatccttgaagagctgttgaaaccagtggacgaatcacaagactactacaagagacagcaactgcgagaacttgcaatgctaaattcgccactccgagaggagagtccacatccaggtggtgctcctcctagtcccttcagtaacggcggcatgaaaagagtgaaacaatgacaccgccgaggctcgttcctccatcttgactccccagcaaccccaatgcagtccataccttcacaccctatttttcaatgagcaagctttcatgacggtgttggtagtgtgtgacattcttcactgtactagcaggtgaattttgatctcccatcccatgttacattaaccttgagtgacagatgactatgcgtagtgtatcctctatggcagtataactagaacatttgatttatttgttactggtaatgctgagatatagtactgtgcagattctgagttacggtgaactagtgtgccggtatttatctcaattttgtttgcttttcaattttaac

SEQ ID NO: 59829 - DNA, 925 bp, Zea Mays
atttaggctggttaaaaaactccccttgccagcaaagttggagcctagggattttctccgccagcaagagagtaggtgttccgcaaggagctatgggttggcaaggacccccacagagcccctcttcttatattgtcaagaagattttgcggttggaagtaccgacagaagcataccctaatttcaattttatcggccgtcttcttggaccaaggggaaactctttaaagaggattgaagcctccacaggctgtcgtgttttcatcagagggaaaggctcaattaaagattctggcaaggaggaacaactcaagggaagacctggctatgaacacttgagtgaacccctccatatcttgattgaagctgagttacctgctaatgtgattgatgcaagacttgcaaaggcacaagagatccttgaagagctgttgaaaccagtggacgaatcacaagactactacaagagacagcaactgcgagaacttgcaatgctaaattcgccactccgagaggagagtccacatccaggtggtgctcctcctagtcccttcagtaacggcggcatgaaaagagtgaaacaatgacaccgccgaggctcgttcctccatcttgactccccagcaaccccaatgcagtccataccttcacaccctatttttcaatgagcaagctttcatgacggtgttggtagtgtgtgacattcttcactgtactagcaggtgaattttgatctcccatcccatgttacattaaccttgagtgacagatgactatgcgtagtgtatcctctatggcagtataactagaacatttgatttatttgttactggtaatgctgagatatagtactgtgcagattctgagttacggtgaactagtgtgccggtatttatctcaattttgtttgcttttcaattttaac

SEQ ID NO: 59830 - DNA, 1553 bp, Zea Mays
cttgagggtacccctaattatggtccccgacaatatctttaccaagccacttgatgaactatcttttaccaaacttaggcatgagctcaatattcttgattccaggaacttcttttgctaatttgcacacatagcttataaatatacctttgatcatgtctcttttatatatgctatgactaatgtgttttcaagtgtatttcaccaagtcataggtatattgaaagggaattggagtcttcggcgaagacaaaggcttccactccactttactactcatccttcgccggcgctccgcttcactctccgtctttggtataatcttcactcatatgttttccttgccaaaagggagatagtggttagagaagggcctatatttcattccaagtatccgtttttggcgattcatgccaaagggggagaaaatatgagcccaaagcaaaaggaccgcaccactaccctaattttaaaattaatgattttcaatttgtaaatttcaaattggtatctctttgtgttttaaagggggagcaagtagtactttcaaaacttgatatcttaaaactctgttgaacactaagaggagaatttatttgagggggagttttgtttagtcaaaaggaaaagcatttgaaacaaaaagaaaaaatttcttaaaaatgcttctcaaaatcctatttatttacctttgactatttgcaaaagtctttgaaaaggatttacaaaaaaaagaatttgcaaaaacaaaacatgtggtgcaagcgtggtccaaaatattaaaaataaaaaaacaatccatgcacatctagtaagtaacatttattggctcaattccaagcaacctttgcacttacattatgcaagctagttcaattatgcacttttatatttgctttggtttgtgttgacatcaatcaccaaaaagggggagattgaaagggaattaggcttacacctaatccctaattaattttggtggttgaattgcccaacacaaatatttggactaactagtttgctctaatgtataagctatacaggtgccaaaggttcacacttagccaataaaaagaccaagtattgggttcaacaaaagagcaaagagacaaccgaaggcacctctggtctggcgcaccggacatgtccggtgcaccaccggacatgtccggtgcaccagaggactccaactcaaactcgtcaccttcgggaaattccagaggcaactccgctataattcaccggactgtccggtgtacaccggacatgtccggtgctccaaggaagagcggcctccagaactcgccagcctcgggaattcatttcagctgctccgctataattcaccggactgtccggtgtaacagcggggcaacggctacttttggcgccaacggctacctgcggcgcatttaatgcgcgccagcgcacgcagaggtcaggcacgcccatgctggtgcatcggacaccctacagtacatgtccggtgcgccaccggacatctaggcgggcccagaagtcagagctccaacggtcggaacccaacggctttg

SEQ ID NO: 59831 - DNA, 2127 bp, Zea Mays
aatttgtagtgtgccactgttccgcgtcttttctattatataaaagctgaccagtgaccagcatcgggaggagcccggccgcctagggaagcgagaagcacacacagagaagtttcttcctagagagagagggagagagacaagcgcgcgcatggccgccatggagtacagcagcctcttgcctctggcgctgctggcagggtggtgcgccctcgcggcggcgctagtcctggccatttctgcgtggctgcagcggccgcgccgcgtcgcagaggccttccgtcggcagggcgtggacggcccgccgccgtcgtcgttcctgtcgggtaacctctcggagatgcaggcgagggcggccgccgcggcggtggcggaggccgccggcggccgggacttccagaaggaaggcttcgacgactactgcatgaagatcttcccctacttcgagaagtggaggaaagcctacggcgagacgtacctgtactggctacgccgccggccggcgctgtacgtgtcggacccggagctgatccgcgagatcgggcgttgcgtgtcgctggacatgggcaagcccacctacctgcagaagggccaggagcccctctttggccgcggcgtcctcaaggccaacggcgccgactggcatcgccagcgcaagctcatcgcccccgagttctacatggcaaaggtcaagggcatggtggagctgatggtggacgcggcgcagccgctgctgacgtcgtgggaggacaaggtcgccgccgcgccgggcggcgtcgcggagctcgacgtggacgaggacatccggagcttctccttcgacgtcatctccagggcctgcttcgggggcgactactccagggggcgggagatcttcctccggctcagggcgctgtcgggcctcatgtccgagaccagcgtcatcttcaccatcccgtcgctcaggcacctgcccacgaggaagaaccggaggatctggaagctcacgcacgagatccggtcgctgatcctgcagctggcgagcgagcgcaaggcggcagcggcggcgctggcgcccggccgcgacttcctgggctccatcatcgacagcagccgggaccagccgcgcgcggacgacttcgtcgtggacaactgcaagaacatctacttcgcgggccacgagacgagcgcggtcaccgcgacgtggtgcctcatgctcctcgccgcgcacccggagtggcaggaccgcgcgcgcgccgaggcgctcggcgtctgcggcgccgcggcggcgccggacttcgacgcggtcgccaggatgaagacgctgcacgcggtggtcctggagacgctgcgcctcttcccgccgtcgtcgttcgtggtgcgtgaggtgttccgcgacatgcagctcggcaggctccgcgcgcccaagggcacctacctcttcgtccccgtctccaccatgcaccacgacgccgccgtctggggccccaccgctcgacgcttcgaccccggcaggttccgcgacggcgtggcggccgcgtgcaagcacccgcaggcgttcatgcccttcggcctcggcgcgcgcacctgcctcggccagaacctcgcgctcgtcgaggtcaaggtgctcgtggcgctcgtcctcgcgcgcttctcgcttgcgctgtcgccggactacaggcacgcccccgcattccggttcatcatcgagccggagttcgggctgcgcctcctcctgcgccgccgcctcggccactgatgctgatacgggagtgcgagtagagatgttcagatgtttggagttgcgttttgtaaaaaggcgtacactagctaacgtgaaaaaaaaagtaagtgcgtgcaccgttgaacacacaagcaacaaacaacaacaagaaggttatacgtacatgaaggacggtaataaaatcccacaggttgctaggttaaaatcacgaaagcgcatagtggaggctgcgacgaattcaacatttagcccatcaagtgtgcaaatgaactcatacctataaccagtttgggactcgggagggctcctgcctcctgctactgtcaaacggcacctaaaaacagctcctaatgaagtaaagagcactagtgttggggacttgttctcaaatgctatgaattaat

SEQ ID NO: 59832 - DNA, 1523 bp, Zea Mays
atttcctttcatccatctccgtatggaccgtatccctgtctctctctcttctccccctcccccccaatctccgaggcgagctcgagctcccaaaccctaggcctcactggggagtcacctccgccactccagcgatgtctctcgccgcagcggcttgacggtgcctgcccccaaatctacctctccgttagagagcgcggcgtggttgctgcgtgaggcgcaccggggtctgcaaatggagccgaggcgcatatcggcgagcccgcgcccatgcagcgggcggcgggtagtggccaggaagaggccgaggcaggaggcggtggtgagcagtgtgcggaagctgcagcgccgggagatcagctcccgccgcgaccgcaccttcaccatgagcgccgcgcaggagcgcttccgcaacatacagctgcaggaagagtttgacactcatgatccaaaggagaacgcttcactactcccttacttgaggaaaaggtcaaaaatcattgagatagttgcagcgcgtgatatagtctttgctttatcacagtcaggagtatgtgctgcttttagtagagagacaaatcggagaatatgctttctgaatggaagtccagatgaagttatccgcagtttattttacaacaagaataatgattcactcattactgtatcagtatatggttctgaaaacttcagtgctctgcgatgcagaacaactcgaatagagtatgctttgtcaatgcaattgtttttttatcacgtcatctttcttaaatttccccaaccattcaaggtacgttcggcgaggacaaccggatgctggtttccctctttttgagtccgagtccttgaaatggcctggatttgtagagtttgacgatgtcaatggaagggttttgacttactctgctcaagacagcacttacaaggtgtttgatttgaaaaactacacattactgtatttggtgtctgataagaatgttcaagaaataaagatcagccctgggataatgctattgatttatgcaagaacaagcagctcggttcctctgaagattctttccattgatgatggtacagtcttgaagtccttcagccacctcctccatcgtaacaagaaggtagattttattgagcagttcaatgaaaagcttctggtcaagcaggaaggagagaacctccaaattcttgatgtaaggaacttccaattgacagaagtgagcagaactgagtttatgactccatccgcctttatttttctacatgagctgcaactgttcttgacattccggaatcgagcagtatcagtttggaactttcgaggtgaactggtcacgtcatttgaagatcacctgttgtggcaccccgactgcaacacaaacaacatatacatcacaagcgatcaagatcttattatctcgtactgcaaggctgactcaactgattcaacttcagaagaaaatggtctcctggttatcttcttttggtttttcttcactgccagctagatcgtgtttcatctttca

SEQ ID NO: 59833 - DNA, 1813 bp, Zea Mays
atttcctttcatccatctccgtatggaccgtatccctgtctctctctcttctccccctcccccccaatctccgaggcgagctcgagctcccaaaccctaggcctcactggggagtcacctccgccactccagcgatgtctctcgccgcagcggcttgacggtgcctgcccccaaatctacctctccgttagagagcgcggcgtggttgctgcgtgaggcgcaccggggtctgcaaatggagccgaggcgcatatcggcgagcccgcgcccatgcagcgggcggcgggtagtggccaggaagaggccgaggcaggaggcggtggtgagcagtgtgcggaagctgcagcgccgggagatcagctcccgccgcgaccgcaccttcaccatgagcgccgcgcaggagcgcttccgcaacatacagctgcaggaagagtttgacactcatgatccaaaggagaacgcttcactactcccttacttgaggaaaaggtcaaaaatcattgagatagttgcagcgcgtgatatagtctttgctttatcacagtcaggagtatgtgctgcttttagtagagagacaaatcggagaatatgctttctgaatggaagtccagatgaagttatccgcagtttattttacaacaagaataatgattcactcattactgtatcagtatatggttctgaaaacttcagtgctctgcgatgcagaacaactcgaatagagtacgttcggcgaggacaaccggatgctggtttccctctttttgagtccgagtccttgaaatggcctggatttgtagagtttgacgatgtcaatggaagggttttgacttactctgctcaagacagccctgggataatgctattgatttatgcaagaacaagcagctcggttcctctgaagattctttccattgatgatggtacagtcttgaagtccttcagccacctcctccatcgtaacaagaaggtagattttattgagcagttcaatgaaaagcttctggtcaagcaggaaggagagaacctccaaattcttgatgtaaggaacttccaattgacagaagtgagcagaactgagtttatgactccatccgcctttatttttctacatgagctgcaactgttcttgacattccggaatcgagcagtatcagtttggaactttcgaggtgaactggtcacgtcatttgaagatcacctgttgtggcaccccgactgcaacacaaacaacatatacatcacaagcgatcaagatcttattatctcgtactgcaaggctgactcaactgattcaacttcagaagaaaatgctggctctataaacataagcagcatactgtccgggaaatgcctggcaaaaataaacactggaaactccaatgcttgcaaggaaagaaagaaggcgtggaagttccggaacacagtctcggaggcccttgaggacatcacggctctgtactacgacgaggatcgcgacgagatctacactggcaaccggcacggccttgtccatgtgtggtcgagctgaaagctgaaactgcggggcggctttcaaccgtagcacggtgatctggtcttcacctgtgcgcgtattaacagctactagtgcctcacgtggcacgggggtggggggcacgaaagagggaccccccaagccactcaagtgacagttcttatttatctcagcatgccaagagcactgtccatcattctgaaatcagaggccccccagatctgttgtaacggacgtaccttgcaagtaatgaaatccattcgttgatctgaaatgctctcgctgtttatatctaat

SEQ ID NO: 59834 - DNA, 990 bp, Zea Mays
ataacatgttttttaaacttatttattcacaatggaagaaataagacaagaaatttaacattcaaatatatccggggtctacctacgccacctattagaattacatactagtaacgggggcgcgctttgcgcgcgcgcatcagatttatacaaaataaaatatagctaggtgaacactggtagagggtaatatgtttgttgcaatatctgaagctgccttgttatatttacatgaaatgttttcagaagagttgagcagttatatataattacacagagagcattctactacctaaaacgctgctgataatatgagaaaatcttcagttcttggaaggtctggtgtccggcttttctttgatgcgcagaggtccatgtttgaacctgtatagttgggaaacaaagaattttaatgtctttgtttatggaagcaaaggagaaagggatggaagtgttcagcataaatggaataatgcttttataatagatagaaaataatacatgtaggatattgtatagcagagtataacttttttggtgaagattcaattataattgctggaccttttcccttgtggtcaagtatcgcatcatgttgtatatatgtaaaaattatttataaagaagtgtcaagaaggtaatggtatttgttaaatgtaaataaaagtgtgaagcagtattatatataattgttgttatatataagtgtgtacctctatgtttccttcgtcgatatcgtcgttttctgcatcagtaatatcaatgctagttggtctgtgaatatagaacaaatgtaatacaatgagtcaccttccttagctccaatgagtctaataatgaaatcttcactttcattattagatagacggtctcttgccatgcgatttttttgcgaatggattgtgatcgtctagcatcttaattaatccattgactatatcagaatccaaattatcttggctattgatttcatcttctaggcaattcatt

SEQ ID NO: 59835 - DNA, 1143 bp, Zea Mays
gtttgattttgcccaaaaaagttcgcgcaggattaattgaattaaggatttgcacttttgcagagaaaaaatggcacaatgttagcaaggtctttttaataaggataatcacggcctacttaaaaaagaggtattcgtatatcacattacctttaagtgattgtatgtactcattggtgaaataggcacactgtgaagtcgtcgttgtagtcatcattgagtctttttttaacaaaagaagtaaggtaattagaatttttatttatttattcatgaaggaattgtaaccacgttttatgccatcacatttggttaagttggcattacctcttctgccgagtctattttggttaggtaacactcttcgggttttccgtgcttctacaacatttgtgggtagtggtatatacggagtaaaagagtctgaaaacagaggccatctaccaagtcaataactgactgttttctatattcattatttaatctgctacgaatgtgcaagataagaacatactgtgtttccttttgttcacgcgtttgttgttgctgctttctgcatctgtcgtttggggattcattattttttaattaagttatactcgtaacctgttattgttcaatgacctttaattaagtaggaataggaattcaacaggcaaagagaaataaagagagaattaaatagagatgatctgatgatttatgcttgagtaaggaggacatagaaaataggtaattgtgtttaattaataagagcacatatgtgtgcgtattatatatacatatgcacatttataagacatataaatatgtaagtatgtgggcattggtgatgctaatcatctatgcttccacagtttaatataaatatgtaagtatgtcggcattggcgatgctaatcatctatgcttccacagtttaacatagcaacactcataaatatatggtaatatcacattttttattagtattggtatgtttagttgtgtaacacattgaagaaacatagaagtgagtgtgttgtctgaaataaaatctcgtacctgttgaagaagtagatgcaatcttttcaaattaactctacattagatatccttccacttgaattttgcagtagatgggagagagtaaacatcattcaat

SEQ ID NO: 59836 - DNA, 2376 bp, Zea Mays
gaccgttgtgcctaaagcccacaatgaccatatcgcgcagcatatccgaacctagccaaccagccccagcgcccaacgcacgaactgtaagaaaccctagcggagcaactgacacactcgcctacatcctcggccgccagctcgccaccatcgcctcccggtcggccgcgccacctcccggaagattggataacaatatcatgccattaggtggataacatttgacgtgctcctggtttgttcatttccgggcatcatcaaaatgtcaggaccgctgaattcaaacattagtgggggcccctcgaaccttagagattccacaggaaggccatttacatcatcgttttctggtcaatctggatcacttccaggttttcatcactcaggggttcaacaacccagtggtggcatttccagtggccgtttccctccaaataatcttcaagcttccttgtctcagattcctcatgggcattctgggattagcaacagaggaggtatgaatgttgggggaaatcctggatttggtagtagcatgaatgctattggtggttcaatacaaggtttatcctcaaacttggctaatgtgggtaaccgcaattctgctcctgggttggcagcttctccagtcttaggaaatttaggcccaagaatagcaagttctgggaatattttgggtgggagcaatattgggagaagtataagctctggaggactgtctatgcctggtattgcatctcgcatgaatttaagtggcaactctggtagtggggctatcaacattcaaggatccaaccgtattggtatgcttcaacaagcatccccacaatttatgaacttgcttggaagttcttacccaacacctggagggtcactatctcagaatcaagtacagtcaggaagtggttctttaggatcttctggaatgctatatgaaggaagctcaggtgacaatgctccatttgatattaatgactttcctcagttaactggacgacctaattctgctggaggtggtcaaggacaatatggatcactgagaaagcatggagtaagcgtcaatgccattgtacaacaaaaccaggaattcagcattcagaatgaagattttccagctttaccaggaaataaagttcctcagattatcctatggatattcatcacaaggaccaccttcaagagaatataaatattatgcaagcacaacattatcctatggctagaccatctggctttagcttgggaagcagttatccaccccgtcaacatcagcagagtgctaattcagttcaaaatgctgggctggaaactattggactaagaccggcaaattctccaagtctgtcaactaattcaggggtttatgagcaattcatgcagaagtaccatcaaccacagactcaaaattcacttaggttgcaggcagcttcaggtcctcaacagtacaaggatcagagccaaaaatccgttcagggaacacaggctgtgccggatccatatagcttacttggactgttgagtttaataagaatgaaagagcctggaccaacaactcttgctttagggattgatttgacctcgttggggttgaatttgaactcccaagataatctttacaagacatttggctctccgtggtcaagcgagccagctgtaggagaacctgattatcagatcccagcttgtttctctgcagagccaccaccagcactgcaaccatttcattttcagaagtttcaccctttgacactattctacatcttttacagcatgcctaaagatgccgctcagttatatgctgctaatgaactatacaataaagggtggttttaccacaaagactaccgtgtttggctaacaagagctcctaattccgcacctcttgtgaaaactccacttcatgaacgagggtcctacatttgttttgatccaagcatctgggatactgttcataaggacaactttgttctccattacgaagcagtggagaagagacctgtccttccttctgctggccaaaatattaggcgagaactataaggttctcctgcatttgaagttaatttggtttgatcagtagctgttgtcatggatgggctgagttcatacaaaatgattctataagaacttatgacccccaggtggcagttgtagaaatgtagctgagatttagattttcttcataatttgttggcattatttagtagggccattgttgtaccaatgttgtgacttgatttgttgttgttgttgttgtgacgcagtcaccgtgatgataataaatgttttgaccgttatgagtcagcatgaaaatataatgagacttttgatttgagatgtatgcgcctgtttgatgattggaattttgctgaatta

SEQ ID NO: 59837 - DNA, 2395 bp, Zea Mays
gaccgttgtgcctaaagcccacaatgaccatatcgcgcagcatatccgaacctagccaaccagccccagcgcccaacgcacgaactgtaagaaaccctagcggagcaactgacacactcgcctacatcctcggccgccagctcgccaccatcgcctcccggtcggccgcgccacctcccggaagattggataacaatatcatgccattaggtggataacatttgacgtgctcctggtttgttcatttccgggcatcatcaaaatgtcaggaccgctgaattcaaacattagtgggggcccctcgaaccttagagattccacaggaaggccatttacatcatcgttttctggtcaatctggatcacttccaggttttcatcactcaggcattccgtctgcaggggttcaacaacccagtggtggcatttccagtggccgtttccctccaaataatcttcaagcttccttgtctcagattcctcatgggcattctgggattagcaacagaggaggtatgaatgttgggggaaatcctggatttggtagtagcatgaatgctattggtggttcaatacaaggtttatcctcaaacttggctaatgtgggtaaccgcaattctgctcctgggttggcagcttctccagtcttaggaaatttaggcccaagaatagcaagttctgggaatattttgggtgggagcaatattgggagaagtataagctctggaggactgtctatgcctggtattgcatctcgcatgaatttaagtggcaactctggtagtggggctatcaacattcaaggatccaaccgtattggtatgcttcaacaagcatccccacaatttatgaacttgcttggaagttcttacccaacacctggagggtcactatctcagaatcaagtacagtcaggaagtggttctttaggatcttctggaatgctatatgaaggaagctcaggtgacaatgctccatttgatattaatgactttcctcagttaactggacgacctaattctgctggaggtggtcaaggacaatatggatcactgagaaagcatggagtaagcgtcaatgccattgtacaacaaaaccaggaattcagcattcagaatgaagattttccagctttaccaggaaataaaggtagttcctcagattatcctatggatattcatcacaaggaccaccttcaagagaatataaatattatgcaagcacaacattatcctatggctagaccatctggctttagcttgggaagcagttatccaccccgtcaacatcagcagagtgctaattcagttcaaaatgctgggctggaaactattggactaagaccggcaaattctccaagtctgtcaactaattcaggggtttatgagcaattcatgcagaagtaccatcaaccacagactcaaaattcacttaggttgcaggcagcttcaggtcctcaacagtacaaggatcagagccaaaaatccgttcagggaacacaggctgtgccggatccatatagcttacttggactgttgagtttaataagaatgaaagagcctggaccaacaactcttgctttagggattgatttgacctcgttggggttgaatttgaactcccaagataatctttacaagacatttggctctccgtggtcaagcgagccagctgtaggagaacctgattatcagatcccagcttgtttctctgcagagccaccaccagcactgcaaccatttcattttcagaagtttcaccctttgacactattctacatcttttacagcatgcctaaagatgccgctcagttatatgctgctaatgaactatacaataaagggtggttttaccacaaagactaccgtgtttggctaacaagagctcctaattccgcacctcttgtgaaaactccacttcatgaacgagggtcctacatttgttttgatccaagcatctgggatactgttcataaggacaactttgttctccattacgaagcagtggagaagagacctgtccttccttctgctggccaaaatattaggcgagaactataaggttctcctgcatttgaagttaatttggtttgatcagtagctgttgtcatggatgggctgagttcatacaaaatgattctataagaacttatgacccccaggtggcagttgtagaaatgtagctgagatttagattttcttcataatttgttggcattatttagtagggccattgttgtaccaatgttgtgacttgatttgttgttgttgttgttgtgacgcagtcaccgtgatgataataaatgttttgaccgttatgagtcagcatgaaaatataatgagacttttgatttgagatgtatgcgcctgtttgatgattggaattttgctgaatta

SEQ ID NO: 59838 - DNA, 2391 bp, Zea Mays
gaccgttgtgcctaaagcccacaatgaccatatcgcgcagcatatccgaacctagccaaccagccccagcgcccaacgcacgaactgtaagaaaccctagcggagcaactgacacactcgcctacatcctcggccgccagctcgccaccatcgcctcccggtcggccgcgccacctcccggaagattggataacaatatcatgccattaggtggataacatttgacgtgctcctggtttgttcatttccgggcatcatcaaaatgtcaggaccgctgaattcaaacattagtgggggcccctcgaaccttagagattccacaggaaggccatttacatcatcgttttctggtcaatctggatcacttccaggttttcatcactcaggcattccgtctgcaggggttcaacaacccagtggtggcatttccagtggccgtttccctccaaataatcttcaagcttccttgtctcagattcctcatgggcattctgggattagcaacagaggaggtatgaatgttgggggaaatcctggatttggtagtagcatgaatgctattggtggttcaatacaaggtttatcctcaaacttggctaatgtgggtaaccgcaattctgctcctgggttggcagcttctccagtcttaggaaatttaggcccaagaatagcaagttctgggaatattttgggtgggagcaatattgggagaagtataagctctggaggactgtctatgcctggtattgcatctcgcatgaatttaagtggcaactctggtagtggggctatcaacattcaaggatccaaccgtattggtatgcttcaacaagcatccccacaatttatgaacttgcttggaagttcttacccaacacctggagggtcactatctcagaatcaagtacagtcaggaagtggttctttaggatcttctggaatgctatatgaaggaagctcaggtgacaatgctccatttgatattaatgactttcctcagttaactggacgacctaattctgctggaggtggtcaaggacaatatggatcactgagaaagcatggagtaagcgtcaatgccattgtacaacaaaaccaggaattcagcattcagaatgaagattttccagctttaccaggaaataaagttcctcagattatcctatggatattcatcacaaggaccaccttcaagagaatataaatattatgcaagcacaacattatcctatggctagaccatctggctttagcttgggaagcagttatccaccccgtcaacatcagcagagtgctaattcagttcaaaatgctgggctggaaactattggactaagaccggcaaattctccaagtctgtcaactaattcaggggtttatgagcaattcatgcagaagtaccatcaaccacagactcaaaattcacttaggttgcaggcagcttcaggtcctcaacagtacaaggatcagagccaaaaatccgttcagggaacacaggctgtgccggatccatatagcttacttggactgttgagtttaataagaatgaaagagcctggaccaacaactcttgctttagggattgatttgacctcgttggggttgaatttgaactcccaagataatctttacaagacatttggctctccgtggtcaagcgagccagctgtaggagaacctgattatcagatcccagcttgtttctctgcagagccaccaccagcactgcaaccatttcattttcagaagtttcaccctttgacactattctacatcttttacagcatgcctaaagatgccgctcagttatatgctgctaatgaactatacaataaagggtggttttaccacaaagactaccgtgtttggctaacaagagctcctaattccgcacctcttgtgaaaactccacttcatgaacgagggtcctacatttgttttgatccaagcatctgggatactgttcataaggacaactttgttctccattacgaagcagtggagaagagacctgtccttccttctgctggccaaaatattaggcgagaactataaggttctcctgcatttgaagttaatttggtttgatcagtagctgttgtcatggatgggctgagttcatacaaaatgattctataagaacttatgacccccaggtggcagttgtagaaatgtagctgagatttagattttcttcataatttgttggcattatttagtagggccattgttgtaccaatgttgtgacttgatttgttgttgttgttgttgtgacgcagtcaccgtgatgataataaatgttttgaccgttatgagtcagcatgaaaatataatgagacttttgatttgagatgtatgcgcctgtttgatgattggaattttgctgaatta

SEQ ID NO: 59839 - DNA, 2447 bp, Zea Mays
gaccgttgtgcctaaagcccacaatgaccatatcgcgcagcatatccgaacctagccaaccagccccagcgcccaacgcacgaactgtaagaaaccctagcggagcaactgacacactcgcctacatcctcggccgccagctcgccaccatcgcctcccggtcggccgcgccacctcccggaaggtggataacatttgacgtgctcctggtttgttcatttccgggcatcatcaaaatgtcaggaccgctgaattcaaacattagtgggggcccctcgaaccttagagattccacaggaaggccatttacatcatcgttttctggtcaatctggatcacttccaggttttcatcactcaggttcacacaacattcatggaaatcttaatcttgcaaatatctctggatcattagcaccacgaaataattcaatggcaggcattccgtctgcaggggttcaacaacccagtggtggcatttccagtggccgtttccctccaaataatcttcaagcttccttgtctcagattcctcatgggcattctgggattagcaacagaggaggtatgaatgttgggggaaatcctggatttggtagtagcatgaatgctattggtggttcaatacaaggtttatcctcaaacttggctaatgtgggtaaccgcaattctgctcctgggttggcagcttctccagtcttaggaaatttaggcccaagaatagcaagttctgggaatattttgggtgggagcaatattgggagaagtataagctctggaggactgtctatgcctggtattgcatctcgcatgaatttaagtggcaactctggtagtggggctatcaacattcaaggatccaaccgtattggtatgcttcaacaagcatccccacaatttatgaacttgcttggaagttcttacccaacacctggagggtcactatctcagaatcaagtacagtcaggaagtggttctttaggatcttctggaatgctatatgaaggaagctcaggtgacaatgctccatttgatattaatgactttcctcagttaactggacgacctaattctgctggaggtggtcaaggacaatatggatcactgagaaagcatggagtaagcgtcaatgccattgtacaacaaaaccaggaattcagcattcagaatgaagattttccagctttaccaggaaataaaggtagttcctcagattatcctatggatattcatcacaaggaccaccttcaagagaatataaatattatgcaagcacaacattatcctatggctagaccatctggctttagcttgggaagcagttatccaccccgtcaacatcagcagagtgctaattcagttcaaaatgctgggctggaaactattggactaagaccggcaaattctccaagtctgtcaactaattcaggggtttatgagcaattcatgcagaagtaccatcaaccacagactcaaaattcacttaggttgcaggcagcttcaggtcctcaacagtacaaggatcagagccaaaaatccgttcagggaacacaggctgtgccggatccatatagcttacttggactgttgagtttaataagaatgaaagagcctggaccaacaactcttgctttagggattgatttgacctcgttggggttgaatttgaactcccaagataatctttacaagacatttggctctccgtggtcaagcgagccagctgtaggagaacctgattatcagatcccagcttgtttctctgcagagccaccaccagcactgcaaccatttcattttcagaagtttcaccctttgacactattctacatcttttacagcatgcctaaagatgccgctcagttatatgctgctaatgaactatacaataaagggtggttttaccacaaagactaccgtgtttggctaacaagagctcctaattccgcacctcttgtgaaaactccacttcatgaacgagggtcctacatttgttttgatccaagcatctgggatactgttcataaggacaactttgttctccattacgaagcagtggagaagagacctgtccttccttctgctggccaaaatattaggcgagaactataaggttctcctgcatttgaagttaatttggtttgatcagtagctgttgtcatggatgggctgagttcatacaaaatgattctataagaacttatgacccccaggtggcagttgtagaaatgtagctgagatttagattttcttcataatttgttggcattatttagtagggccattgttgtaccaatgttgtgacttgatttgttgttgttgttgttgtgacgcagtcaccgtgatgataataaatgttttgaccgttatgagtcagcatgaaaatataatgagacttttgatttgagatgtatgcgcctgtttgatgattggaattttgctgaatta

SEQ ID NO: 59840 - DNA, 2078 bp, Zea Mays
gaccgttgtgcctaaagcccacaatgaccatatcgcgcagcatatccgaacctagccaaccagccccagcgcccaacgcacgaactgtaagaaaccctagcggagcaactgacacactcgcctacatcctcggccgccagctcgccaccatcgcctcccggtcggccgcgccacctcccggaagattggataacaatatcatgccattaggtggataacatttgacgtgctcctggtttgttcatttccgggcatcatcaaaatgtcaggaccgctgaattcaaacattagtgggggcccctcgaaccttagagattccacaggaaggccatttacatcatcgttttctggtcaatctggatcacttccaggttttcatcactcaggttcacacaacattcatggaaatcttaatcttgcaaatatctctggatcattagcaccacgaaataattcaatggcaggcattccgtctgcaggggttcaacaacccagtggtggcatttccagtggccgtttccctccaaataatcttcaagcttccttgtctcagattcctcatgggcattctgggattagcaacagaggaggtatgaatgttgggggaaatcctggatttggtagtagcatgaatgctattggtggttcaatacaaggtttatcctcaaacttggctaatgtgggtaaccgcaattctgctcctgggttggcagcttctccagtcttaggaaatttaggcccaagaatagcaagttctgggaatattttgggtgggagcaatattgggagaagtataagctctggaggactgtctatgcctggtattgcatctcgcatgaatttaagtggcaactctggtagttcctcagattatcctatggatattcatcacaaggaccaccttcaagagaatataaatattatgcaagcacaacattatcctatggctagaccatctggctttagcttgggaagcagttatccaccccgtcaacatcagcagagtgctaattcagttcaaaatgctgggctggaaactattggactaagaccggcaaattctccaagtctgtcaactaattcaggggtttatgagcaattcatgcagaagtaccatcaaccacagactcaaaattcacttaggttgcaggcagcttcaggtcctcaacagtacaaggatcagagccaaaaatccgttcagggaacacaggctgtgccggatccatatagcttacttggactgttgagtttaataagaatgaaagagcctggaccaacaactcttgctttagggattgatttgacctcgttggggttgaatttgaactcccaagataatctttacaagacatttggctctccgtggtcaagcgagccagctgtaggagaacctgattatcagatcccagcttgtttctctgcagagccaccaccagcactgcaaaagtttcaccctttgacactattctacatcttttacagatgccgctcagttatatgctgctaatgaactatacaataaagggtggttttaccacaaagactaccgtgtttggctaacaagagctcctaattccgcacctcttgtgaaaactccacttcatgaacgagggtcctacatttgttttgatccaagcatctgggatactgttcataaggacaactttgttctccattacgaagcagtggagaagagacctgtccttccttctgctggccaaaatattaggcgagaactataaggttctcctgcatttgaagttaatttggtttgatcagtagctgttgtcatggatgggctgagttcatacaaaatgattctataagaacttatgacccccaggtggcagttgtagaaatgtagctgagatttagattttcttcataatttgttggcattatttagtagggccattgttgtaccaatgttgtgacttgatttgttgttgttgttgttgtgacgcagtcaccgtgatgataataaatgttttgaccgttatgagtcagcatgaaaatataatgagacttttgatttgagatgtatgcgcctgtttgatgattggaattttgctgaatta

SEQ ID NO: 59841 - DNA, 2461 bp, Zea Mays
gaccgttgtgcctaaagcccacaatgaccatatcgcgcagcatatccgaacctagccaaccagccccagcgcccaacgcacgaactgtaagaaaccctagcggagcaactgacacactcgcctacatcctcggccgccagctcgccaccatcgcctcccggtcggccgcgccacctcccggaagattggataacaatatcatgccattaggtggataacatttgacgtgctcctggtttgttcatttccgggcatcatcaaaatgtcaggaccgctgaattcaaacattagtgggggcccctcgaaccttagagattccacaggaaggccatttacatcatcgttttctggtcaatctggatcacttccaggttttcatcactcaggttcacacaacattcatggaaatcttaatcttgcaaatatctctggatcattagcaccacgaaataattcaatggcaggcattccgtctgcaggggttcaacaacccagtggtggcatttccagtggccgtttccctccaaataatcttcaagcttccttgtctcagattcctcatgggcattctgggattagcaacagaggaggtatgaatgttgggggaaatcctggatttggtagtagcatgaatgctattggtggttcaatacaaggtttatcctcaaacttggctaatgtgggtaaccgcaattctgctcctgggttggcagcttctccagtcttaggaaatttaggcccaagaatagcaagttctgggaatattttgggtgggagcaatattgggagaagtataagctctggaggactgtctatgcctggtattgcatctcgcatgaatttaagtggcaactctggtagtggggctatcaacattcaaggatccaaccgtattggtatgcttcaacaagcatccccacaatttatgaacttgcttggaagttcttacccaacacctggagggtcactatctcagaatcaagtacagtcaggaagtggttctttaggatcttctggaatgctatatgaaggaagctcaggtgacaatgctccatttgatattaatgactttcctcagttaactggacgacctaattctgctggaggtggtcaaggacaatatggatcactgagaaagcatggagtaagcgtcaatgccattgtacaacaaaaccaggaattcagcattcagaatgaagattttccagctttaccaggaaataaagattatcctatggatattcatcacaaggaccaccttcaagagaatataaatattatgcaagcacaacattatcctatggctagaccatctggctttagcttgggaagcagttatccaccccgtcaacatcagcagagtgctaattcagttcaaaatgctgggctggaaactattggactaagaccggcaaattctccaagtctgtcaactaattcaggggtttatgagcaattcatgcagaagtaccatcaaccacagactcaaaattcacttaggttgcaggcagcttcaggtcctcaacagtacaaggatcagagccaaaaatccgttcagggaacacaggctgtgccggatccatatagcttacttggactgttgagtttaataagaatgaaagagcctggaccaacaactcttgctttagggattgatttgacctcgttggggttgaatttgaactcccaagataatctttacaagacatttggctctccgtggtcaagcgagccagctgtaggagaacctgattatcagatcccagcttgtttctctgcagagccaccaccagcactgcaaccatttcattttcagaagtttcaccctttgacactattctacatcttttacagcatgcctaaagatgccgctcagttatatgctgctaatgaactatacaataaagggtggttttaccacaaagactaccgtgtttggctaacaagagctcctaattccgcacctcttgtgaaaactccacttcatgaacgagggtcctacatttgttttgatccaagcatctgggatactgttcataaggacaactttgttctccattacgaagcagtggagaagagacctgtccttccttctgctggccaaaatattaggcgagaactataaggttctcctgcatttgaagttaatttggtttgatcagtagctgttgtcatggatgggctgagttcatacaaaatgattctataagaacttatgacccccaggtggcagttgtagaaatgtagctgagatttagattttcttcataatttgttggcattatttagtagggccattgttgtaccaatgttgtgacttgatttgttgttgttgttgttgtgacgcagtcaccgtgatgataataaatgttttgaccgttatgagtcagcatgaaaatataatgagacttttgatttgagatgtatgcgcctgtttgatgattggaattttgctgaatta

SEQ ID NO: 59842 - DNA, 1512 bp, Zea Mays
gaccgttgtgcctaaagcccacaatgaccatatcgcgcagcatatccgaacctagccaaccagccccagcgcccaacgcacgaactgtaagaaaccctagcggagcaactgacacactcgcctacatcctcggccgccagctcgccaccatcgcctcccggtcggccgcgccacctcccggaagattggataacaatatcatgccattaggtggataacatttgacgtgctcctggtttgttcatttccgggcatcatcaaaatgtcaggaccgctgaattcaaacattagtgggggcccctcgaaccttagagattccacaggaaggccatttacatcatcgttttctggtcaatctggatcacttccaggttttcatcactcaggttcacacaacattcatggaaatcttaatcttgcaaatatctctggatcattagcaccacgaaataattcaatggcaggcattccgtctgcaggggttcaacaacccagtggtggcatttccagtggccgtttccctccaaataatcttcaagcttccttgtctcagattcctcatgggcattctgggattagcaacagaggaggtatgaatgttgggggaaatcctggatttggtagtagcatgaatgctattggtggttcaatacaaggtttatcctcaaacttggctaatgtgggtaaccgcaattctgctcctgggttggcagcttctccagtcttaggaaatttaggcccaagaatagcaagttctgggaatattttgggtgggagcaatattgggagaagtataagctctggaggactgtctatgcctggtattgcatctcgcatgaatttaagtggcaactctggtagtggggctatcaacattcaaggatccaaccgtattggtatgcttcaacaagcatccccacaatttatgaacttgcttggaagttcttacccaacacctggagggtcactatctcagaatcaagtacagtcaggaagtggttctttaggatcttctggaatgctatatgaaggaagctcaggtgacaatgctccatttgttttgatccaagcatctgggatactgttcataaggacaactttgttctccattacgaagcagtggagaagagacctgtccttccttctgctggccaaaatattaggcgagaactataaggttctcctgcatttgaagttaatttggtttgatcagtagctgttgtcatggatgggctgagttcatacaaaatgattctataagaacttatgacccccaggtggcagttgtagaaatgtagctgagatttagattttcttcataatttgttggcattatttagtagggccattgttgtaccaatgttgtgacttgatttgttgttgttgttgttgtgacgcagtcaccgtgatgataataaatgttttgaccgttatgagtcagcatgaaaatataatgagacttttgatttgagatgtatgcgcctgtttgatgattggaattttgctgaatta

SEQ ID NO: 59843 - DNA, 2335 bp, Zea Mays
gaccgttgtgcctaaagcccacaatgaccatatcgcgcagcatatccgaacctagccaaccagccccagcgcccaacgcacgaactgtaagaaaccctagcggagcaactgacacactcgcctacatcctcggccgccagctcgccaccatcgcctcccggtcggccgcgccacctcccggaagattggataacaatatcatgccattaggtggataacatttgacgtgctcctggtttgttcatttccgggcatcatcaaaatgtcaggaccgctgaattcaaacattagtgggggcccctcgaaccttagagattccacaggaaggccatttacatcatcgttttctggtcaatctggatcacttccaggttttcatcactcaggttcacacaacattcatggaaatcttaatcttgcaaatatctctggatcattagcaccacgaaataattcaatggcaggcattccgtctgcaggggttcaacaacccagtggtggcatttccagtggccgtttccctccaaataatcttcaagcttccttgtctcagattcctcatgggcattctgggattagcaacagaggagcttctccagtcttaggaaatttaggcccaagaatagcaagttctgggaatattttgggtgggagcaatattgggagaagtataagctctggaggactgtctatgcctggtattgcatctcgcatgaatttaagtggcaactctggtagtggggctatcaacattcaaggatccaaccgtattggtatgcttcaacaagcatccccacaatttatgaacttgcttggaagttcttacccaacacctggagggtcactatctcagaatcaagtacagtcaggaagtggttctttaggatcttctggaatgctatatgaaggaagctcaggtgacaatgctccatttgatattaatgactttcctcagttaactggacgacctaattctgctggaggtggtcaaggacaatatggatcactgagaaagcatggagtaagcgtcaatgccattgtacaacaaaaccaggaattcagcattcagaatgaagattttccagctttaccaggaaataaaggtagttcctcagattatcctatggatattcatcacaaggaccaccttcaagagaatataaatattatgcaagcacaacattatcctatggctagaccatctggctttagcttgggaagcagttatccaccccgtcaacatcagcagagtgctaattcagttcaaaatgctgggctggaaactattggactaagaccggcaaattctccaagtctgtcaactaattcaggggtttatgagcaattcatgcagaagtaccatcaaccacagactcaaaattcacttaggttgcaggcagcttcaggtcctcaacagtacaaggatcagagccaaaaatccgttcagggaacacaggctgtgccggatccatatagcttacttggactgttgagtttaataagaatgaaagagcctggaccaacaactcttgctttagggattgatttgacctcgttggggttgaatttgaactcccaagataatctttacaagacatttggctctccgtggtcaagcgagccagctgtaggagaacctgattatcagatcccagcttgtttctctgcagagccaccaccagcactgcaaaagtttcaccctttgacactattctacatcttttacagcatgcctaaagatgccgctcagttatatgctgctaatgaactatacaataaagggtggttttaccacaaagactaccgtgtttggctaacaagagctcctaattccgcacctcttgtgaaaactccacttcatgaacgagggtcctacatttgttttgatccaagcatctgggatactgttcataaggacaactttgttctccattacgaagcagtggagaagagacctgtccttccttctgctggccaaaatattaggcgagaactataaggttctcctgcatttgaagttaatttggtttgatcagtagctgttgtcatggatgggctgagttcatacaaaatgattctataagaacttatgacccccaggtggcagttgtagaaatgtagctgagatttagattttcttcataatttgttggcattatttagtagggccattgttgtaccaatgttgtgacttgatttgttgttgttgttgttgtgacgcagtcaccgtgatgataataaatgttttgaccgttatgagtcagcatgaaaatataatgagacttttgatttgagatgtatgcgcctgtttgatgattggaattttgctgaatta

SEQ ID NO: 59844 - DNA, 1419 bp, Zea Mays
gaccgttgtgcctaaagcccacaatgaccatatcgcgcagcatatccgaacctagccaaccagccccagcgcccaacgcacgaactgtaagaaaccctagcggagcaactgacacactcgcctacatcctcggccgccagctcgccaccatcgcctcccggtcggccgcgccacctcccggaagattggataacaatatcatgccattaggtggataacatttgacgtgctcctggtttgttcatttccgggcatcatcaaaatgtcaggaccgctgaattcaaacattagtgggggcccctcgaaccttagagattccacaggaaggccatttacatcatcgttttctggtcaatctggatcacttccaggttttcatcactcaggggttcaacaacccagtggtggcatttccagtggccgtttccctccaaataatcttcaagcttccttgtctcagattcctcatgggcattctgggattagcaacagaggaggtatgaatgttgggggaaatcctggatttggtagtagcatgaatgctattggtggttcaatacaaggtttatcctcaaacttggctaatgtgggtaaccgcaattctgctcctgggttggcagcttctccagtcttaggaaatttaggcccaagaatagcaagttctgggaatattttgggtgggagcaatattgggagaagtataagctctggaggactgtctatgcctggtattgcatctcgcatgaatttaagtggcaactctggtagtggggctatcaacattcaaggatccaaccgtattggtatgcttcaacaagcatccccacaatttatgaacttgcttggaagttcttacccaacacctggagggtcactatctcagaatcaagtacagtcaggaagtggttctttaggatcttctggaatgctatatgaaggaagctcaggtgacaatgctccatttgttttgatccaagcatctgggatactgttcataaggacaactttgttctccattacgaagcagtggagaagagacctgtccttccttctgctggccaaaatattaggcgagaactataaggttctcctgcatttgaagttaatttggtttgatcagtagctgttgtcatggatgggctgagttcatacaaaatgattctataagaacttatgacccccaggtggcagttgtagaaatgtagctgagatttagattttcttcataatttgttggcattatttagtagggccattgttgtaccaatgttgtgacttgatttgttgttgttgttgttgtgacgcagtcaccgtgatgataataaatgttttgaccgttatgagtcagcatgaaaatataatgagacttttgatttgagatgtatgcgcctgtttgatgattggaattttgctgaatta

SEQ ID NO: 59845 - DNA, 1648 bp, Zea Mays
gaccgttgtgcctaaagcccacaatgaccatatcgcgcagcatatccgaacctagccaaccagccccagcgcccaacgcacgaactgtaagaaaccctagcggagcaactgacacactcgcctacatcctcggccgccagctcgccaccatcgcctcccggtcggccgcgccacctcccggaagattggataacaatatcatgccattaggtggataacatttgacgtgctcctggtttgttcatttccgggcatcatcaaaatgtcaggaccgctgaattcaaacattagtgggggcccctcgaaccttagagattccacaggaaggccatttacatcatcgttttctggtcaatctggatcacttccaggaattcagcattcagaatgaagattttccagctttaccaggaaataaagttcctcagattatcctatggatattcatcacaaggaccaccttcaagagaatataaatattatgcaagcacaacattatcctatggctagaccatctggctttagcttgggaagcagttatccaccccgtcaacatcagcagagtgctaattcagttcaaaatgctgggctggaaactattggactaagaccggcaaattctccaagtctgtcaactaattcaggggtttatgagcaattcatgcagaagtaccatcaaccacagactcaaaattcacttaggttgcaggcagcttcaggtcctcaacagtacaaggatcagagccaaaaatccgttcagggaacacaggctgtgccggatccatatagcttacttggactgttgagtttaataagaatgaaagagcctggaccaacaactcttgctttagggattgatttgacctcgttggggttgaatttgaactcccaagataatctttacaagacatttggctctccgtggtcaagcgagccagctgtaggagaacctgattatcagatcccagcttgtttctctgcagagccaccaccagcactgcaaaagtttcaccctttgacactattctacatcttttacagcatgcctaaagatgccgctcagttatatgctgctaatgaactatacaataaagggtggttttaccacaaagactaccgtgtttggctaacaagagctcctaattccgcacctcttgtgaaaactccacttcatgaacgagggtcctacatttgttttgatccaagcatctgggatactgttcataaggacaactttgttctccattacgaagcagtggagaagagacctgtccttccttctgctggccaaaatattaggcgagaactataaggttctcctgcatttgaagttaatttggtttgatcagtagctgttgtcatggatgggctgagttcatacaaaatgattctataagaacttatgacccccaggtggcagttgtagaaatgtagctgagatttagattttcttcataatttgttggcattatttagtagggccattgttgtaccaatgttgtgacttgatttgttgttgttgttgttgtgacgcagtcaccgtgatgataataaatgttttgaccgttatgagtcagcatgaaaatataatgagacttttgatttgagatgtatgcgcctgtttgatgattggaattttgctgaatta

SEQ ID NO: 59846 - DNA, 2348 bp, Zea Mays
ctggatatgatgtgaaggagattaagaaattgaaggaaaagctaagtagagcctttgagattggataacaatatcatgccattaggtggataacatttgacgtgctcctggtttgttcatttccgggcatcatcaaaatgtcaggaccgctgaattcaaacattagtgggggcccctcgaaccttagagattccacaggaaggccatttacatcatcgttttctggtcaatctggatcacttccaggttttcatcactcaggttcacacaacattcatggaaatcttaatcttgcaaatatctctggatcattagcaccacgaaataattcaatggcaggcattccgtctgcaggggttcaacaacccagtggtggcatttccagtggccgtttccctccaaataatcttcaagcttccttgtctcagattcctcatgggcattctgggattagcaacagaggaggtatgaatgttgggggaaatcctggatttggtagtagcatgaatgctattggtggttcaatacaaggtttatcctcaaacttggctaatgtgggtaaccgcaattctgctcctgggttggcagcttctccagtcttaggaaatttaggcccaagaatagcaagttctgggaatattttgggtgggagcaatattgggagaagtataagctctggaggactgtctatgcctggtattgcatctcgcatgaatttaagtggcaactctggtagtggggctatcaacattcaaggatccaaccgtattggtatgcttcaacaagcatccccacaatttatgaacttgcttggaagttcttacccaacacctggagggtcactatctcagaatcaagtacagtcaggaagtggttctttaggatcttctggaatgctatatgaaggaagctcaggtgacaatgctccatttgatattaatgactttcctcagttaactggacgacctaattctgctggaggtggtcaaggacaatatggatcactgagaaagcatggagtaagcgtcaatgccattgtacaacaaaaccaggaattcagcattcagaatgaagattttccagctttaccaggaaataaaggtagttcctcagattatcctatggatattcatcacaaggaccaccttcaagagaatataaatattatgcaagcacaacattatcctatggctagaccatctggctttagcttgggaagcagttatccaccccgtcaacatcagcagagtgctaattcagttcaaaatgctgggctggaaactattggactaagaccggcaaattctccaagtctgtcaactaattcaggggtttatgagcaattcatgcagaagtaccatcaaccacagactcaaaattcacttaggttgcaggcagcttcaggtcctcaacagtacaaggatcagagccaaaaatccgttcagggaacacaggctgtgccggatccatatagcttacttggactgttgagtttaataagaatgaaagagcctggaccaacaactcttgctttagggattgatttgacctcgttggggttgaatttgaactcccaagataatctttacaagacatttggctctccgtggtcaagcgagccagctgtaggagaacctgattatcagatcccagcttgtttctctgcagagccaccaccagcactgcaaccatttcattttcagaagtttcaccctttgacactattctacatcttttacagcatgcctaaagatgccgctcagttatatgctgctaatgaactatacaataaagggtggttttaccacaaagactaccgtgtttggctaacaagagctcctaattccgcacctcttgtgaaaactccacttcatgaacgagggtcctacatttgttttgatccaagcatctgggatactgttcataaggacaactttgttctccattacgaagcagtggagaagagacctgtccttccttctgctggccaaaatattaggcgagaactataaggttctcctgcatttgaagttaatttggtttgatcagtagctgttgtcatggatgggctgagttcatacaaaatgattctataagaacttatgacccccaggtggcagttgtagaaatgtagctgagatttagattttcttcataatttgttggcattatttagtagggccattgttgtaccaatgttgtgacttgatttgttgttgttgttgttgtgacgcagtcaccgtgatgataataaatgttttgaccgttatgagtcagcatgaaaatataatgagacttttgatttgagatgtatgcgcctgtttgatgattggaattttgctgaatta

SEQ ID NO: 59847 - DNA, 2200 bp, Zea Mays
ttaagaaattgaaggaaaagctaagtagagcctttgagattggataacaatatcatgccattaggtggataacatttgacgtgctcctggtttgttcatttccgggcatcatcaaaatgtcaggaccgctgaattcaaacattagtgggggcccctcgaaccttagagattccacaggaaggccatttacatcatcgttttctggtcaatctggatcacttccaggttttcatcactcaggttcacacaacattcatggaaatcttaatcttgcaaatatctctggatcattagcaccacgaaataattcaatggcaggcattccgtctgcaggggttcaacaacccagtggtggcatttccagtggccgtttccctccaaataatcttcaagcttccttgtctcagattcctcatgggcattctgggattagcaacagaggagcttctccagtcttaggaaatttaggcccaagaatagcaagttctgggaatattttgggtgggagcaatattgggagaagtataagctctggaggactgtctatgcctggtattgcatctcgcatgaatttaagtggcaactctggtagtggggctatcaacattcaaggatccaaccgtattggtatgcttcaacaagcatccccacaatttatgaacttgcttggaagttcttacccaacacctggagggtcactatctcagaatcaagtacagtcaggaagtggttctttaggatcttctggaatgctatatgaaggaagctcaggtgacaatgctccatttgatattaatgactttcctcagttaactggacgacctaattctgctggaggtggtcaaggacaatatggatcactgagaaagcatggagtaagcgtcaatgccattgtacaacaaaaccaggaattcagcattcagaatgaagattttccagctttaccaggaaataaagttcctcagattatcctatggatattcatcacaaggaccaccttcaagagaatataaatattatgcaagcacaacattatcctatggctagaccatctggctttagcttgggaagcagttatccaccccgtcaacatcagcagagtgctaattcagttcaaaatgctgggctggaaactattggactaagaccggcaaattctccaagtctgtcaactaattcaggggtttatgagcaattcatgcagaagtaccatcaaccacagactcaaaattcacttaggttgcaggcagcttcaggtcctcaacagtacaaggatcagagccaaaaatccgttcagggaacacaggctgtgccggatccatatagcttacttggactgttgagtttaataagaatgaaagagcctggaccaacaactcttgctttagggattgatttgacctcgttggggttgaatttgaactcccaagataatctttacaagacatttggctctccgtggtcaagcgagccagctgtaggagaacctgattatcagatcccagcttgtttctctgcagagccaccaccagcactgcaaccatttcattttcagaagtttcaccctttgacactattctacatcttttacagcatgcctaaagatgccgctcagttatatgctgctaatgaactatacaataaagggtggttttaccacaaagactaccgtgtttggctaacaagagctcctaattccgcacctcttgtgaaaactccacttcatgaacgagggtcctacatttgttttgatccaagcatctgggatactgttcataaggacaactttgttctccattacgaagcagtggagaagagacctgtccttccttctgctggccaaaatattaggcgagaactataaggttctcctgcatttgaagttaatttggtttgatcagtagctgttgtcatggatgggctgagttcatacaaaatgattctataagaacttatgacccccaggtggcagttgtagaaatgtagctgagatttagattttcttcataatttgttggcattatttagtagggccattgttgtaccaatgttgtgacttgatttgttgttgttgttgttgtgacgcagtcaccgtgatgataataaatgttttgaccgttatgagtcagcatgaaaatataatgagacttttgatttgagatgtatgcgcctgtttgatgattggaattttgctgaatta

SEQ ID NO: 59848 - DNA, 4123 bp, Zea Mays
gacagatcacagatcgcagtttaaaaaacaactgatatatgttttaaccaatataaagttacaaatcacagatcacacatagacaaatcatatatcacacctaggttcatcataaacatatacaagaagaagttgctgaatatacagacttgcacagaccgctcctggctactactaggttcagtgaaaataaacacatcacctcgtgcatttttgggctaaacaatctaaggacattttatgagaactcatccgcttcaacaactttcagacagttgttctcatggaaaccacgagtactcttctacctcctcgagatttcgtttggacaagtacgtgagcaagaccaccgatgaaagaacctgcattgacaaccattggtgctggccttcgttgatgcatcacgtatcaacatttctcttccttgagccctgtcattcagtcactgtcccaaccttcatcagtattcttctccgttgccaatgttttccctcttgtcatcactatcctcactgctgctgtcaaaattcgggaaactcgcctttggggctcttgagttcgcctcttcccccttgtaatcggtgagaaggtgccggggaggcttgccgtcggggctgcgcggcgccggcccgccgtcacctcgcgccgccacgcagtgacctcgcaccgtcctcatgcgtcgccaacgtctcgccgtcgctttggccaggaatcgatccggaggagacgaggccagggtttgtgccggtccttggagggaagagaaagtcaaaaccgggccgagtttacttccggttcaggcccaaacgaacgggaatagtgatacctaccaaattccaatccgcaatccgacggaaacgaacgggcccttaatagaagtgttgttcacacggccagcccggatcgaagccggctgccaatacgccgtcgctgtccccgccggcccaccgctccaccggccgcgcattgcgccggttgtttcgccgtcggaaccggccggttcccagcccggatcatcagtcgaggccctcagttcttcgattcgccactgtgggcctgtggctgaccggccgtcgtgatatcagtacatgcacgcctctttccattcgcaaatcacaagagagacaagcaacatgcgcgctcgggggcggcggcggcggcggcatcgacgagatgtcgaggtcgagagacccgcaaaaacacggggggccggggcatgcaagtgcgggaccctgcatggtcaagatcctaagtacaaaaataagtcactaagctctgacttgggaggccagtagtggccaggccatgatagttgtttatcggagtgagccactactccgcagagctagcgaagtcaaatgttgttgatgggcaacaagagttctgaaacgctttccgcttcctgaaaatgcatgcagaggtctctgtctgtgcgatcgagtgccgcgcaggtcaccgtgcactactgtactttatatgccatttgacaatcgctaaaagcttcccaaaacgtacaggaagcaccactactgcgtgagcttgggtgagacgatagatgggcaaaatatctaggcgcgcgccgcagccaaactggagcttgggaattgttgatgcagtgagtgccggtagtgcacgtgcccaattagggttgatgagttttaaaacacaccaattttccgcctaaaattcccgtgctacaataatgcagtgagtgccggtagtgcatgtgccgttgatgagttttaaaagtgtcgagcgattcacccatataaccacctaaaacattatctaatagacatcggtgaactttcatagcatttttcgtgtaaaattcgcgtgctacatgacttatgggaatcgaaccccgacctcatcctcgcgtgtagccatctccaccactccgcatatcacttacttcatgtctatattgcatttttgttttgtgtagcccagaacctcatcctcgcgtgaagttctacaagttttttttggatacttttttccgtccgagatcgtttgcaaaatttgcatctcaaatttgacaaatctagatgcaatttttgagagccgaaatgatttttttttaaaagtagtgaactataaagtttcataacttttagagatctacaactttttatgttggtgtttttttttcgtacaaggtcatttgaaaaactaaaaaaatcagaaaaaatagtttttaatgacggttttctaaggaagatgtctatagaaatcgatttgtacatacggtttcttaagaaaaccgaacgtataaatcatggatttctaatgataggttacttaataaaccgccactagaaatactactgacacgcttgataaccgaaacctctattaaaaactaaattgcgccacaggtttagaactcttttctaccggtgttaaatagtaaacaagccgacacgagtgaaccaacatttgtgtaccctgtcccaaacataactctagatatcgaatctgtctctacacgatcaataaggaaaaggacactaccgtctacctcgccgtccctaagttgactatcgtcgtcctaacggtgtcgtactcattcaattcaacaccaaaggtataacctacgagttatcgtgcatctagcgggtagggtttacagagttgtattaaaaatttaacgagaacggctgcttgttaattatatattgaaaagaaagcgagccaagacgacaagcaattatttgtagcctgggaaaaaaacattattcgctgtgtcataagacacacactagcaattacgctgtgcaatagtgtgaggaggtgctgcagatctgtcgtatagtaggttgaaccagagtggcactggcatagtcccgctcctactagctgtccaaattttatatttcacctttctgggggaaaaagccggtaacatttatttagatttagacattttagttgacgttcagcagccagacggacgccagtgaggaacgccgttgtttaaagccagcggcacggcagcagcacccggcgtcatccagcagccccattgcagtttcgagttcctggctggtggcgtggcacctcgttccctccgatcgagtccgcgactaagatacaccccgactcgctagcgagcaggcaggcagaatggagcgccacgccgagaagccgctcctcgtgctgccctcctgcctcctcttccttgtcctcctcctcgccccgctcgtctccgccgtccccacgccaagaagcctgcgcctggggagccaccagcagcacccgccgccggctctgaagctcagttactctcaggtactggcaattggctgtttccgtcaggtctctcccgcctgctgccgtgtttctccctcttgatttggcacaactgttagcgaatatacgtacagaggttaatcaatcaattaactaattaattcagcgatggtggatggattcatatgcttgtcatctactagctgctgctgctgtagtcctgatgacagacgactttgtcttgggttgggacacacacaggacacgacggcgatcgcggcggcgatgatgaaaaacacgggcaggccgacggcgagggtggacgtggaggtgaacgactaccagccgtccggccccaacaaccgccacgacccacccaagggtcccggaagaccttgaacgggggccggctcagctggacgacgacccggccaatcaataatccaactccgtcgtcgtcgtcgtcacaccggtagtacaaagtgcgtcgcttgtgctagctcctctactctagttctagtagaaattaaggtcgtcgaaacaaagtcacctagctgcgtttgtatatatatacaccggccgcgcgtgtgtatggctgtgtcctgtgtgcaaggcacatcggtcatcggtgcagtgggttgtgttgttcttaggctggttaattggttgctgttcgtcggaaagaactccactgcatgcagatcgatttgcatctcctgcagcaggtgccggtacagtgtaccagcagattgagattgtccagcttgttagttctatgctcccgatcttgatatacttctatatatcatactagtatatccatcagcaaaagcagcatcattgctccctcgaccgcctcacagattca

SEQ ID NO: 59849 - DNA, 1502 bp, Zea Mays
cttctctgcaatgaaaataattaagaacaaactgtgcaacaggatttcagatgaattgttcaatcacttgatggtgtgttacacagagcgggaattgttcaaagcacttgataattcaaccataacacgatgatttcagagtataaagactcgaaaaataagtctacctcgtgttatacgagactagcacattatatacatgatgcctagaccccgagaacttcaaggagttcaaacttgttgagaagaggcagctgagtcataatgttgccaagttcaagtttgcgctcccaacacctacttctgtattgggtcttccaatcggacagcatataagctgcagaggacaggatgcttctggcgaggaagtgatcaagccttatactccaactactctggactctgatgttggatcttttgagcttgttataaagatgtatccccaaggaagaatgtctcatcatttccgtgagatgaaagttggtgattatatgtctgtgaagggacctaagggccgtttcaagtacctacctggacaagtgagagcattaggaatggtagctggaggatcaggcattactccaatgttccaagtcacaagggcaattcttgagaacccaaaggacaacacgaaagtacacttaatctatgcaaatgtcacgtatgaggatattcttctgaaggaagaacttgacggcatggccaaaaactatcctgatcgtttcaagatctactatgtcttgaatcagcctcctgaagtctgggacggtggcgtcgggttcgtgtcgaaggaaatgatccagactcattgcccagcgcctgccgccgacattcaggtattgcgatgtggacctcctcccatgaacaaagccatggccgcgcacctggacgaccttggctacacgaaggagatgcagttccagttctaagcgttacattctctctaccagtaccagaataaacgggggtggaacaagtttcgtcgcctctttgagcagacgaagcctgaccatatcgccatatagctccaaacagacgcggtttgccactgacagtcacagagcgtcgtacttaaggggtgtttggtttatagggactaaactttagtctctccactttattccattttagttcataaattattaaatagggaaacttaaatagagttttagtttctatatttagtaatttagggactaaaatggaataaaatagaggactaaaaattagtccctagaaaccaaacacccctttactctacctggatgaaagcagcagtacagtacccacctaatttgtatcggtgtcgggacattgtaccatgccgttcttttgtatcggtttgtcactcactcactccgcgagccagcagcccagcacacgatccatcgtgtcattttggcaacgtcatacagatacaaaaaactgcatgtgcagcagatgtgctctgttctctcctgcagagcgatgaacgcgtacgcgcacggtagcaagcaggcgag

SEQ ID NO: 59850 - DNA, 1172 bp, Zea Mays
agctgaaacaattttgtagtgtgctctctggattgcacgcgagatgcctagaccccgagaacttcaaggagttcaaacttgttgagaagaggcagctgagtcataatgttgccaagttcaagtttgcgctcccaacacctacttctgtattgggtcttccaatcggacagcatataagctgcagaggacaggatgcttctggcgaggaagtgatcaagccttatactccaactactctggactctgatgttggatcttttgagcttgttataaagatgtatccccaaggaagaatgtctcatcatttccgtgagatgaaagttggtgattatatgtctgtgaagggacctaaggaagaacttgacggcatggccaaaaactatcctgatcgtttcaagatctactatgtcttgaatcagcctcctgaagtctgggacggtggcgtcgggttcgtgtcgaaggaaatgatccagactcattgcccagcgcctgccgccgacattcaggtattgcgatgtggacctcctcccatgaacaaagccatggccgcgcacctggacgaccttggctacacgaaggagatgcagttccagttctaagcgttacattctctctaccagtaccagaataaacgggggtggaacaagtttcgtcgcctctttgagcagacgaagcctgaccatatcgccatatagctccaaacagacgcggtttgccactgacagtcacagagcgtcgtacttaaggggtgtttggtttatagggactaaactttagtctctccactttattccattttagttcataaattattaaatagggaaacttaaatagagttttagtttctatatttagtaatttagggactaaaatggaataaaatagaggactaaaaattagtccctagaaaccaaacacccctttactctacctggatgaaagcagcagtacagtacccacctaatttgtatcggtgtcgggacattgtaccatgccgttcttttgtatcggtttgtcactcactcactccgcgagccagcagcccagcacacgatccatcgtgtcattttggcaacgtcatacagatacaaaaaactgcatgtgcagcagatgtgctctgttctctcctgcagagcgatgaacgcgtacgcgcacggtagcaagcaggcgag

SEQ ID NO: 59851 - DNA, 1001 bp, Zea Mays
atatgtctgtgaagggacctaagtacctacctggacaagtgagagcattaggaatggtagctggaggatcaggcattactccaatgttccaagtcacaagggcaattcttgagaacccaaaggacaacacgaaagtacacttaatctatgcaaatgtcacgtatgaggatattcttctgaaggaagaacttgacggcatggccaaaaactatcctgatcgtttcaagatctactatgtcttgaatcagcctcctgaagtctgggacggtggcgtcgggttcgtgtcgaaggaaatgatccagactcattgcccagcgcctgccgccgacattcaggtattgcgatgtggacctcctcccatgaacaaagccatggccgcgcacctggacgaccttggctacacgaaggagatgcagttccagttctaagcgttacattctctctaccagtaccagaataaacgggggtggaacaagtttcgtcgcctctttgagcagacgaagcctgaccatatcgccatatagctccaaacagacgcggtttgccactgacagtcacagagcgtcgtacttaaggggtgtttggtttatagggactaaactttagtctctccactttattccattttagttcataaattattaaatagggaaacttaaatagagttttagtttctatatttagtaatttagggactaaaatggaataaaatagaggactaaaaattagtccctagaaaccaaacacccctttactctacctggatgaaagcagcagtacagtacccacctaatttgtatcggtgtcgggacattgtaccatgccgttcttttgtatcggtttgtcactcactcactccgcgagccagcagcccagcacacgatccatcgtgtcattttggcaacgtcatacagatacaaaaaactgcatgtgcagcagatgtgctctgttctctcctgcagagcgatgaacgcgtacgcgcacggtagcaagcaggcgag

SEQ ID NO: 59852 - DNA, 841 bp, Zea Mays
tatgtctgtgaagggacctaaggaagaacttgacggcatggccaaaaactatcctgatcgtttcaagatctactatgtcttgaatcagcctcctgaagtctgggacggtggcgtcgggttcgtgtcgaaggaaatgatccagactcattgcccagcgcctgccgccgacattcaggtattgcgatgtggacctcctcccatgaacaaagccatggccgcgcacctggacgaccttggctacacgaaggagatgcagttccagttctaagcgttacattctctctaccagtaccagaataaacgggggtggaacaagtttcgtcgcctctttgagcagacgaagcctgaccatatcgccatatagctccaaacagacgcggtttgccactgacagtcacagagcgtcgtacttaaggggtgtttggtttatagggactaaactttagtctctccactttattccattttagttcataaattattaaatagggaaacttaaatagagttttagtttctatatttagtaatttagggactaaaatggaataaaatagaggactaaaaattagtccctagaaaccaaacacccctttactctacctggatgaaagcagcagtacagtacccacctaatttgtatcggtgtcgggacattgtaccatgccgttcttttgtatcggtttgtcactcactcactccgcgagccagcagcccagcacacgatccatcgtgtcattttggcaacgtcatacagatacaaaaaactgcatgtgcagcagatgtgctctgttctctcctgcagagcgatgaacgcgtacgcgcacggtagcaagcaggcgag

SEQ ID NO: 59853 - DNA, 842 bp, Zea Mays
gttcaattgatggtgcctatttggaagaacttgacggcatggccaaaaactatcctgatcgtttcaagatctactatgtcttgaatcagcctcctgaagtctgggacggtggcgtcgggttcgtgtcgaaggaaatgatccagactcattgcccagcgcctgccgccgacattcaggtattgcgatgtggacctcctcccatgaacaaagccatggccgcgcacctggacgaccttggctacacgaaggagatgcagttccagttctaagcgttacattctctctaccagtaccagaataaacgggggtggaacaagtttcgtcgcctctttgagcagacgaagcctgaccatatcgccatatagctccaaacagacgcggtttgccactgacagtcacagagcgtcgtacttaaggggtgtttggtttatagggactaaactttagtctctccactttattccattttagttcataaattattaaatagggaaacttaaatagagttttagtttctatatttagtaatttagggactaaaatggaataaaatagaggactaaaaattagtccctagaaaccaaacacccctttactctacctggatgaaagcagcagtacagtacccacctaatttgtatcggtgtcgggacattgtaccatgccgttcttttgtatcggtttgtcactcactcactccgcgagccagcagcccagcacacgatccatcgtgtcattttggcaacgtcatacagatacaaaaaactgcatgtgcagcagatgtgctctgttctctcctgcagagcgatgaacgcgtacgcgcacggtagcaagcaggcgag

SEQ ID NO: 59854 - DNA, 3752 bp, Zea Mays
ctccctcgcgccaaacccaatccgacgagccgcacgtgcgccactcaagctctcctcccccctcccactcctctccttcccacggtcgggtcaaccacccccaccggaaaccgtgctcgcgccgcgtccgttcccgtaaacaattgctggatccccatttccccaccaagaaaagcagtagaaccgcgccggcccacgccccgctgtacagttgtcgcgctcgggcggccgagtagtttaatcctcgaggaaggaggggggcggtcgccccggatggccgtgtcctcgtcgccttcctgcagacccactcccgggaggattccgggctcttggccggggaagcggagatcggaggttctgccaggcgtacggattgggcgctggagctcctgtttgtttgaattgaattttggggaaaagcttccacctttcttctgcctttaaaaggagatggctttttcacacgacggaaagatgaagggctgtcagacaaaccttttccggacaaaggataagaaagtcgtcaagatgacagatagtgcaagctgctccacagctaagtatggatcaagcaactcaaaatcaccatcttcatcccccttccggaagctttcagaagttaggagcatacgtctcaaccattttctaagtcactcttcaaatgctacaaaatatgaacatgtcaggatatttgtctccacatggaatgttggaggaaaagcacctactgccgagttgaaactggatgactttcttcctgttgatgaccattcagacatttatgttttaggctttcaggaaattgtgcctctcaatgctggtaatgtccttgtgatagaagataacgagccagctgcaagatggcttgctcttataaaccgtgcgctaaaccaaccagttgacactgttgatgatatatttcagcataaaccatatccctccctggattcaacctcatcccggtcaacaccatgccttgatggttccttctccaaccgttcaagaacagccagtggttctataatcttccaaaagtccttgaaatccatcaagaaatcttacatgccatcccagagaaaacaactcaaattctgcaattgcccagtggaaatggccaagaaatcctacaaagatgcttgcttttggtgtccacaagcatatgccaatgacatggactcctcagaagaggatgaattggatgacaatttgaatgatatttttggccttaatgatgatggcgttacttcgtctgtttctgcctccagggaccagctaaagtataacctcatatcttgcaaacaaatggttggtatttttgtcacagtctgggcaaagaaagaattaatgcagcatattggacatttgagaacgtcctgtgttggtcgcggaataatgggatatcttggaaataagggatgtatatcagtaagcatgacactataccagacaagcttttgtttcatctgcagccatttggcttcaggtgagaaggaaggtgatgaattgaggcgaaatttagatgtgttagagattctaaggctcacacaatttcgaaggatttgcagaagagctgggcgaagaatccctgagaaaattcttgaccatgagcgggtgatatggttaggagatctgaactaccgaatttccttgagctatgaagataccaaaaaacttctgactgaaaataactgggatgccctttttgaaaaggatcagctcaatatccagcgtgcttctggaagtgtgttcaaggggtggagtgaggagaagatatattttgctcccacatacaagtactcttgcaattcagattcttatgctggagagactgccacatcaaagaaaaagaggagaaccccagcctggtatgtactacaatgtttgagatagtttcagagagttcagatctcattctcatatgataacactcgtcagtggctatgaagtatcctagagtccacaaacctctttgcaacccgaaaaccttgtgtttcccctttctgtaccatcttttgagatgagttaaatcagatttggacagcaaggtaagttgtaagcgtggggaaacacaaaagaggaatcattctcatgtgcaataaataaacaaatcaagatgattcacatattctgaattcaggaatcacacttcccaaaccatgaatacataatactattaatgtccggtttgttgcaaatgttcaggtgtgatagaatactatggcatggagatggtattgcacagttgtcctacttccggggggaatctcaattctctgaccatcgtcctgtttgtgggacatttattgttgaggttaaaaggctagatggtcaatcaaagcggcgcccatcaaacaccaacattaaaatcggtgctgaagagttgttaccgacaagagacaggcataactaaggaagcgaaggtggatccgacgccgtctgcccccgcccctggtcatcacaacatccgggcctcccgcctcctcgacaacgagatccgcgtcctcaaggacgagttgcagcggacgaaccttgagttggagtcgttcaaggagaagatcaaggaaaaccaggagaaaattaagctcaacaaacagctaccctacctcattggcaatatcgttgagaccttggaaatgaatcctgatgatgaagctgaggaggatggtgctaacattgatttagattcacaaaggaaagtaaaatgtgttgttctgaagacctccacaagacaagtacactggacagcagtgtggcttgctgagcctgcagtgagaatgcgcctaatggctgttctggttgatggatgccagggactgagcggtggtgctatggctggtgtgatccatgggcaagcacaacacggagatcctatgtttcaggagtttgcgggccgattactgcgccgggtgtgctcgccgttgtttgagatggtcaggagctgggtgctagaaggggaattggaggatgtatttgcagagttttttatcgttgggcagccagtgaattaccagccagaacgaagtttagcttgtttcagaaggaatgtagggctaggtgatctcaactataggatcaacttaccatatgagaagacacacgaactcatatccaagcaggactggaacgaattgtttgggaaagaccaggtgattaggaaccatccaagtgtgtttgagatttatcaaagaaagttgttagagcctggaaagatctcaaagaaatatattgataagttaaacaagaaggtcagcactgtacttaatgagtatttcgagaatagcaaggactatgttccgaacaagagggactagattttagcttattggcagggttcaagtcaccaaagcagattttatgtatctgaaacattggagtcaagccagagattctaaaacgtgttggagaagccatgactactctgccaaaatttcaatcctcacagggctgtgaattttttttatcaaaggcatcaaatgattgagactagagaagacattgattggacagttggtgaaacacttgtttttgctactcttatcattgaagggaaccacgtcaggttaagtggttaggatgttgagaggggtacatttagccaccgtcattctgtcatccatgaccaaactagagaatagtactacccactgtaccatcttgttatgaaccaagatgaggagatttttactatgagcaacatgtatgaacaatatggtaatggtttgttccagttatggatatgcattgcttaatag

SEQ ID NO: 59855 - DNA, 3842 bp, Zea Mays
cgcacgtgcgccactcaagctctcctcccccctcccactcctctccttcccacggtcgggtcaaccacccccaccggaaaccgtgctcgcgccgcgtccgttcccgtaaacaattgctggatccccatttccccaccaagaaaagcagtagaaccgcgccggcccacgccccgctgtacagttgtcgcgctcgggcggccgagtagtttaatcctcgaggaaggaggggggcggtcgccccggatggccgtgtcctcgtcgccttcctgcagacccactcccgggtttgaggcgtccctcctcctccgccgccgctctttccggttgcgtttgggaggaatggttgtggagttggtggattctcattctccgctggggttttaggaggattccgggctcttggccggggaagcggagatcggaggttctgccaggcgtacggattgggcgctggagctcctgtttgtttgaattgaattttggggaaaagcttccacctttcttctgcctttaaaaggagatggctttttcacacgacggaaagatgaagggctgtcagacaaaccttttccggacaaaggataagaaagtcgtcaagatgacagatagtgcaagctgctccacagctaagtatggatcaagcaactcaaaatcaccatcttcatcccccttccggaagctttcagaagttaggagcatacgtctcaaccattttctaagtcactcttcaaatgctacaaaatatgaacatgtcaggatatttgtctccacatggaatgttggaggaaaagcacctactgccgagttgaaactggatgactttcttcctgttgatgaccattcagacatttatgttttaggctttcaggaaattgtgcctctcaatgctggtaatgtccttgtgatagaagataacgagccagctgcaagatggcttgctcttataaaccgtgcgctaaaccaaccagttgacactgttgatgatatatttcagcataaaccatatccctccctggattcaacctcatcccggtcaacaccatgccttgatggttccttctccaaccgttcaagaacagccagtggttctataatcttccaaaagtccttgaaatccatcaagaaatcttacatgccatcccagagaaaacaactcaaattctgcaattgcccagtggaaatggccaagaaatcctacaaagatgcttgcttttggtgtccacaagcatatgccaatgacatggactcctcagaagaggatgaattggatgacaatttgaatgatatttttggccttaatgatgatggcgttacttcgtctgtttctgcctccagggaccagctaaagtataacctcatatcttgcaaacaaatggttggtatttttgtcacagtctgggcaaagaaagaattaatgcagcatattggacatttgagaacgtcctgtgttggtcgcggaataatgggatatcttggaaataagggatgtatatcagtaagcatgacactataccagacaagcttttgtttcatctgcagccatttggcttcaggtgagaaggaaggtgatgaattgaggcgaaatttagatgtgttagagattctaaggctcacacaatttcgaaggatttgcagaagagctgggcgaagaatccctgagaaaattcttgaccatgagcgggtgatatggttaggagatctgaactaccgaatttccttgagctatgaagataccaaaaaacttctgactgaaaataactgggatgccctttttgaaaaggatcagctcaatatccagcgtgcttctggaagtgtgttcaaggggtggagtgaggagaagatatattttgctcccacatacaagtactcttgcaattcagattcttatgctggagagactgccacatcaaagaaaaagaggagaaccccagcctggtatgtactacaatgtttgagatagtttcagagagttcagatctcattctcatatgataacactcgtcagtggctatgaagtatcctagagtccacaaacctctttgcaacccgaaaaccttgtgtttcccctttctgtaccatcttttgagatgagttaaatcagatttggacagcaaggtaagttgtaagcgtggggaaacacaaaagaggaatcattctcatgtgcaataaataaacaaatcaagatgattcacatattctgaattcaggaatcacacttcccaaaccatgaatacataatactattaatgtccggtttgttgcaaatgttcaggtgtgatagaatactatggcatggagatggtattgcacagttgtcctacttccggggggaatctcaattctctgaccatcgtcctgtttgtgggacatttattgttgaggttaaaaggctagatggtcaatcaaagcggcgcccatcaaacaccaacattaaaatcggtgctgaagagttgttaccgacaagagacaggcataactaaggaagcgaaggtggatccgacgccgtctgcccccgcccctggtcatcacaacatccgggcctcccgcctcctcgacaacgagatccgcgtcctcaaggacgagttgcagcggacgaaccttgagttggagtcgttcaaggagaagatcaaggaaaaccaggagaaaattaagctcaacaaacagctaccctacctcattggcaatatcgttgaggttctgtctctttccattcgaccttggaaatgaatcctgatgatgaagctgaggaggatggtgctaacattgatttagattcacaaaggaaagtaaaatgtgttgttctgaagacctccacaagacaagtacactggacagcagtgtggcttgctgagcctgcagtgagaatgcgcctaatggctgttctggttgatggatgccagggactgagcggtggtgctatggctggtgtgatccatgggcaagcacaacacggagatcctatgtttcaggagtttgcgggccgattactgcgccgggtgtgctcgccgttgtttgagatggtcaggagctgggtgctagaaggggaattggaggatgtatttgcagagttttttatcgttgggcagccagtgaattaccagccagaacgaagtttagcttgtttcagaaggaatgtagggctaggtgatctcaactataggatcaacttaccatatgagaagacacacgaactcatatccaagcaggactggaacgaattgtttgggaaagaccaggtgattaggaaccatccaagtgtgtttgagatttatcaaagaaagttgttagagcctggaaagatctcaaagaaatatattgataagttaaacaagaaggtcagcactgtacttaatgagtatttcgagaatagcaaggactatgttccgaacaagagggactagattttagcttattggcagggttcaagtcaccaaagcagattttatgtatctgaaacattggagtcaagccagagattctaaaacgtgttggagaagccatgactactctgccaaaatttcaatcctcacagggctgtgaattttttttatcaaaggcatcaaatgattgagactagagaagacattgattggacagttggtgaaacacttgtttttgctactcttatcattgaagggaaccacgtcaggttaagtggttaggatgttgagaggggtacatttagccaccgtcattctgtcatccatgaccaaactagagaatagtactacccactgtaccatcttgttatgaaccaagatgaggagatttttactatgagcaacatgtatgaacaatatggtaatggtttgttccagttatggatatgcattgcttaatag

SEQ ID NO: 59856 - DNA, 3789 bp, Zea Mays
tgcgccactcaagctctcctcccccctcccactcctctccttcccacggtcgggtcaaccacccccaccggaaaccgtgctcgcgccgcgtccgttcccgtaaacaattgctggatccccatttccccaccaagaaaagcagtagaaccgcgccggcccacgccccgctgtacagttgtcgcgctcgggcggccgagtagtttaatcctcgaggaaggaggggggcggtcgccccggatggccgtgtcctcgtcgccttcctgcagacccactcccgggtttgaggcgtccctcctcctccgccgccgctctttccggttgcgtttgggaggaatggttgtggagttggtggattctcattctccgctggggttttaggaggattccgggctcttggccggggaagcggagatcggaggttctgccaggcgtacggattgggcgctggagctcctgtttgtttgaattgaattttggggaaaagcttccacctttcttctgcctttaaaaggagatggctttttcacacgacggaaagatgaagggctgtcagacaaaccttttccggacaaaggataagaaagtcgtcaagatgacagatagtgcaagctgctccacagctaagtatggatcaagcaactcaaaatcaccatcttcatcccccttccggaagctttcagaagttaggagcatacgtctcaaccattttctaagtcactcttcaaatgctacaaaatatgaacatgtcaggatatttgtctccacatggaatgttggaggaaaagcacctactgccgagttgaaactggatgactttcttcctgttgatgaccattcagacatttatgttttaggctttcaggaaattgtgcctctcaatgctgcataaaccatatccctccctggattcaacctcatcccggtcaacaccatgccttgatggttccttctccaaccgttcaagaacagccagtggttctataatcttccaaaagtccttgaaatccatcaagaaatcttacatgccatcccagagaaaacaactcaaattctgcaattgcccagtggaaatggccaagaaatcctacaaagatgcttgcttttggtgtccacaagcatatgccaatgacatggactcctcagaagaggatgaattggatgacaatttgaatgatatttttggccttaatgatgatggcgttacttcgtctgtttctgcctccagggaccagctaaagtataacctcatatcttgcaaacaaatggttggtatttttgtcacagtctgggcaaagaaagaattaatgcagcatattggacatttgagaacgtcctgtgttggtcgcggaataatgggatatcttggaaataagggatgtatatcagtaagcatgacactataccagacaagcttttgtttcatctgcagccatttggcttcaggtgagaaggaaggtgatgaattgaggcgaaatttagatgtgttagagattctaaggctcacacaatttcgaaggatttgcagaagagctgggcgaagaatccctgagaaaattcttgaccatgagcgggtgatatggttaggagatctgaactaccgaatttccttgagctatgaagataccaaaaaacttctgactgaaaataactgggatgccctttttgaaaaggatcagctcaatatccagcgtgcttctggaagtgtgttcaaggggtggagtgaggagaagatatattttgctcccacatacaagtactcttgcaattcagattcttatgctggagagactgccacatcaaagaaaaagaggagaaccccagcctggtatgtactacaatgtttgagatagtttcagagagttcagatctcattctcatatgataacactcgtcagtggctatgaagtatcctagagtccacaaacctctttgcaacccgaaaaccttgtgtttcccctttctgtaccatcttttgagatgagttaaatcagatttggacagcaaggtaagttgtaagcgtggggaaacacaaaagaggaatcattctcatgtgcaataaataaacaaatcaagatgattcacatattctgaattcaggaatcacacttcccaaaccatgaatacataatactattaatgtccggtttgttgcaaatgttcaggtgtgatagaatactatggcatggagatggtattgcacagttgtcctacttccggggggaatctcaattctctgaccatcgtcctgtttgtgggacatttattgttgaggttaaaaggctagatggtcaatcaaagcggcgcccatcaaacaccaacattaaaatcggtgctgaagagttgttaccgacaagagacaggcataactaaggtgctggggcggggcccaaatcaccgattaaagctaggtttttgtgtgacttgggaacacaacaccgcggaaccttcgaagcgaaggtggatccgacgccgtctgcccccgcccctggtcatcacaacatccgggcctcccgcctcctcgacaacgagatccgcgtcctcaaggacgagttgcagcggacgaaccttgagttggagtcgttcaaggagaagatcaaggaaaaccaggagaaaattaagctcaacaaacagctaccctacctcattggcaatatcgttgagaccttggaaatgaatcctgatgatgaagctgaggaggatggtgctaacattgatttagattcacaaaggaaagtaaaatgtgttgttctgaagacctccacaagacaagtacactggacagcagtgtggcttgctgagcctgcagtgagaatgcgcctaatggctgttctggttgatggatgccagggactgagcggtggtgctatggctggtgtgatccatgggcaagcacaacacggagatcctatgtttcaggagtttgcgggccgattactgcgccgggtgtgctcgccgttgtttgagatggtcaggagctgggtgctagaaggggaattggaggatgtatttgcagagttttttatcgttgggcagccagtgaattaccagccagaacgaagtttagcttgtttcagaaggaatgtagggctaggtgatctcaactataggatcaacttaccatatgagaagacacacgaactcatatccaagcaggactggaacgaattgtttgggaaagaccaggtgattaggaaccatccaagtgtgtttgagatttatcaaagaaagttgttagagcctggaaagatctcaaagaaatatattgataagttaaacaagaaggtcagcactgtacttaatgagtatttcgagaatagcaaggactatgttccgaacaagagggactagattttagcttattggcagggttcaagtcaccaaagcagattttatgtatctgaaacattggagtcaagccagagattctaaaacgtgttggagaagccatgactactctgccaaaatttcaatcctcacagggctgtgaattttttttatcaaaggcatcaaatgattgagactagagaagacattgattggacagttggtgaaacacttgtttttgctactcttatcattgaagggaaccacgtcaggttaagtggttaggatgttgagaggggtacatttagccaccgtcattctgtcatccatgaccaaactagagaatagtactacccactgtaccatcttgttatgaaccaagatgaggagatttttactatgagcaacatgtatgaacaatatggtaatggtttgttccagttatggatatgcattgcttaatag

SEQ ID NO: 59857 - DNA, 2390 bp, Zea Mays
gtacagttgtcgcgctcgggcggccgagtagtttaatcctcgaggaaggaggggggcggtcgccccggatggccgtgtcctcgtcgccttcctgcagacccactcccgggtttgaggcgtccctcctcctccgccgccgctctttccggttgcgtttgggaggaatggttgtggagttggtggattctcattctccgctggggttttaggaggattccgggctcttggccggggaagcggagatcggaggttctgccaggcgtacggattgggcgctggagctcctgtttgtttgaattgaattttggggaaaagcttccacctttcttctgcctttaaaaggagatggctttttcacacgacggaaagatgaagggctgtcagacaaaccttttccggacaaaggataagaaagtcgtcaagatgacagatagtgcaagctgctccacagctaagtatggatcaagcaactcaaaatcaccatcttcatcccccttccggaagctttcagaagttaggagcatacgtctcaaccattttctaagtcactcttcaaatgctacaaaatatgaacatgtcaggatatttgtctccacatggaatgttggaggaaaagcacctactgccgagttgaaactggatgactttcttcctgttgatgaccattcagacatttatgttttaggctttcaggaaattgtgcctctcaatgctggtaatgtccttgtgatagaagataacgagccagctgcaagatggcttgctcttataaaccgtgcgctaaaccaaccagttgacactgttgatgatatatttcagcataaaccatatccctccctggattcaacctcatcccggtcaacaccatgccttgatggttccttctccaaccgttcaagaacagccagtggttctataatcttccaaaagtccttgaaatccatcaagaaatcttacatgccatcccagagaaaacaactcaaattctgcaattgcccagtggaaatggccaagaaatcctacaaagatgcttgcttttggtgtccacaagcatatgccaatgacatggactcctcagaagaggatgaattggatgacaatttgaatgatatttttggccttaatgatgatggcgttacttcgtctgtttctgcctccagggaccagctaaagtataacctcatatcttgcaaacaaatggttggtatttttgtcacagtctgggcaaagaaagaattaatgcagcatattggacatttgagaacgtcctgtgttggtcgcggaataatgggatatcttggaaataagggatgtatatcagtaagcatgacactataccagacaagcttttgtttcatctgcagccatttggcttcaggtgagaaggaaggtgatgaattgaggcgaaatttagatgtgttagagattctaaggctcacacaatttcgaaggatttgcagaagagctgggcgaagaatccctgagaaaattcttgaccatgagcgggtgatatggttaggagatctgaactaccgaatttccttgagctatgaagataccaaaaaacttctgactgaaaataactgggatgccctttttgaaaaggatcagctcaatatccagcgtgcttctggaagtgtgttcaaggggtggagtgaggagaagatatattttgctcccacatacaagtactcttgcaattcagattcttatgctggagagactgccacatcaaagaaaaagaggagaaccccagcctgaatactatggcatggagatggtattgcacagttgtcctacttccggggggaatctcaattctctgaccatcgtcctgtttgtgggacatttattgttgaggttaaaaggctagatggtcaatcaaagcggcgcccatcaaacaccaacattaaaatcggtgctgaagagttgttaccgacaagagacaggcataactaaggtgctggggcggggcccaaatcaccgattaaagctaggtttttgtgtgacttgggaacacaacaccgcggaaccttcgtaaggacgctaagctatctgttcctcgaggaaattacctgtgaccatagaaatatgattaaagatcatatgcttattattatgttgttgttattgtacatcatatagtcgcgtacagttttgaaaggaacattagtcattagtttatattgtatacttgtaaaacttcctcacagggttgttttggttttcatttctacttctttcatttgtgtaatttccaaagttcaacagagtagccaaagcatgttcgctttctttgttgtactgtacaaagtttgtattttgacctttgtaggggtcaagttttgaatttgtgtatcagccttgctggaaggagtttaattgtacaa

SEQ ID NO: 59858 - DNA, 3756 bp, Zea Mays
gtacagttgtcgcgctcgggcggccgagtagtttaatcctcgaggaaggaggggggcggtcgccccggatggccgtgtcctcgtcgccttcctgcagacccactcccgggtttgaggcgtccctcctcctccgccgccgctctttccggttgcgtttgggaggaatggttgtggagttggtggattctcattctccgctggggttttaggaggattccgggctcttggccggggaagcggagatcggaggttctgccaggcgtacggattgggcgctggagctcctgtttgtttgaattgaattttggggaaaagcttccacctttcttctgcctttaaaaggagatggctttttcacacgacggaaagatgaagggctgtcagacaaaccttttccggacaaaggataagaaagtcgtcaagatgacagatagtgcaagctgctccacagctaagtatggatcaagcaactcaaaatcaccatcttcatcccccttccggaagctttcagaagttaggagcatacgtctcaaccattttctaagtcactcttcaaatgctacaaaatatgaacatgtcaggatatttgtctccacatggaatgttggaggaaaagcacctactgccgagttgaaactggatgactttcttcctgttgatgaccattcagacatttatgttttaggctttcaggaaattgtgcctctcaatgctggtaatgtccttgtgatagaagataacgagccagctgcaagatggcttgctcttataaaccgtgcgctaaaccaaccagttgacactgttgatgatatatttcagcataaaccatatccctccctggattcaacctcatcccggtcaacaccatgccttgatggttccttctccaaccgttcaagaacagccagtggttctataatcttccaaaagtccttgaaatccatcaagaaatcttacatgccatcccagagaaaacaactcaaattctgcaattgcccagtggaaatggccaagaaatcctacaaagatgcttgcttttggtgtccacaagcatatgccaatgacatggactcctcagaagaggatgaattggatgacaatttgaatgatatttttggccttaatgatgatggcgttacttcgtctgtttctgcctccagggaccagctaaagtataacctcatatcttgcaaacaaatggttggtatttttgtcacagtctgggcaaagaaagaattaatgcagcatattggacatttgagaacgtcctgtgttggtcgcggaataatgggatatcttggaaataagggatgtatatcagtaagcatgacactataccagacaagcttttgtttcatctgcagccatttggcttcaggtgagaaggaaggtgatgaattgaggcgaaatttagatgtgttagagattctaaggctcacacaatttcgaaggatttgcagaagagctgggcgaagaatccctgagaaaattcttgaccatgagcgggtgatatggttaggagatctgaactaccgaatttccttgagctatgaagataccaaaaaacttctgactgaaaataactgggatgccctttttgaaaaggatcagctcaatatccagcgtgcttctggaagtgtgttcaaggggtggagtgaggagaagatatattttgctcccacatacaagtactcttgcaattcagattcttatgctggagagactgccacatcaaagaaaaagaggagaaccccagcctggtatgtactacaatgtttgagatagtttcagagagttcagatctcattctcatatgataacactcgtcagtggctatgaagtatcctagagtccacaaacctctttgcaacccgaaaaccttgtgtttcccctttctgtaccatcttttgagatgagttaaatcagatttggacagcaaggtaagttgtaagcgtggggaaacacaaaagaggaatcattctcatgtgcaataaataaacaaatcaagatgattcacatattctgaattcaggaatcacacttcccaaaccatgaatacataatactattaatgtccggtttgttgcaaatgttcaggtgtgatagaatactatggcatggagatggtattgcacagttgtcctacttccggggggaatctcaattctctgaccatcgtcctgtttgtgggacatttattgttgaggttaaaaggctagatggtcaatcaaagcggcgcccatcaaacaccaacattaaaatcggtgctgaagagttgttaccgacaagagacaggcataactaaggaagcgaaggtggatccgacgccgtctgcccccgcccctggtcatcacaacatccgggcctcccgcctcctcgacaacgagatccgcgtcctcaaggacgagttgcagcggacgaaccttgagttggagtcgttcaaggagaagatcaaggaaaaccaggagaaaattaagctcaacaaacagctaccctacctcattggcaatatcgttgagaccttggaaatgaatcctgatgatgaagctgaggaggatggtgctaacattgatttagattcacaaaggaaagtaaaatgtgttgttctgaagacctccacaagacaagtacactggacagcagtgtggcttgctgagcctgcagtgagaatgcgcctaatggctgttctggttgatggatgccagggactgagcggtggtgctatggctggtgtgatccatgggcaagcacaacacggagatcctatgtttcaggagtttgcgggccgattactgcgccgggtgtgctcgccgttgtttgagatggtcaggagctgggtgctagaaggggaattggaggatgtatttgcagagttttttatcgttgggcagccagtgaattaccagccagaacgaaggtgatgagatggcgtcaaaggtagcttttgatcacccagaacgattctccgaaaagttcgagttcagtgcagccaacattgagcccctggttcagacatgcatgacaactctatcctcaaagataaggaatgtagggctaggtgatctcaactataggatcaacttaccatatgagaagacacacgaactcatatccaagcaggactggaacgaattgtttgggaaagaccaggtgattaggaaccatccaagtgtgtttgagatttatcaaagaaagttgttagagcctggaaagatctcaaagaaatatattgataagttaaacaagaaggtcagcactgtacttaatgagtatttcgagaatagcaaggactatgttccgaacaagagggactagattttagcttattggcagggttcaagtcaccaaagcagattttatgtatctgaaacattggagtcaagccagagattctaaaacgtgttggagaagccatgactactctgccaaaatttcaatcctcacagggctgtgaattttttttatcaaaggcatcaaatgattgagactagagaagacattgattggacagttggtgaaacacttgtttttgctactcttatcattgaagggaaccacgtcaggttaagtggttaggatgttgagaggggtacatttagccaccgtcattctgtcatccatgaccaaactagagaatagtactacccactgtaccatcttgttatgaaccaagatgaggagatttttactatgagcaacatgtatgaacaatatggtaatggtttgttccagttatggatatgcattgcttaatag

SEQ ID NO: 59859 - DNA, 3933 bp, Zea Mays
gtacagttgtcgcgctcgggcggccgagtagtttaatcctcgaggaaggaggggggcggtcgccccggatggccgtgtcctcgtcgccttcctgcagacccactcccgggtttgaggcgtccctcctcctccgccgccgctctttccggttgcgtttgggaggaatggttgtggagttggtggattctcattctccgctggggttttaggaggattccgggctcttggccggggaagcggagatcggaggttctgccaggcgtacggattgggcgctggagctcctgtttgtttgaattgaattttggggaaaagcttccacctttcttctgcctttaaaaggagatggctttttcacacgacggaaagatgaagggctgtcagacaaaccttttccggacaaaggataagaaagtcgtcaagatgacagatagtgcaagctgctccacagctaagtatggatcaagcaactcaaaatcaccatcttcatcccccttccggaagctttcagaagttaggagcatacgtctcaaccattttctaagtcactcttcaaatgctacaaaatatgaacatgtcaggatatttgtctccacatggaatgttggaggaaaagcacctactgccgagttgaaactggatgactttcttcctgttgatgaccattcagacatttatgttttaggctttcaggaaattgtgcctctcaatgctggtaatgtccttgtgatagaagataacgagccagctgcaagatggcttgctcttataaaccgtgcgctaaaccaaccagttgacactgttgatgatatatttcagcataaaccatatccctccctggattcaacctcatcccggtcaacaccatgccttgatggttccttctccaaccgttcaagaacagccagtggttctataatcttccaaaagtccttgaaatccatcaagaaatcttacatgccatcccagagaaaacaactcaaattctgcaattgcccagtggaaatggccaagaaatcctacaaagatgcttgcttttggtgtccacaagcatatgccaatgacatggactcctcagaagaggatgaattggatgacaatttgaatgatatttttggccttaatgatgatggcgttacttcgtctgtttctgcctccagggaccagctaaagtataacctcatatcttgcaaacaaatggttggtatttttgtcacagtctgggcaaagaaagaattaatgcagcatattggacatttgagaacgtcctgtgttggtcgcggaataatgggatatcttggaaataagggatgtatatcagtaagcatgacactataccagacaagcttttgtttcatctgcagccatttggcttcaggtgagaaggaaggtgatgaattgaggcgaaatttagatgtgttagagattctaaggctcacacaatttcgaaggatttgcagaagagctgggcgaagaatccctgagaaaattcttgaccatgagcgggtgatatggttaggagatctgaactaccgaatttccttgagctatgaagataccaaaaaacttctgactgaaaataactgggatgccctttttgaaaaggatcagctcaatatccagcgtgcttctggaagtgtgttcaaggggtggagtgaggagaagatatattttgctcccacatacaagtactcttgcaattcagattcttatgctggagagactgccacatcaaagaaaaagaggagaaccccagcctggtatgtactacaatgtttgagatagtttcagagagttcagatctcattctcatatgataacactcgtcagtggctatgaagtatcctagagtccacaaacctctttgcaacccgaaaaccttgtgtttcccctttctgtaccatcttttgagatgagttaaatcagatttggacagcaaggtaagttgtaagcgtggggaaacacaaaagaggaatcattctcatgtgcaataaataaacaaatcaagatgattcacatattctgaattcaggaatcacacttcccaaaccatgaatacataatactattaatgtccggtttgttgcaaatgttcaggtgtgatagaatactatggcatggagatggtattgcacagttgtcctacttccggggggaatctcaattctctgaccatcgtcctgtttgtgggacatttattgttgaggttaaaaggctagatggtcaatcaaagcggcgcccatcaaacaccaacattaaaatcggtgctgaagagttgttaccgacaagagacaggcataactaaggaagcgaaggtggatccgacgccgtctgcccccgcccctggtcatcacaacatccgggcctcccgcctcctcgacaacgagatccgcgtcctcaaggacgagttgcagcggacgaaccttgagttggagtcgttcaaggagaagatcaaggaaaaccaggagaaaattaagctcaacaaacagctaccctacctcattggcaatatcgttgagaccttggaaatgaatcctgatgatgaagctgaggaggatggtgctaacattgatttagattcacaaaggaaagtaaaatgtgttgttctgaagacctccacaagacaagtacactggacagcagtgtggcttgctgagcctgcagtgagaatgcgcctaatggctgttctggttgatggatgccagggactgagcggtggtgctatggctggtgtgatccatgggcaagcacaacacggagatcctatgtttcaggagtttgcgggccgattactgcgccgggtgtgctcgccgttgtttgagatggtcaggagctgggtgctagaaggggaattggaggatgtatttgcagagttttttatcgttgggcagccagtgaattaccagccagaacgaagtttagcttgtttcagaaggaatgtagggctaggtgatctcaactataggatcaacttaccatatgagaagacacacgaactcatatccaagcaggactggaacgaattgtttgggaaagaccagatgtgatctctagaatgtgctttgtaagcggctacatcaaaggaaaggaaatctttatgaagaccagagaactctagcaggctgtctgaagacaaatgtgctagctgaaatgactggcctaaggtgatgatttggaggccatggttcatgtttgtgagctcgttgcagaatggcgacagccatttcattcaaatgtagtggtgcacattgtatgctactgacgatttggccataatgaaattgatgagccgcccctcagtccctcacccaacctaagatgtacaaggtgattaggaaccatccaagtgtgtttgagatttatcaaagaaagttgttagagcctggaaagatctcaaagaaatatattgataagttaaacaagaaggtcagcactgtacttaatgagtatttcgagaatagcaaggactatgttccgaacaagagggactagattttagcttattggcagggttcaagtcaccaaagcagattttatgtatctgaaacattggagtcaagccagagattctaaaacgtgttggagaagccatgactactctgccaaaatttcaatcctcacagggctgtgaattttttttatcaaaggcatcaaatgattgagactagagaagacattgattggacagttggtgaaacacttgtttttgctactcttatcattgaagggaaccacgtcaggttaagtggttaggatgttgagaggggtacatttagccaccgtcattctgtcatccatgaccaaactagagaatagtactacccactgtaccatcttgttatgaaccaagatgaggagatttttactatgagcaacatgtatgaacaatatggtaatggtttgttccagttatggatatgcattgcttaatag

SEQ ID NO: 59860 - DNA, 1290 bp, Zea Mays
tgacaactctatcctcaaagatagctgaagaaggggcatctgtttgaaggatggactgaaggggtcatcaacttttgggtgctattaaagtgttcatataccaaacacagttttgctttatatgttgtcacctgacctatggagaaaaggaaggagatgaactaaaaaggaatgctgatgttcaagaaatccactggaggacaatatttaatccagtttcgagagtcaacatgcctaaaacgatatatgatcatgacttgtttcagaaggaatgtagggctaggtgatctcaactataggatcaacttaccatatgagaagacacacgaactcatatccaagcaggactggaacgaattgtttgggaaagaccagatgtgatctctagaatgtgctttgtaagcggctacatcaaaggaaaggaaatctttatgaagaccagagaactctagcaggctgtctgaagacaaatgtgctagctgaaatgactggcctaagacctgtaaattgtaaaattaaaggtgatgatttggaggccatggttcatgtttgtgagctcgttgcagaatggcgacagccatttcattcaaatgtagtggtgcacattgtatgctactgacgatttggccataatgaaattgatgagccgcccctcagtccctcacccaacctaagatgtacaaggtgattaggaaccatccaagtgtgtttgagatttatcaaagaaagttgttagagcctggaaagatctcaaagaaatatattgataagttaaacaagaaggtcagcactgtacttaatgagtatttcgagaatagcaaggactatgttccgaacaagagggactagattttagcttattggcagggttcaagtcaccaaagcagattttatgtatctgaaacattggagtcaagccagagattctaaaacgtgttggagaagccatgactactctgccaaaatttcaatcctcacagggctgtgaattttttttatcaaaggcatcaaatgattgagactagagaagacattgattggacagttggtgaaacacttgtttttgctactcttatcattgaagggaaccacgtcaggttaagtggttaggatgttgagaggggtacatttagccaccgtcattctgtcatccatgaccaaactagagaatagtactacccactgtaccatcttgttatgaaccaagatgaggagatttttactatgagcaacatgtatgaacaatatggtaatggtttgttccagttatggatatgcattgcttaatag

SEQ ID NO: 59861 - DNA, 1224 bp, Zea Mays
cttttgggtgctattaaagtgttcatataccaaacacagttttgctttatatgttgtcacctgacctatggagaaaaggaaggagatgaactaaaaaggaatgctgatgttcaagaaatccactggaggacaatatttaatccagtttcgagagtcaacatgcctaaaacgatatatgatcatgatttagcttgtttcagaaggaatgtagggctaggtgatctcaactataggatcaacttaccatatgagaagacacacgaactcatatccaagcaggactggaacgaattgtttgggaaagaccagatgtgatctctagaatgtgctttgtaagcggctacatcaaaggaaaggaaatctttatgaagaccagagaactctagcaggctgtctgaagacaaatgtgctagctgaaatgactggcctaagacctgtaaattgtaaaattaaaggtgatgatttggaggccatggttcatgtttgtgagctcgttgcagaatggcgacagccatttcattcaaatgtagtggtgcacattgtatgctactgacgatttggccataatgaaattgatgagccgcccctcagtccctcacccaacctaagatgtacaaggtgattaggaaccatccaagtgtgtttgagatttatcaaagaaagttgttagagcctggaaagatctcaaagaaatatattgataagttaaacaagaaggtcagcactgtacttaatgagtatttcgagaatagcaaggactatgttccgaacaagagggactagattttagcttattggcagggttcaagtcaccaaagcagattttatgtatctgaaacattggagtcaagccagagattctaaaacgtgttggagaagccatgactactctgccaaaatttcaatcctcacagggctgtgaattttttttatcaaaggcatcaaatgattgagactagagaagacattgattggacagttggtgaaacacttgtttttgctactcttatcattgaagggaaccacgtcaggttaagtggttaggatgttgagaggggtacatttagccaccgtcattctgtcatccatgaccaaactagagaatagtactacccactgtaccatcttgttatgaaccaagatgaggagatttttactatgagcaacatgtatgaacaatatggtaatggtttgttccagttatggatatgcattgcttaatag

SEQ ID NO: 59862 - DNA, 797 bp, Zea Mays
ctgatgttcaagaaatccactggaggacaatatttaatccagtttcgagagtcaacatgcctaaaacgatatatgatcatgaaaggaatgtagggctaggtgatctcaactataggatcaacttaccatatgagaagacacacgaactcatatccaagcaggactggaacgaattgtttgggaaagaccaggtgattaggaaccatccaagtgtgtttgagatttatcaaagaaagttgttagagcctggaaagatctcaaagaaatatattgataagttaaacaagaaggtcagcactgtacttaatgagtatttcgagaatagcaaggactatgttccgaacaagagggactagattttagcttattggcagggttcaagtcaccaaagcagattttatgtatctgaaacattggagtcaagccagagattctaaaacgtgttggagaagccatgactactctgccaaaatttcaatcctcacagggctgtgaattttttttatcaaaggcatcaaatgattgagactagagaagacattgattggacagttggtgaaacacttgtttttgctactcttatcattgaagggaaccacgtcaggttaagtggttaggatgttgagaggggtacatttagccaccgtcattctgtcatccatgaccaaactagagaatagtactacccactgtaccatcttgttatgaaccaagatgaggagatttttactatgagcaacatgtatgaacaatatggtaatggtttgttccagttatggatatgcattgcttaatag

SEQ ID NO: 59863 - DNA, 806 bp, Zea Mays
ttcaagaaatccactggaggacaatatttaatccagtttcgagagtcaacatgcctaaaacgatatatgatcatgatttagcttgtttcagaaggaatgtagggctaggtgatctcaactataggatcaacttaccatatgagaagacacacgaactcatatccaagcaggactggaacgaattgtttgggaaagaccaggtgattaggaaccatccaagtgtgtttgagatttatcaaagaaagttgttagagcctggaaagatctcaaagaaatatattgataagttaaacaagaaggtcagcactgtacttaatgagtatttcgagaatagcaaggactatgttccgaacaagagggactagattttagcttattggcagggttcaagtcaccaaagcagattttatgtatctgaaacattggagtcaagccagagattctaaaacgtgttggagaagccatgactactctgccaaaatttcaatcctcacagggctgtgaattttttttatcaaaggcatcaaatgattgagactagagaagacattgattggacagttggtgaaacacttgtttttgctactcttatcattgaagggaaccacgtcaggttaagtggttaggatgttgagaggggtacatttagccaccgtcattctgtcatccatgaccaaactagagaatagtactacccactgtaccatcttgttatgaaccaagatgaggagatttttactatgagcaacatgtatgaacaatatggtaatggtttgttccagttatggatatgcattgcttaatag

SEQ ID NO: 59864 - DNA, 799 bp, Zea Mays
caagaaatccactggaggacaatatttaatccagtttcgagagtcaacatgcctaaaacgatatatgatcatgacttgtttcagaaggaatgtagggctaggtgatctcaactataggatcaacttaccatatgagaagacacacgaactcatatccaagcaggactggaacgaattgtttgggaaagaccaggtgattaggaaccatccaagtgtgtttgagatttatcaaagaaagttgttagagcctggaaagatctcaaagaaatatattgataagttaaacaagaaggtcagcactgtacttaatgagtatttcgagaatagcaaggactatgttccgaacaagagggactagattttagcttattggcagggttcaagtcaccaaagcagattttatgtatctgaaacattggagtcaagccagagattctaaaacgtgttggagaagccatgactactctgccaaaatttcaatcctcacagggctgtgaattttttttatcaaaggcatcaaatgattgagactagagaagacattgattggacagttggtgaaacacttgtttttgctactcttatcattgaagggaaccacgtcaggttaagtggttaggatgttgagaggggtacatttagccaccgtcattctgtcatccatgaccaaactagagaatagtactacccactgtaccatcttgttatgaaccaagatgaggagatttttactatgagcaacatgtatgaacaatatggtaatggtttgttccagttatggatatgcattgcttaatag

SEQ ID NO: 59865 - DNA, 1041 bp, Zea Mays
cgtccgctgctaaaccctagtgagccgcccatttgcgccgccgcagcccgcagtcgcttgcgcgcagcagcacttcgcaccgccgccccatcccattgccgccagtgtctgctcgatccgatggctcccacgaagaaaagaagagcacagagagcatcaacaacaagctgcagctggtgatgaagagcggcaagtacaccctgggctacaagaccgtcctcaagacgctgcgcaactccaagggaaagctgatcatcatcgcaaacaactgccctccacttaggaagtctgagattgagtactacgccatgctggccaaagttagtgtgcaccatttccacggaaacaatgttgatcttggcactgcctgcggcaagtactacagggtgtgctgcctcagtatcatcgacccaggtgactcggacatcatcagtaccacccctggcacccagtgagccagccccggcacccattgcagctgcttcgcctttctcaagatgagatgagatgtagcgctccggccctatgtccgtttcctttttttatcttttagctatgtaattttgctaccatgtgtccatctaccatactgatagtacctcttattatggctgctatgcaaggcatatccatggttttgtttgatgagatggttgtacttgttctcttgttgatgttgatcggatcaggtcaatcgatgcgctgatgggctgcttggttatgctgtttgtctttgttacgaatcacaaaccacaaacccgtgcctcgtttctcagtttcttgttcatatttaagacattatactctaaaacattatcatcgtgtcgccaagaacagaagccttctacatcatgatttcgacagaagcagtagaaaaaaggattgtaggatggagcatctgctccggtatcgatcatattcttgactcgcccaaacaccacaacgaaccacctctaaagctgccgcagctatctctcctctggtaaaccagcttcccaaccgaaataaatatatgaccatagatcaataaattagccactg

SEQ ID NO: 59866 - DNA, 2061 bp, Zea Mays
aatcccaccattaccgcgtccacgctatgacgtcgccctcgtaatcaatctccgcctccctgcctgcttaccccgaccccgtcggcatctcggagaatcgcggcggtcaaagcccagcctaccccacctcgcgccgcgtcgccgcggtttccgcgggccagtgctctcgggagtcgggagctcagatcaggagggacgggctaggtagggttcgcgagcgagcgagggtgctgccgtccggcgccggtgtccgagtagcaagaggagagatggacgcgttcctgcagaggctcaagcggttggacgcgtaccccaaggtgaacgaggacttctacaagcggacgctctccggcggcatcgtcacgctcgtcgccgccgtcgtcatgctgcttctcttcatctccgagaccaggtcatatttttattcagcaacagagactaagttagttgtggacacatcaagaggagaaaggctacgagtaaattttgatattacttttctgagcattccttgcaccctcctcagcgttgatacaatggatattagtggagaacagcaccaggacattaggcatgacatcgaaaagatacgattagatgcacatggtaatgttattgaagcaagaaaagttagcattggtggagcaaagatcgagagaccattgcaaaaacatggaggaaggctcgacaaaggtgaacaatattgtgtcggatgaacaatgttgtaattcttgcgaagaagtccgggaggcatataagaagaaaggatgggctctgacaaatcctgacctaattgaccagtgcgcaagagaggattttgttgagagagttaaaactcagcaagatgaaggctgcaatgtccatggttttttagatgtcagtaaagttgctggaaattttcactttgccccaggcaaaggtttttatgaatcgaacatagatgtgcctgagctgtcattacttgaaggtggtttcaatattacccacaaaataaacaaactgtcctttgggacagaattccctggtgttgtcaatccacttgatggtgctcagtggacacagccagcttcagatgggacataccagtatttcataaaagttgtccctacaatatacactgatataagaggacacaatattcattcgaaccagttctcggtaacggaacattttagggatggaaatgttcgtccgaaaccccaacctggagtttttttcttctatgatttctcacctataaaggtgatattcacagaagaaagtagatccctactccactacctgacaaacctttgtgctatagtgggaggtgtgttcactgtctcgggtatcatcgactcgtttatataccacggacagaaggcactcaagaagaaaatggagctaggtaaatacagatgatcaacatcgaccttgtactggccccatcgtttccaagttttgtggcatgtaaggaggggatatgcctgctaaatacgacaagatgccacttacattgctgaggttgcaatttgcaaggccatcagactgatgttattgcacgtgagctgatcagataacatgtaaaaagacaatgaatagcctggtctggggggagtgctttgatgtccatcattgttcactgacattgaaatggcccgaaccggtgcggtggagtaatttgagttcggaggtggatatatcatagatcatagaatgtttcttatgaaagtttcttcaaggaaacagcttcactcatggtgtcacccatactttgttcatttggtagtgctgctcttcaggaagaactggaacgattcgattgattatgttgcttttttcctaatgaccttggaggattcccttttctcgttttattttcagcagagctatccagtaaatatatattaactgtaatagtgattttttagttctacctacaattcattaggggtgggccaatgcaaaggtatactacaaattagaagatagcttattatgattgatttcattagattaatataagcctagctgtttggtaacctatattattggaggtgttgaaaagaaaaattaaaataa

SEQ ID NO: 59867 - DNA, 652 bp, Zea Mays
ccgcgtccacgctatgacgtcgccctcgtaatcaatctccgcctccctgcctgcttaccccgaccccgtcggcatctcggagaatcgcggcggtcaaagcccagcctaccccacctcgcgccgcgtcgccgcggtttccgcgggccagtgctctcgggagtcgggagctcagatcaggagggacgggctaggtagggttcgcgagcgagcgagggtgctgccgtccggcgccggtgtccgagtagcaagaggagagatggacgcgttcctgcagaggctcaagcggttggacgcgtaccccaaggtgaacgaggacttctacaagcggacgctctccggcggcatcgtcacgctcgtcgccgccgtcgtcatgctgcttctcttcatctccgagaccaggtcatatttttattcagcaacagagactaagttagttgtggacacatcaagaggagaaaggctacgagtaaattttgatattacttttctgagcattccttgcaccctcctcagcgttgatacaatggatattagtggagaacagcaccaggacattaggcatgacatcgaaaagatacgattagatgcacatggtaatgttattgaagcaagaaaagttagcattggtggagcaaagaaaaaatatctgtat

SEQ ID NO: 59868 - DNA, 1774 bp, Zea Mays
ccgcgtccacgctatgacgtcgccctcgtaatcaatctccgcctccctgcctgcttaccccgaccccgtcggcatctcggagaatcgcggcggtcaaagcccagcctaccccacctcgcgccgcgtcgccgcggtttccgcgggccagtgctctcgggagtcgggagctcagatcaggagggacgggctaggtagggttcgcgagcgagcgagggtgctgccgtccggcgccggtgtccgagtagcaagaggagagatggacgcgttcctgcagaggctcaagcggttggacgcgtaccccaaggtgaacgaggacttctacaagcggacgctctccggcggcatcgtcacgctcgtcgccgccgtcgtcatgctgcttctcttcatctccgagaccaggtcatatttttattcagcaacagagactaagttagttgtggacacatcaagaggagaaaggctacgagtaaattttgatattacttttctgagcattccttgcaccctcctcagcgttgatacaatggatattagtggagaacagcaccaggacattaggcatgacatcgaaaagatacgattagatgcacatggtaatgttattgaagcaagaaaagttagcattggtggagcaaagatcgagagaccattgcaaaaacatggaggaaggctcgacaaaggtgaacaatattgtggtacgtgttatggtgctgaggagtcggatgaacaatgttgtaattcttgcgaagaagtccgggaggcatataagaagaaaggatgggctctgacaaatcctgacctaattgaccaggttgtccctacaatatacactgatataagaggacacaatattcattcgaaccagttctcggtaacggaacattttagggatggaaatgttcgtccgaaaccccaacctggagtttttttcttctatgatttctcacctataaaggtgatattcacagaagaaagtagatccctactccactacctgacaaacctttgtgctatagtgggaggtgtgttcactgtctcgggtatcatcgactcgtttatataccacggacagaaggcactcaagaagaaaatggagctaggtaaatacagatgatcaacatcgaccttgtactggccccatcgtttccaagttttgtggcatgtaaggaggggatatgcctgctaaatacgacaagatgccacttacattgctgaggttgcaatttgcaaggccatcagactgatgttattgcacgtgagctgatcagataacatgtaaaaagacaatgaatagcctggtctggggggagtgctttgatgtccatcattgttcactgacattgaaatggcccgaaccggtgcggtggagtaatttgagttcggaggtggatatatcatagatcatagaatgtttcttatgaaagtttcttcaaggaaacagcttcactcatggtgtcacccatactttgttcatttggtagtgctgctcttcaggaagaactggaacgattcgattgattatgttgcttttttcctaatgaccttggaggattcccttttctcgttttattttcagcagagctatccagtaaatatatattaactgtaatagtgattttttagttctacctacaattcattaggggtgggccaatgcaaaggtatactacaaattagaagatagcttattatgattgatttcattagattaatataagcctagctgtttggtaacctatattattggaggtgttgaaaagaaaaattaaaataa

SEQ ID NO: 59869 - DNA, 1427 bp, Zea Mays
gaaaaggtcaaacgattaaggaggaaaagcgaaactatcaatcagggttctggcacgtgaatggtacagaaataactctgagtgccctcaaccaccacaccagcagttcagcattccccatttgcattgctaggggagagacaatagagagccaaagaggggagaaaagacactatgccgattggagaggttgtgctatctgccttcacgcaggcactctttgagaaagtgcttgctgctactatcggagagctgaaactccctccagatgtcactgaagaactgcaaagcttatcaaggaaagacaaattattggtcccaacatgaacagtgggaccgacaggcaggagataaaggagaggcccaaaacaagttcgctgatcgatgactcaagtgtgtttggaagagaaaaagataaggaaaccattgtaaagatgttgctggcccctaataataactcaggccatgccaacctttctattattcccatagtgggcatggggggactaggaaagacgactctaacacagctcatctacaatgatgaaagagtaaaggagcatttccagttaagggtgtggttgtgtgtttctgaaaattttgacgagatgaagcttaccaaggaaacaattgaatcagttgctagtggattctcatcagccacaacaaacatgaacctgctccaagaagacctctcaaaaaagctgcaaggtaaaagatttcttctagtccttgatgatgtatggaatgaggatcctgaaaaatgggacagatatcgttgtgctctacttagcgggggaaagggaagcaggattataattaccacgcgaaacaaaaatgtggggatactaatgggtgggatgactccttaccatctaaagcagctatcaaacgatgattgctggcagttgttcaaaaaacatgcatttgtagatggtgactccagttcacacccagaattagaaataataggcaaggacatcgtgaagaagttgaaaggcctgccactagctgcaaaagcagtcagcagtttactatgtaccagggatgcagaggaagattggaagaacatactaaagagtgaaatatgggaattgccatcagacaagaacaacatattgccagctctgagattgagttacagccatttgccagccacactgaagcgatgttttgcattttgttcagtgtttcccaaagattacgtctttgagaaaacaaggttggttcaaatatggatggcccttgggttcattcagcctcaaggaaggagaaagatggaagaaattgggagtggctattttgatgaattgcaaagcagatccttcttccaacatcacaaaagtggatatgtcatgcatgatgccatgcatgacctagcacagtctgtctcaattaatgaatgccttagattggatgaaggccta

SEQ ID NO: 59870 - DNA, 555 bp, Zea Mays
ctttttattttggatgtggtgaagggtcgtaaccattttcgctgtagtttattgtggctttagtccgtccgcaactgcgacttatatagtattttgtctctatggattgcagctacaatccaaagcttgacaccatcctccacgatcaacagatcatgcaagcgctctcctcccctcccgcactctacgaatccctgaggttctagggttatctccaactctcctatcacatcttttattttaaagctttctataagggaagtcctgaatagaatggtcagctcccatgctgctgctagttatgcgaagctgaagactgtctaccagaagtacgccaagaagcagtttcggcgtgtactctgcagactgcacccactggctgcccttcccgaccttgtctataattttttactagctcacagataatggaaggaatttggttgagtttgctttgagtttatacactgcttcgtcatttttgtactatcgactattcacaattacatgaatgcttcgtgattgactgaagcacatttgtttgaaagagaaatgaag

SEQ ID NO: 59871 - DNA, 1758 bp, Zea Mays
tccactcttcctttcccgccgtataaattcgccgaacacggcaccaccattctccaccaacccccggcgcggagcagccatggacgcctccctcctcctctccgtcggcctcgcgctggtgctgatcccgctctccctctcgctcctcaaccggctgcgcgtcggccgcctgccgcccggcccgcggccgtggcccgtcctgggcaacctgcgccagatcaagcccgtccggtgccggtgcttccaggagtgggcggagcggtacgggcccatcatctccgtctggttcgggtccggcctcaccgtcgtcgtctccacctcggagctggccaaggaggtgctcaaggagaacgaccagcagctcgcggaccggccgcggaaccgctccacccagcggttcagccgcaacgggcaggacctcatctgggccgactacggcccgcactacatcaaggtaatgaaggaaagccaatggtagtgaggaagcacctttctatggtggccttcaacaacataacaaggctggcatttgggaagcggttcatgaatgcaaacggtgatgttgacgaacaagggcgtgagtttaagactattgtgaacaacgggatcaagattggtgcatctctctctgttgctgagttcatttggtatttgagatggttgtgtccacttaatgaggagctttacaaaactcacaatgagagaagggaccgcctgacaatgaagatcattgatgagcacgctaagtctctcaaggagagtggtgccaagcagcactttgtggatgcacttttcactctcaaacaacagtatgaccttagtgaagacacagttattggacttctatgggatatgatcactgctggaatggacacaacagtcatctcagtcgagtgggcgatggcagaactggtcaggaaccctagggtgcagaagaagctgcaagaggagctcgaccgtgtggttggccgtgaccgcgtcatgctagagaccgacttccagaacctcccctacctacaggccgttgtcaaggaatcactccggctgcacccgccgacgccactcatgctcccgcacaaggccagctcgaacgtcaagatcggaggttacaacatccccaagggcgccaacgtgatggtgaacgtgtgggcggtggcgcgtgatcccaaggtctggagcaacccgctggagtacagaccggagcgcttcctggaggagaacatcgacatcaagggcagcgacttcagggtgctgccgttcggtgctggccggcgtgtgtgcccgggcgcgcagctcggcatcaacctcgtggcctccatgatcggacaccttctgcatcacttcgagtggtccctgccggagggcactagaccagaggacgtcaacatgatggagtcccccggtctcgtcacgttcatgggcacaccgctgcaagctgtcgtcaagccgcgcctggagaaggaggagctgtacaatagggtcccagttgagatgtgaggtgcctgcagccgctttgaattcactgctcgatttgtgtttttctcgctgctgcagctgctgcttctttcagctttaagctgttgaactgagttgttcgtgttgtaaaatatgaggtgctagatgcatttcgaatctcataaaattgttacatgtagtttgtcatagacttgcacaatgtgtctttatacaatagtataacacgattcaacaattccccttcgaactgaaatttagtactgcgtttatattcatttacat

SEQ ID NO: 59872 - DNA, 2148 bp, Zea Mays
gccacttcgcgtgctgtcagtgcggtgttagactatgcaccgggtccacggttcagatcccgcgggacgcagagaggaggaggctttggcccgattcgcgcggcccggccccggatcgaacgatttgggggacgaggtgttctatttcacaaaagaggcaaaaaacaaaagccggtaacggaaaccctaatccccccaaatcccgaatccctctcgaatttctatttaatgttcctgttcttcccctccgatccgatgtccccaactgcgctccccgcggcgatcaaacaccggatcgcggcactcgccgccgttgaggaggaggtttccggcgctgcttccagcgccttgccgtcagcaccatgaggaagaagctggacacgcgtttccccgctttttaacatacagcctcggattaaaaagatcatgcaaacagatgaagacgttggcaagattgctcaagctgtacctgttctagtgtccaaagcattggagctatttctgcaagatttatgtgataggacatatgatattacaattcggaagggggtcaagactgtgggttcttcccatttgaaacaatgcatacaaacgtacaatgtctatgacttcttgagggaagtagtcagcaaagttccagacattggtccttctgatgttattgctgatgataagcttggcaaaaggaggaaagccgaagaagatggaagtgaggaagaattgaagaggacaagaaatgagacagaaagccatacaagcaatggcagaggccgtgggagaggtcgtgggagaggtcgccgtagtgtacgtggaccttggcgggaggtggtcacaagtcctgaacaattcaaggaggagaatcaatctagcaaggtagcagatgaggtctcgaatgtaactgaagcaaaacaggacactacaccaatgagcaatgccaggccttccttaaggaacattgacttgaatttagatccaaccgatgaagaggatgaggttacagtgccacccgaaccccagctgtcagctccagcaactagttgcgctgcagccactgcagcacctggaccatctgttccacggttaagggaaggagcaaaactcaaggacttctttggtgcttgggaactggctgacatgaacaagatggagatggaccctgtccagtttgctctgtcaacaaaccatagattggaggaggacgaggattatgacaatgaagactagctccgccgttatatagcttcagagttgatgagtaggaatagcaggacaactgtaggttcagcttaactctgtagcagttctcatgtatcatatagccgccaaagctgccgatgtagcttataatgtcccagaggttaaggtcgtttgactagttgactgtaatgttctcaagttaggttctattagcagctattgctttcgcagatagtaccgtttgtacattccagttgctctccagttttatgttatctatccttctgctttcttggatagctgagacctgttggcggatgtatcatgtatggcaagttggcaacaaaaagcaagaaggctttcagattccttagcacatctcattctattacagtggtcaaatatctcattagggtacaatacatgtgggtaagacgctggtttattcattatatcatacttttccagtgggatgacagttaaattctttcattgttgtgctccagcctccagcgaaaagcctgtgcgccttgaagaagaaaaaaacacatcatggcactggaagatgatacctttactacctcaaatatggttatgcaagcacaaggtgaaccggttctacagaaccatgtgagtgttgttcccgtatggtatttcttgtgctagtccctccctgtaaaaagatcctgtacctcaggcgaccgcggcgtctccgacgagctcgaagctctgcagctgcttgaagttctcccacgccttctcccacaccttggcctcgtacagcttcttttcgccgccgccggcctccttcacctcgacggtgaagtggtgcagggtcccggccacgacctggtgcctcaccttcaccagcctctcgaattccagcatcgcgttctgcgcgtgtattatgcatccatgtgagggctccgatctcaaaacttaaaaaaaaaa

SEQ ID NO: 59873 - DNA, 1889 bp, Zea Mays
ccacggttcagatcccgcgggacgcagagaggaggaggctttggcccgattcgcgcggcccggccccggatcgaacgatttgggggacgaggtgttctatttcacaaaagaggcaaaaaacaaaagccggtaacggaaaccctaatccccccaaatcccgaatccctctcgaatttctatttaatgttcctgttcttcccctccgatccgatgtccccaactgcgctccccgcggcgatcaaacaccggatcgcggcactcgccgccgttgaggaggaggtttccggcgctgcttccagcgccttgccgtcagcaccatgaggaagaagctggacacgcgtttccccgctcctcggattaaaaagatcatgcaaacagatgaagacgttggcaagattgctcaagctgtacctgttctagtgtccaaagcattggagctatttctgcaagatttatgtgataggacatatgatattacaattcggaagggggtcaagactgtgggttcttcccatttgaaacaatgcatacaaacgtacaatgtctatgacttcttgagggaagtagtcagcaaagttccagacattggtccttctgatgttattgctgatgataagcttggcaaaaggaggaaagccgaagaagatggaagtgaggaagaattgaagaggacaagaaatgagacagaaagccatacaagcaatggcagaggccgtgggagaggtcgtgggagaggtcgccgtagtgtacgtggaccttggcgggaggtggtcacaagtcctgaacaattcaaggaggagaatcaatctagcaaggtagccagcctaaaggtggaggtagcagatgaggtctcgaatgtaactgaagcaaaacaggacactacaccaatgagcaatgccaggccttccttaaggaacattgacttgaatttagatccaaccgatgaagaggatgaggttacagtgccacccgaaccccagctgtcagctccagcaactagttgcgctgcagccactgcagcacctggaccatctgttccacggttaagggaaggagcaaaactcaaggacttctttggtgcttgggaactggctgacatgaacaagatggagatggaccctgtccagtttgctctgtcaacaaaccatagattggaggaggacgaggattatgacaatgaagactagctccgccgttatatagcttcagagttgatgagtaggaatagcaggacaactctgagacctgttggcggatgtatcatgtatggcaagttggcaacaaaaagcaagaaggctttcagattccttagcacatctcattctattacagtggtcaaatatctcattagggtacaatacatgtgggtaagacgctggtttattcattatatcatacttttccagtgggatgacagttaaattctttcattgttgtgctccagcctccagcgaaaagcctgtgcgccttgaagaagaaaaaaacacatcatggcactggaagatgatacctttactacctcaaatatggttatgcaagcacaaggtgaaccggttctacagaaccatgtgagtgttgttcccgtatggtatttcttgtgctagtccctccctgtaaaaagatcctgtacctcaggcgaccgcggcgtctccgacgagctcgaagctctgcagctgcttgaagttctcccacgccttctcccacaccttggcctcgtacagcttcttttcgccgccgccggcctccttcacctcgacggtgaagtggtgcagggtcccggccacgacctggtgcctcaccttcaccagcctctcgaattccagcatcgcgttctgcgcgtgtattatgcatccatgtgagggctccgatctcaaaacttaaaaaaaaaa

SEQ ID NO: 59874 - DNA, 1875 bp, Zea Mays
atcgaacgatttgggggacgaggtgttctatttcacaaaagaggcaaaaaacaaaagccggtaacggaaaccctaatccccccaaatcccgaatccctctcgaatttctatttaatgttcctgttcttcccctccgatccgatgtccccaactgcgctccccgcggcgatcaaacaccggatcgcggcactcgccgccgttgaggaggaggtttccggcgctgcttccagcgccttgccgtcagcaccatgaggaagaagctggacacgcgtttccccgctgaaacaatgcatacaaacgtacaatgtctatgacttcttgagggaagtagtcagcaaagttccagacattggtccttctgatgttattgctgatgataagcttggcaaaaggaggaaagccgaagaagatggaagtgaggaagaattgaagaggacaagaaatgagacagaaagccatacaagcaatggcagaggccgtgggagaggtcgtgggagaggtcgccgtagtgtacgtggaccttggcgggaggtggtcacaagtcctgaacaattcaaggaggagaatcaatctagcaaggtagccagcctaaaggtggaggtagcagatgaggtctcgaatgtaactgaagcaaaacaggacactacaccaatgagcaatgccaggccttccttaaggaacattgacttgaatttagatccaaccgatgaagaggatgaggttacagtgccacccgaaccccagctgtcagctccagcaactagttgcgctgcagccactgcagcacctggaccatctgttccacggttaagggaaggagcaaaactcaaggacttctttggtgcttgggaactggctgacatgaacaagatggagatggaccctgtccagtttgctctgtcaacaaaccatagattggaggaggacgaggattatgacaatgaagactagctccgccgttatatagcttcagagttgatgagtaggaatagcaggacaactgtaggttcagcttaactctgtagcagttctcatgtatcatatagccgccaaagctgccgatgtagcttataatgtcccagaggttaaggtcgtttgactagttgactgtaatgttctcaagttaggttctattagcagctattgctttcgcagatagtaccgtttgtacattccagttgctctccagttttatgttatctatccttctgctttcttggatagctgagacctgttggcggatgtatcatgtatggcaagttggcaacaaaaagcaagaaggctttcagattccttagcacatctcattctattacagtggtcaaatatctcattagggtacaatacatgtgggtaagacgctggtttattcattatatcatacttttccagtgggatgacagttaaattctttcattgttgtgctccagcctccagcgaaaagcctgtgcgccttgaagaagaaaaaaacacatcatggcactggaagatgatacctttactacctcaaatatggttatgcaagcacaaggtgaaccggttctacagaaccatgtgagtgttgttcccgtatggtatttcttgtgctagtccctccctgtaaaaagatcctgtacctcaggcgaccgcggcgtctccgacgagctcgaagctctgcagctgcttgaagttctcccacgccttctcccacaccttggcctcgtacagcttcttttcgccgccgccggcctccttcacctcgacggtgaagtggtgcagggtcccggccacgacctggtgcctcaccttcaccagcctctcgaattccagcatcgcgttctgcgcgtgtattatgcatccatgtgagggctccgatctcaaaacttaaaaaaaaaa

SEQ ID NO: 59875 - DNA, 1735 bp, Zea Mays
gtttatcctttcatagaccccactcatgtggtagcctccagcactggccaaagcattggagctatttctgcaagatttatgtgataggacatatgatattacaattcggaagggggtcaagactgtgggttcttcccatttgaaacaatgcatacaaacgtacaatgtctatgacttcttgagggaagtagtcagcaaagttccagacattggtccttctgatgttattgctgatgataagcttggcaaaaggaggaaagccgaagaagatggaagtgaggaagaattgaagaggacaagaaatgagacagaaagccatacaagcaatggcagaggccgtgggagaggtcgtgggagaggtcgccgtagtgtacgtggaccttggcgggaggtggtcacaagtcctgaacaattcaaggaggagaatcaatctagcaaggtagccagcctaaaggtggaggtagcagatgaggtctcgaatgtaactgaagcaaaacaggacactacaccaatgagcaatgccaggccttccttaaggaacattgacttgaatttagatccaaccgatgaagaggatgaggttacagtgccacccgaaccccagctgtcagctccagcaactagttgcgctgcagccactgcagcacctggaccatctgttccacggttaagggaaggagcaaaactcaaggacttctttggtgcttgggaactggctgacatgaacaagatggagatggaccctgtccagtttgctctgtcaacaaaccatagattggaggaggacgaggattatgacaatgaagactagctccgccgttatatagcttcagagttgatgagtaggaatagcaggacaactgtaggttcagcttaactctgtagcagttctcatgtatcatatagccgccaaagctgccgatgtagcttataatgtcccagaggttaaggtcgtttgactagttgactgtaatgttctcaagttaggttctattagcagctattgctttcgcagatagtaccgtttgtacattccagttgctctccagttttatgttatctatccttctgctttcttggatagctgagacctgttggcggatgtatcatgtatggcaagttggcaacaaaaagcaagaaggctttcagattccttagcacatctcattctattacagtggtcaaatatctcattagggtacaatacatgtgggtaagacgctggtttattcattatatcatacttttccagtgggatgacagttaaattctttcattgttgtgctccagcctccagcgaaaagcctgtgcgccttgaagaagaaaaaaacacatcatggcactggaagatgatacctttactacctcaaatatggttatgcaagcacaaggtgaaccggttctacagaaccatgtgagtgttgttcccgtatggtatttcttgtgctagtccctccctgtaaaaagatcctgtacctcaggcgaccgcggcgtctccgacgagctcgaagctctgcagctgcttgaagttctcccacgccttctcccacaccttggcctcgtacagcttcttttcgccgccgccggcctccttcacctcgacggtgaagtggtgcagggtcccggccacgacctggtgcctcaccttcaccagcctctcgaattccagcatcgcgttctgcgcgtgtattatgcatccatgtgagggctccgatctcaaaacttaaaaaaaaaa

SEQ ID NO: 59876 - DNA, 5301 bp, Zea Mays
ttttttttctgtagcttaagagtgcagtagatagatataagtcgtttagtgggccggaaacctcactgtggcggtgtggcccgccttttgttctacattccagtcccctccggcacactgtgttcttccgttcctctcgcgtggttgtctggtgccgacgactgggccgccgccgcctccgtcctacgctcggtgctgaggccttcgggacttccgccggcgacgcgcaccctccgggttgaaatccctcgagaacaatggggcgcacggttctttcagatgaagaagaagatgagttcgaggctgacgaggaggatccgcggccctcgcggaggaacagggacgatatggacgagcgcgatgacgacgacgacgacgatgaggacggtcaggatgaatttgagaaggatgacttcatagtggacgacgaggaagaagaagtggaaggagaggaagaggaacagaagagtgatgacgagaggcgaagaaagaaaaagaaaaagaagagggaatcagacgacttcatgctcgatgaggatgactatatgttgctccaggataataacatcactggcatcagtcgcccaaagcctggaaacaagtttaagcgcttgaaaaaggctggaagggaatctgaaatggatgagcactctggtttttcagatggtgatggaacaggcaaaaaacgcagtggcaaggagagggtcgagtacagtttatttggtgatcatcaagatgctgcaccctttgaggaggacttcgaggacgatcagcaggcaggggagggtgaggaggaagttggtgatgatgaagatgaaatggcagatttcattgtggaggaagatgaaattgatgggaatggacaagttgtaaggaggaagaaatttaaaaagaaggtaccacgacaagcagcaggtgtatcatcgtctgctctgcaagaggcccaagacatatttggcgatgttgatgagctgttggcactaagaaaacaagagcttgagagggaggcccttaactctggtgagttaaggggggcgaggcttgaagatgagtttgaaccatttattcttgcagagaagtatatgacatcaaaagatgagcaaataaaagaaaatgatgttcctgagaggatgcagttgtctgaagagttgactgggtatcctccaacggataaaacaacgattgaggaagagagttcatggatacacagccacttaaccggtgatggatttctgtccttttttggcaatgagcacataaacaaggatattgaccagaaggacattgtcaatgtcgtgaccatgttgcatgccaacaaatttgaaattccgttcatcgcaatgtacagaaaagagagctgtccaaccctattaagttttgattctgatgaggataacgaggatattgaatctgatgcacgcaaattgaggtggcataagctgctctgggcggttcaggccttagacagaaagtggctacttcttcagaagcgcaaggttgctttacagttgtattatgagaaaagatttgatgatgagaaacggaggatagatgatgtcacaaggcaagaacttaatagccaactttataattccatcattgaagcactgaaggatgctaaatctgagaaagaggtggaggatgttgatgcaaaattcaatttacattttcctcctggtgaagtagaagaagaaggtcaatttaaacgtcctaaaaggaagtccttgtacagtatctgtcacaaggcagggctatgggaggttgccaaccaatttgggcgcagtgctgagcaattaggccaccatctgactttaactaagatacctgaagcaggcgagcttgagagcggtagacattcacctgaagaggtcgctgcaaatttcacatgtgcaatgtttgaaacatcacaagatgttcttcgtggcgcgagacacatggcagcagttgagataggttgtgagccaattgtgagaaagcatgtacgaggcatcttcatgaataaagcagttgtgtcaacaagtcccacatctgagggaaatacaatcatagatccatatcaccaactatcgggtgttaagtggctgagagagaaaccacttagcaagtttgttgatgcacagtggctccttattcagaaagcagaggaagaaaagctcctcaaggttaccgtaaaattgccagaagatgcaaagaaaaaactcatgtctgaagcacgtgagaattatctaagtgattgtgtcagcaagtctgcacaattgtgggatgagcaacggaagatgatactggatgatgctttcttcaattttctccttccatcaatggaaaaggaagctcgatcactgttgatgacaaaagccaaacattggctccatatggaatatgggaaacagttgtggaacaaggttactgttgctccttggaagaagaaagatgcggacaagaaggatgctgacattgatttggatgatgaatcagagttgagagttatggcttgctgctggggtcctgggaagccagcaaccacctttgtaatgttagactcctcaggagagttggttgatgttctgtatgcaggctctatcagtaacaggtctcaaggtgtcgctgagcagcagcggaagaagaacgaccagcagcgagtcttaaagtttatgactgatcatcaaccacatgttgtgtgtgtaggagcatcgaactacaattgcagacaactgaaggatgatctttatgaggttatttttaaaattgtagaggatcatccaagggatgttaacgcccaaatggaaaattttagcattgtctatggtgacgagtctgtgcctcgcttgtatgagaactctcgaatatcttcggatcaacttcctggccaatcaggtattgtgaagcgggctgtggcgcttggacgttaccttcagaacccgttggcaatgattgcaacactgtgtggacctgggaaagagatactttcttggaaactgcatgctctggaacagtttctaactcctgatgagaagtatgaaattgttgagcaagtaatggttgatgcaacaaatcagataggttttgatgtcaatcttgctgctagccatgagtggcatttttctactctacaatttattgctggtttgggtccgcgtaaagcttcagctttgcagaaagatctggtaagagagggatccatttttagtcgcaaagagcttgtaaaacctctaggcaggaaagtattcatgaatgcttctggatttttacgtgttcggcggagtggtgcagctgcagccagcgctcaactcattgatctgcttgaggatacaaggatccatcctgaatcatatgtattggcaaaaaatttagctaaggatgtctatgttgaggatgcacaacatgaaataaatgaaatggacgatgaggagcaagagatggctattgagcatgttagagaaaggccaagcatgcttcgaagtcttaaaattgtggaatatataaagagcattacagaagaataccgtaaactggaaactctgcgtgatataaagtttgagctgctgtgcggtttttctgactggaggattccctataccgagccaagcccagacgaggaattctggttgctttctggtgaaactgatgataccatatctgagggaaggattgttcaagttactgttcgcaatatacaagataacaaaataatttgcacctttgattcgggtttgaaagccatagttatggcagacaactattctgatgagggttttgatccagaatcatcacagttacgtgaaggcgatgtattaactggcaaaattcgaaacgtgaataaaaatagattcatggtttacctaacatgcaaggctagcgagatgaggagaaggccattctctagaggtgagcaggatccttactatcatgaacaagacatgacctcacaaactgtagaagataaggctcggaaacaaaaggaacttgcaaagaagcatttcaagccccgaatgattgttcatccccactttcagaacctgacagctgaagaagccatgcagtttttatcagataaagagcatggtgagaagttaatccgaccaagctccaggggaccatcatttttgacacttaccctgaaaatttttgatggcgtttacgcacataaggagatagctgaaagtggaaaggatcataaagatatcacaagtttgcttcgcctggggaaaacactaacaattgataatgaaacttttgaagacctcgatgaggttattgaccgatatgtggacccattggtaggacacctgaagagcatgctgtcgtaccgtaaattcagaaagggtttaaaaaatgaggttgatgagatgttaagggcagagaaagcagagaaccctatgagaatagtatatagttttggcatatctcacgaacatcctggcacctttatattgtcatatattaggagtacaaacccacatcacgagtacattgggttgtacccgaagggcttcaggttcaggaagagagacttcgacaacattgaccgtcttgtgtcgtatttccagaagaatattgacaaaccaccacctgatgctggaccatcaatgcggaatgttgctgcaatggtacctatgaaaaactcagcttggggttctggtggtggtggggatgcaaatggtggttggaggggagatggtagtaatgatagggatcgacctttctctggcagatcaggagggaggtttgattcaaggaatagctctggtggtcgtcccagcacaggatggtggaaccggctgggggtcagaaggtggcggcggcggtggtggcggaggctggtaactgggctgtgccctgcgttgtagtccagacaacagctactagatgaaaacagtttcctcgttttaactcctgtcctatcgtactgtggacgggagaaatctggcacttataagtcttgcagctgctgcacgtctgcagatgttgcattgcggacagcgttatgtttcagtgcatgtacataaatccaatatgtctggtcacactttcctgctacgaatttgatcctggtgcttcattgttgaggctatccgcaattaggccagtactctaccccatgttggtaagcttttgtgttgaaagtgtaacacgctacattttgtttccctagcttcacataaccccgcttacaagtgtttcaatgttttggcgacccatatgcctttcggtttgtgggcgtttcgatagagtcaggtctggatttcacaactagcatttatgacagcaaaagccggaaggtggcattcgattgtacttgag

SEQ ID NO: 59877 - DNA, 5545 bp, Zea Mays
ttttttttctgtagcttaagagtgcagtagatagatataagtcgtttagtgggccggaaacctcactgtggcggtgtggcccgccttttgttctacattccagtcccctccggcacactgtgttcttccgttcctctcgcgtggttgtctggtgccgacgactgggccgccgccgcctccgtcctacgctcggtgctgaggccttcgggacttccgccggcgacgcgcaccctccgggttgaaatccctcgagaacaatggggcgcacggttctttcagatgaagaagaagatgagttcgaggctgacgaggaggatccgcggccctcgcggaggaacagggacgatatggacgagcgcgatgacgacgacgacgacgatgaggacggtcaggatgaatttgagaaggatgacttcatagtggacgacgaggaagaagaagtggaaggagaggaagaggaacagaagagtgatgacgagaggcgaagaaagaaaaagaaaaagaagagggaatcagacgacttcatgctcgatgaggatgactatatgttgctccaggataataacatcactggcatcagtcgcccaaagcctggaaacaagtttaagcgcttgaaaaaggctggaagggaatctgaaatggatgagcactctggtttttcagatggtgatggaacaggcaaaaaacgcagtggcaaggagagggtcgagtacagtttatttggtgatcatcaagatgctgcaccctttgaggaggacttcgaggacgatcagcaggcaggggagggtgaggaggaagttggtgatgatgaagatgaaatggcagatttcattgtggaggaagatgaaattgatgggaatggacaagttgtaaggaggaagaaatttaaaaagaaggtaccacgacaagcagcaggtgtatcatcgtctgctctgcaagaggcccaagacatatttggcgatgttgatgagctgttggcactaagaaaacaagagcttgagagggaggcccttaactctggtgagttaaggggggcgaggcttgaagatgagtttgaaccatttattcttgcagagaagtatatgacatcaaaagatgagcaaataaaagaaaatgatgttcctgagaggatgcagttgtctgaagagttgactgggtatcctccaacggataaaacaacgattgaggaagagagttcatggatacacagccacttaaccggtgatggatttctgtccttttttggcaatgagcacataaacaaggatattgaccagaaggacattgtcaatgtcgtgaccatgttgcatgccaacaaatttgaaattccgttcatcgcaatgtacagaaaagagagctgtccaaccctattaagttttgattctgatgaggataacgaggatattgaatctgatgcacgcaaattgaggtggcataagctgctctgggcggttcaggccttagacagaaagtggctacttcttcagaagcgcaaggttgctttacagttgtattatgagaaaagatttgatgatgagaaacggaggatagatgatgtcacaaggcaagaacttaatagccaactttataattccatcattgaagcactgaaggatgctaaatctgagaaagaggtggaggatgttgatgcaaaattcaatttacattttcctcctggtgaagtagaagaagaaggtcaatttaaacgtcctaaaaggaagtccttgtacagtatctgtcacaaggcagggctatgggaggttgccaaccaatttgggcgcagtgctgagcaattaggccaccatctgactttaactaagatacctgaagcaggcgagcttgagagcggtagacattcacctgaagaggtcgctgcaaatttcacatgtgcaatgtttgaaacatcacaagatgttcttcgtggcgcgagacacatggcagcagttgagataggttgtgagccaattgtgagaaagcatgtacgaggcatcttcatgaataaagcagttgtgtcaacaagtcccacatctgagggaaatacaatcatagatccatatcaccaactatcgggtgttaagtggctgagagagaaaccacttagcaagtttgttgatgcacagtggctccttattcagaaagcagaggaagaaaagctcctcaaggttaccgtaaaattgccagaagatgcaaagaaaaaactcatgtctgaagcacgtgagaattatctaagtgattgtgtcagcaagtctgcacaattgtgggatgagcaacggaagatgatactggatgatgctttcttcaattttctccttccatcaatggaaaaggaagctcgatcactgttgatgacaaaagccaaacattggctccatatggaatatgggaaacagttgtggaacaaggttactgttgctccttggaagaagaaagatgcggacaagaaggatgctgacattgatttggatgatgaatcagagttgagagttatggcttgctgctggggtcctgggaagccagcaaccacctttgtaatgttagactcctcaggagagttggttgatgttctgtatgcaggctctatcagtaacaggtctcaaggtgtcgctgagcagcagcggaagaagaacgaccagcagcgagtcttaaagtttatgactgatcatcaaccacatgttgtgtgtgtaggagcatcgaactacaattgcagacaactgaaggatgatctttatgaggttatttttaaaattgtagaggatcatccaagggatgttaacgcccaaatggaaaattttagcattgtctatggtgacgagtctgtgcctcgcttgtatgagaactctcgaatatcttcggatcaacttcctggccaatcaggtattgtgaagcgggctgtggcgcttggacgttaccttcagaacccgttggcaatgattgcaacactgtgtggacctgggaaagagatactttcttggaaactgcatgctctggaacagtttctaactcctgatgagaagtatgaaattgttgagcaagtaatggttgatgcaacaaatcagataggttttgatgtcaatcttgctgctagccatgagtggcatttttctactctacaatttattgctggtttgggtccgcgtaaagcttcagctttgcagaaagatctggtaagagagggatccatttttagtcgcaaagagcttgtaaaacctctaggcaggaaagtattcatgaatgcttctggatttttacgtgttcggcggagtggtgcagctgcagccagcgctcaactcattgatctgcttgaggatacaaggatccatcctgaatcatatgtattggcaaaaaatttagctaaggatgtctatgttgaggatgcacaacatgaaataaatgaaatggacgatgaggagcaagagatggctattgagcatgttagagaaaggccaagcatgcttcgaagtcttaaaattgtggaatatataaagagcattacagaagaataccgtaaactggaaactctgcgtgatataaagtttgagctgctgtgcggtttttctgactggaggattccctataccgagccaagcccagacgaggaattctggttgctttctggtgaaactgatgataccatatctgagggaaggattgttcaagttactgttcgcaatatacaagataacaaaataatttgcacctttgattcgggtttgaaagccatagttatggcagacaactattctgatgagggttttgatccagaatcatcacagttacgtgaaggcgatgtattaactggcaaaattcgaaacgtgaataaaaatagattcatggtttacctaacatgcaaggctagcgagatgaggagaaggccattctctagaggtgagcaggatccttactatcatgaacaagacatgacctcacaaactgtagaagataaggctcggaaacaaaaggaacttgcaaagaagcatttcaagccccgaatgattgttcatccccactttcagaacctgacagctgaagaagccatgcaggtctgctgccttgttaaactcagtttgtgcgctttgcatctcctcttatggagatagctgaaagtggaaaggatcataaagatatcacaagtttgcttcgcctggggaaaacactaacaattgataatgaaacttttgaagacctcgatgaggttattgaccgatatgtggacccattggtaggacacctgaagagcatgctgtcgtaccgtaaattcagaaagggtttaaaaaatgaggttgatgagatgttaagggcagagaaagcagagaaccctatgagaatagtatatagttttggcatatctcacgaacatcctggcacctttatattgtcatatattaggagtacaaacccacatcacgagtacattgggttgtacccgaagggcttcaggttcaggaagagagacttcgacaacattgaccgtcttgtgtcgtatttccagaagaatattgacaaaccaccacctgatgctggaccatcaatgcggaatgttgctgcaatggtacctatgaaaaactcagcttggggttctggtggtggtggggatgcaaatggtggttggaggggagatggtagtaatgatagggatcgacctttctctggcagatcaggagggaggtttgattcaaggaatagctctggtggtcgtggacgaggacgggggcgtggccggggtaactttggcgatgacgataatgctggtggaggttggagtggaggaggtggtggtggcaacagtggaaggtggaccgataacattggcacaggtggcagtggtggttcttcctggggtggtggtggcggtggtgatgacagcaaccgtggcggtggaggagggggttggggatcagctggtggtggtgctgacaatgctggtggcggaaatggagcctggggagcagctgctggtggctctgatgacccagggttgggtagcgccaaaaaggtcgtcccagcacaggatggtggaaccggctgggggtcagaaggtggcggcggcggtggtggcggaggctggtaactgggctgtgccctgcgttgtagtccagacaacagctactagatgaaaacagtttcctcgttttaactcctgtcctatcgtactgtggacgggagaaatctggcacttataagtcttgcagctgctgcacgtctgcagatgttgcattgcggacagcgttatgtttcagtgcatgtacataaatccaatatgtctggtcacactttcctgctacgaatttgatcctggtgcttcattgttgaggctatccgcaattaggccagtactctaccccatgttggtaagcttttgtgttgaaagtgtaacacgctacattttgtttccctagcttcacataaccccgcttacaagtgtttcaatgttttggcgacccatatgcctttcggtttgtgggcgtttcgatagagtcaggtctggatttcacaactagcatttatgacagcaaaagccggaaggtggcattcgattgtacttgag

SEQ ID NO: 59878 - DNA, 3349 bp, Zea Mays
cagcagttgagataggttgtgagccaattgtgagaaagcatgtacgaggcatcttcatgaataaagcagttgtgtcaacaagtcccacatctgagggaaatacaatcatagatccatatcaccaactatcgggtgttaagtggctgagagagaaaccacttagcaagtttgttgatgcacagtggctccttattcagaaagcagaggaagaaaagctcctcaaggttaccgtaaaattgccagaagatgcaaagaaaaaactcatgtctgaagcacgtgagaattatctaagtgattgtgtcagcaagtctgcacaattgtgggatgagcaacggaagatgatactggatgatgctttcttcaattttctccttccatcaatggaaaaggaagctcgatcactgttgatgacaaaagccaaacattggctccatatggaatatgggaaacagttgtggaacaaggttactgttgctccttggaagaagaaagatgcggacaagaaggatgctgacattgatttggatgatgaatcagagttgagagttatggcttgctgctggggtcctgggaagccagcaaccacctttgtaatgttagactcctcaggagagttggttgatgttctgtatgcaggctctatcagtaacaggtctcaaggtgtcgctgagcagcagcggaagaagaacgaccagcagcgagtcttaaagtttatgactgatcatcaaccacatgttgtgtgtgtaggagcatcgaactacaattgcagacaactgaaggatgatctttatgaggttatttttaaaattgtagaggatcatccaagggatgttaacgcccaaatggaaaattttagcattgtctatggtgacgagtctgtgcctcgcttgtatgagaactctcgaatatcttcggatcaacttcctggccaatcaggtattgtgaagcgggctgtggcgcttggacgttaccttcagaacccgttggcaatgattgcaacactgtgtggacctgggaaagagatactttcttggaaactgcatgctctggaacagtttctaactcctgatgagaagtatgaaattgttgagcaagtaatggttgatgcaacaaatcagataggttttgatgtcaatcttgctgctagccatgagtggcatttttctactctacaatttattgctggtttgggtccgcgtaaagcttcagctttgcagaaagatctggtaagagagggatccatttttagtcgcaaagagcttgtaaaacctctaggcaggaaagtattcatgaatgcttctggatttttacgtgttcggcggagtggtgcagctgcagccagcgctcaactcattgatctgcttgaggatacaaggatccatcctgaatcatatgtattggcaaaaaatttagctaaggatgtctatgttgaggatgcacaacatgaaataaatgaaatggacgatgaggagcaagagatggctattgagcatgttagagaaaggccaagcatgcttcgaagtcttaaaattgtggaatatataaagagcattacagaagaataccgtaaactggaaactctgcgtgatataaagtttgagctgctgtgcggtttttctgactggaggattccctataccgagccaagcccagacgaggaattctggttgctttctggtgaaactgatgataccatatctgagggaaggattgttcaagttactgttcgcaatatacaagataacaaaataatttgcacctttgattcgggtttgaaagccatagttatggcagacaactattctgatgagggttttgatccagaatcatcacagttacgtgaaggcgatgtattaactggcaaaattcgaaacgtgaataaaaatagattcatggtttacctaacatgcaaggctagcgagatgaggagaaggccattctctagaggtgagcaggatccttactatcatgaacaagacatgacctcacaaactgtagaagataaggctcggaaacaaaaggaacttgcaaagaagcatttcaagccccgaatgattgttcatccccactttcagaacctgacagctgaagaagccatgcagtttttatcagataaagagcatggtgagaagttaatccgaccaagctccaggggaccatcatttttgacacttaccctgaaaatttttgatggcgtttacgcacataaggagatagctgaaagtggaaaggatcataaagatatcacaagtttgcttcgcctggggaaaacactaacaattgataatgaaacttttgaagacctcgatgaggttattgaccgatatgtggacccattggtaggacacctgaagagcatgctgtcgtaccgtaaattcagaaagggtttaaaaaatgaggttgatgagatgttaagggcagagaaagcagagaaccctatgagaatagtatatagttttggcatatctcacgaacatcctggcacctttatattgtcatatattaggagtacaaacccacatcacgagtacattgggttgtacccgaagggcttcaggttcaggaagagagacttcgacaacattgaccgtcttgtgtcgtatttccagaagaatattgacaaaccaccacctgatgctggaccatcaatgcggaatgttgctgcaatggtacctatgaaaaactcagcttggggttctggtggtggtggggatgcaaatggtggttggaggggagatggtagtaatgatagggatcgacctttctctggcagatcaggagggaggtttgattcaaggaatagctctggtggtcgtggacgaggacgggggcgtggccggggtaactttggcgatgacgataatgctggtaactgggctgtgccctgcgttgtagtccagacaacagctactagatgaaaacagtttcctcgttttaactcctgtcctatcgtactgtggacgggagaaatctggcacttataagtcttgcagctgctgcacgtctgcagatgttgcattgcggacagcgttatgtttcagtgcatgtacataaatccaatatgtctggtcacactttcctgctacgaatttgatcctggtgcttcattgttgaggctatccgcaattaggccagtactctaccccatgttggtaagcttttgtgttgaaagtgtaacacgctacattttgtttccctagcttcacataaccccgcttacaagtgtttcaatgttttggcgacccatatgcctttcggtttgtgggcgtttcgatagagtcaggtctggatttcacaactagcatttatgacagcaaaagccggaaggtggcattcgattgtacttgag

SEQ ID NO: 59879 - DNA, 1711 bp, Zea Mays
agtcccaggcccaaaccctccctcaccggccagtcggcaacccaagcgcccgccgctctcctccagccctcgccggacgtccacgcgcgagctcgtcgttggtgtcgtttctaccgtcaggtataacgaatttgaccagcccatatgcagagtatgcaatattacactgaagtctgaagcactttggcctgcacaccaagtgtcacggaagcatcatgaagcaaaagccgccgctgctgataaggctacaacacttacagggtctagaggcagcaatgcaaagctagagcaaccattggagcctcaggaacgaaaatcatccacactacctaccaagttttttgataatcagggagctaaaaggaaaagtgatgatactatatctgagggaaggtctgtgcgccatgaagttgctgttattcaaccgaagaccataggagcaagcactgataaatcatctgttcggatggatcaaatgtcaaagaaagggagtcaaagcaacaccaatgtccaaggaatccttccagggaatttttttgactatggagaagatgaagcttcagctccagctccaaaagagcttagtacatctcaaattcacactaaggtgaaaggtgtccctgatggcttctttgatcacaataaatctagcagtggcatgcaacccaatgaaccaagttcagaagctgctcaagtaataggatcgttgcctgaaggtttctttgataacaaagatgcagatctccgtgcacgcggtatccaacctcaaaagtgatgcgtacaaagaatttgagaaggaaattcaggaggatttgcaggaagttgatgaccgccttgaagaagaggagattgatgctgctgctgagagggaggagtacttgactctagagcaacaggagtacaggcagcaggttgatatgttgaagaaacagctagtagagtcgaaagccgcccgtactgctagagtaaatagaaaacctatcggtatggactcggactccagcagtgactcatcgagcgatgaagaggatgacaacacagattttgctgttgattggagagcacagcatttgaaatgatggaaacattttgcaagtgtatacaccggagttgagtcttctgactacctggaccgactggtgaatcccttgactgcttgaacttggctgttgcttaacctgttccgagaaattttacacgttgtctccgattttttaacatacgacttaggagtacatgttaaacaagctatctgcctctagatcacgatccagtcagatatttgctcgtgcatttcaatcttctgctgtcgtcacaaggatatctgacatctcaattggttggtacttggttgttggatggttgaagggacgcctccgcctgtgaagattggctggcttgtgcatgcttcaacgcttgtgctaccagctagtacagggcttgtgtctatcttctgtccaagtgactgtggccttgtttgttttttttaaaaaaaccgtactctggtgggttttgatgtactccctccgtttctttttatttgtcgctggatagtgcaaaattatactatccagcgacaaataaaaagaaactatccagcgacaaataaaaagaaacggagggagtaacagggacggagcaagaaaatacaaatgatgataatcagttgttaaagggggtaaaatcaaatattttcatcattgaattacac

SEQ ID NO: 59880 - DNA, 1682 bp, Zea Mays
agtcccaggcccaaaccctccctcaccggccagtcggcaacccaagcgcccgccgctctcctccagccctcgccggacgtccacgcgcgagctcgtcgttggtgtcgtttctaccgtcaggtataacgaatttgaccagcccatatgcagagtatgcaatattacactgaagtctgaagcactttggcctgcacaccaagtgtcacggaagcatcatgaaggtctagaggcagcaatgcaaagctagagcaaccattggagcctcaggaacgaaaatcatccacactacctaccaagttttttgataatcagggagctaaaaggaaaagtgatgatactatatctgagggaaggtctgtgcgccatgaagttgctgttattcaaccgaagaccataggagcaagcactgataaatcatctgttcggatggatcaaatgtcaaagaaagggagtcaaagcaacaccaatgtccaaggaatccttccagggaatttttttgactatggagaagatgaagcttcagctccagctccaaaagagcttagtacatctcaaattcacactaaggtgaaaggtgtccctgatggcttctttgatcacaataaatctagcagtggcatgcaacccaatgaaccaagttcagaagctgctcaagtaataggatcgttgcctgaaggtttctttgataacaaagatgcagatctccgtgcacgcggtatccaacctcaaaaggttgacatgaatgatgcgtacaaagaatttgagaaggaaattcaggaggatttgcaggaagttgatgaccgccttgaagaagaggagattgatgctgctgctgagagggaggagtacttgactctagagcaacaggagtacaggcagcaggttgatatgttgaagaaacagctagtagagtcgaaagccgcccgtactgctagagtaaatagaaaacctatcggtatggactcggactccagcagtgactcatcgagcgatgaagaggatgacaacacagattttgctgttgattggagagcacagcatttgaaatgatggaaacattttgcaagtgtatacaccggagttgagtcttctgactacctggaccgactggtgaatcccttgactgcttgaacttggctgttgcttaacctgttccgagaaattttacacgttgtctccgattttttaacatacgacttaggagtacatgttaaacaagctatctgcctctagatcacgatccagtcagatatttgctcgtgcatttcaatcttctgctgtcgtcacaaggatatctgacatctcaattggttggtacttggttgttggatggttgaagggacgcctccgcctgtgaagattggctggcttgtgcatgcttcaacgcttgtgctaccagctagtacagggcttgtgtctatcttctgtccaagtgactgtggccttgtttgttttttttaaaaaaaccgtactctggtgggttttgatgtactccctccgtttctttttatttgtcgctggatagtgcaaaattatactatccagcgacaaataaaaagaaactatccagcgacaaataaaaagaaacggagggagtaacagggacggagcaagaaaatacaaatgatgataatcagttgttaaagggggtaaaatcaaatattttcatcattgaattacac

SEQ ID NO: 59881 - DNA, 1859 bp, Zea Mays
agtcccaggcccaaaccctccctcaccggccagtcggcaacccaagcgcccgccgctctcctccagccctcgccggacgtccacgcgcgagctcgtcgttggtgtcgtttctaccgtcaggttcccatctcgcttccccacccgctcctttctcccccgccctcgcctcctcctgcggcgacagcttccctagcccccttcttaagaatcttctagacgcggaccgaaggacccggccgccagccgcagcatccgttggtgaaggcgaagtaggcaggctcgggttctaggggcgaccttgctggcccggtatggaccagaggaaggccatcttccgcgcgaagctccgcgagacgaaggagaagcaacagcggcgcatcgaccccgcgctcgtcagggtctagaggcagcaatgcaaagctagagcaaccattggagcctcaggaacgaaaatcatccacactacctaccaagttttttgataatcagggagctaaaaggaaaagtgatgatactatatctgagggaaggtctgtgcgccatgaagttgctgttattcaaccgaagaccataggagcaagcactgataaatcatctgttcggatggatcaaatgtcaaagaaagggagtcaaagcaacaccaatgtccaaggaatccttccagggaatttttttgactatggagaagatgaagcttcagctccagctccaaaagagcttagtacatctcaaattcacactaaggtgaaaggtgtccctgatggcttctttgatcacaataaatctagcagtggcatgcaacccaatgaaccaagttcagaagctgctcaagtaataggatcgttgcctgaaggtttctttgataacaaagatgcagatctccgtgcacgcggtatccaacctcaaaaggttgacatgaatgatgcgtacaaagaatttgagaaggaaattcaggaggatttgcaggaagttgatgaccgccttgaagaagaggagattgatgctgctgctgagagggaggagtacttgactctagagcaacaggagtacaggcagcaggttgatatgttgaagaaacagctagtagagtcgaaagccgcccgtactgctagagtaaatagaaaacctatcggtatggactcggactccagcagtgactcatcgagcgatgaagaggatgacaacacagattttgctgttgattggagagcacagcatttgaaatgatggaaacattttgcaagtgtatacaccggagttgagtcttctgactacctggaccgactggtgaatcccttgactgcttgaacttggctgttgcttaacctgttccgagaaattttacacgttgtctccgattttttaacatacgacttaggagtacatgttaaacaagctatctgcctctagatcacgatccagtcagatatttgctcgtgcatttcaatcttctgctgtcgtcacaaggatatctgacatctcaattggttggtacttggttgttggatggttgaagggacgcctccgcctgtgaagattggctggcttgtgcatgcttcaacgcttgtgctaccagctagtacagggcttgtgtctatcttctgtccaagtgactgtggccttgtttgttttttttaaaaaaaccgtactctggtgggttttgatgtactccctccgtttctttttatttgtcgctggatagtgcaaaattatactatccagcgacaaataaaaagaaactatccagcgacaaataaaaagaaacggagggagtaacagggacggagcaagaaaatacaaatgatgataatcagttgttaaagggggtaaaatcaaatattttcatcattgaattacac

SEQ ID NO: 59882 - DNA, 1240 bp, Zea Mays
acaggacaggcaaggcgcttgaacaccatccatccatccatccatataataatcttgttgctggagaaaaccatcagccccaatataattaactaaaaattgcagcggacagaaattaaatatgaaccaatagtagaagagcgatttaggtagatatatccgaacgatcttctcccgatactatgaacatcagtccagttaacgcctcaatctagttccaaaactcttctgcccctgcagatccagcaagcagaatttccaatgaagggtaatcaagcttataatgccaatttttgaaggaagacaggagagaggatggttagtgaacaaacgcaaggaactctaaacagttccgaactcctgattgcacaaggagaagcaggatcaaactcgcctccgacccatccatccattcaatcgagttgctggagaaaaccaccagccccaatttaagcaattaagaattgcagcggacaaaaaatgagtatgaactaacagatgagcgatttaggtaaatatatatatccgaacgatcttctcccgatactatgaacatcagtccagtcaacgcctcaatctacttccaaaactttgttgcccctgcagatccagccagcagcatctccaatgaaggatcaacaaccttatagtaaaagtccggtggcaatcttcacaccaatatggtgacatcaaaacgaaaaacgaggaatgaaccaaaacgaggaatgaaccataagcaaacctacacccttcaactaatctctcgataaccaatgaaccgccggatctgacagaagactgacctgcctccatctcctcgccacacgacgccatgacgaacgcctaagaccggatcggacccaaaatcctgcaacccacacgctgagaaggcgaggacgaaacaggatcgacgcaaaaactaaaatcgcgggaagaataaaccgcaaaccgagcaacccggcgaaaccaaactcagctcgctgccggcgtcgcgcggaggcgagacggccccaagggatctgcgagagcacggaggcgcaaagcagcggaacaaatcaaccggtgaagaagaagccgacccgcctcgaaatcgaaacgtagtatatagagaaggaagtgacgtaaaacacgagcgcgccgaggcccccgcccgagcgacggatggcggccgcgccgaggcgacgaagggcaagacaaggacaggagaggcgaggcgcttggagatggacaccgaggcgaa

SEQ ID NO: 59883 - DNA, 5704 bp, Zea Mays
attttatttatttattggtcgaattgacacatgtagacaagatttaggaccgaaaatgcattttaccattagaagaatattgtcctcttgtactccgggtctgtttggttgggctgtggctgtgaaaaaagttactgtgggctgtgagctgtagaaaaagctgctgtaggctgtaagctgttaaaaagctaaaaaccgtttagtggaaatcactaaaagtcattaaaagttcttcgatatatgttttcacagtttcatccgaaaagccactaaaagcagatccagggatgctttcagatttacactgcgagaaagtcaggttttagaaaaagctgcttcctggatccagccctttggttggcttttggcttttagagaggcaaaagccaaagccaaaccaaacacaccctcctacgtgtgacgtgccccacgctttctctccttctcccgtctgaacacacattatcaatgaagcacaccatgccgacgctgcgagcagcgaactttagggtatggttatttcctcagtttcagaaaacttcatctttctgctctgtttgacagttttgtttgacagctctgtgattactgctaggtctgataaaattagctaaaaacgtccaggtagcgtaaaaaaaggagctggatagatactgctattgatatgctggtttatctccacgataacgttgaggtacgctaatttaagataaacaatattaacgcgcgttaggtgtccatttcgaagacgctttcatgataagtctgtcagccggtgcctgtggctcaaactttaattcccacatctcaatagatgaaacgggttcaggtaagcaacttgctgcgcgcctgacaattgtccaagttcattatgatgcgttcattcagtggcacagcatgtcttaaaaggaagtctcaacactaaacctgaacggttcgccaagcaacctgcagttccctccacattttcgcatccgggcttgggaccggcaaaggcagtgttaaaccgcaaacaaacaaacaaacagggaacacaaataatacaacaaaaaaaaaatcatgttctcagacattataaaaataaacaaaacacgtaactggtttttgcgccaaacgaagtagctattcttttagcatattttatggatgaacatcgagcacacgtgtaaaataacaaagaagcagagcacatgtgtaaaacaacaaagaagcagtaaaatacaaagcagcagagcacatgtgtaaaacaacagagaagcaacaaagacgctacgtaaaaaaacaggaatttttttatgatcaataagtaaacctagtacgagaaggtatctgaagtatcgcgtttaaatactcaggaatgaacagtgaatgtgttccaattgtaaaacatcgaaaccttccacagttaatctcgtccaacaaaattagtgagtccacctatttggccaagggagaagatgcccaagtgccacaagaaccagctccaataaaaatcattctatggtcggactcaaaccaaaactagagtccatccaatttggccaaggaagaagatgctcatcaattgccaaagaccagctccaataaaaatcatggaacgatcggactccacaaaaacatcttcgccaataaaactaggagtcctccatctagattggcctaggctcaagatgctcaattgccacaagaccagctccaataaaaatcatggaatgaccggactcaaaccaaaacatgccacagactccatctcatttggcctaggtagaagatgctccattgccacaacaaccagctccaataaaattattgttcaagatcctgtattgcatatcaacatgaatatgaactgcactacatgaatatgaaccaggatggctaaacttcaacccatccatgtatatgcaactactgctagtccacaaaggatttacttttgtgtaaatccagtttcatctcaaggactccacagttgcatccccaagacagtcacataggcttgtgtattcaagggcaacaatagttcagccaaacaagtttgtgacagatatacttttggcaggaacagaagaagcagaatctttcttggttattgttccacaaaggacagttccatctcaaagactccacagttgcatccccaagacagtcacatatgtaatcaagggcaacaatagttcagccaaacaagtttgttcagacagatttacttttggcaggaacagaagcagcagaatctttcttggttattgttccacaaaggataagatgcgtcagatggaaagtccagagtgaggaaattacagaacaaatgaacaatgttctaaaaaggcaagggggccaacgtcacaaaccagactgaggaggtgttccatttgttccaggcaatcaatctaatgataaccaacaaaactaacggtgccacaagatcgatctctcagatttcacatattacaactcaaaaaggaatacggttagcaagtagcatttgctgataataatatctaatgcctaatatattactgaaaggaactgtgcaatatgatgaatttgataaagaatggccatattgagtaagggggttataccaaagtacaatcagaagcaatccaagaactagactaacattagtatgggccctaacagagaaatcgagaattttggactataaaatatgaacatacggtcatacgctcaggtaaaacatcctactaggaaccaattgttttaaaaatcttaaatcaagaataatagtgaacctgcaccatcgtatgatggcatataggttaaagacagcttaaaaataaagttagtgcatagaataatttatcactggaaggaagactccatagatggaaatgtctagaactcagaatgtctaactagcaatccacaccttagctccaactgcagaaatccaaccaaacatccatcaacttatcagacatctggatccaaaaaaatggctgatatgagcagaagtattaggtgagctctggttagattgaagaatattataagatgtgtctcaaacaagtgagccggaaggtgatgtgcagtcaatagttagagtagttagagcaaactctgcacagcatcgccgtggttgtgatcatgtgaatcatctaactaccgcagagcatgcaaacaacaggtcagtccaagtcatcaagcttcacatttaatgcacaggttttctctggataccaaaagtgaaggtatccatagatgcaacttgcaaaattattagtgcacaatttatatttaccaaagaactcttctatgattttttttctattttggttcaaggatagatagacttaatgaaccttcaaatccaaggcgaaccaaatggccagtggaacaaggatggactctggagacaacaattgttggaaattctctctcagcttctgtgtgcatctgcacaaacttgaaaaagttactggttcaaaaagtaactggagaggactgttcatagagatgaattagaagcctccttgtttaaaggtttttgcagcacaggtcaagtcacaattttttccaatttgccaatatctccaattgaggaaaatccacctccaatgtctacagtacccaataaatccaggtctcaaaccttgctttactattaaatatcgatggagagacagaatgtcagccattcagatctgaaatcaccaaaaacaagtgacaaaaccaacataacatgctctagactctgacctgcccccagttccaaaatcatttatttgctacatggatttccaattgtcaacatcctgcaacacatgcaacagcgagagcgcaaaaacatagataagccagatgaagcacctaaaagcatagataagccagacgaagcatccacagatagaaatcccaaaccgaacattatgacagttgaactaccaattatttgagctaaatggtctgcagaacacagaataccagcagcacaagaattaatgcttcagtcagagcatagcatgataaagcagaaacaagcttgattaaatgtaagttgtagtactgtagttctagcgatctccagttgaatctctgaagttaaaacatgatcattaccttctaccactgcagattaaattagaagtatctgaatattaacgtagtattctggttcataaaggactggcctggtacaaatgcgagagaggtctcaagtcaccatgtcacgagtttgaagcagggctggtacaatagctctcaagtcaccatgtaacaggttcgaagcagtctcacaagtatcatggttcatatacaagaataagttagtacctccaacacataatccacgatgacaagcccaagcaaaaaaaaatatcagtaagacctgcaataatgaccctaatcattatctacttcaaggtacaagacactgaacaaacacaatgcaagttgaaggttgtaggtctgaatagatgcaaactggttccttcatacccagttatcacctagagatctgcaatcaatgagaccaccctcggataactacctatttgatagtgacaactgagaacacaaacagcatgaacattcatcaaatatcataggaacaggataaagcgtgtatcaatgggcaacaatttcagctggaagtcatatctctgtagcaatgcctcccaaaactgcacatccagtaccagaacatcaaaagcctacgagggaagtaaatttttaagaccattgacagcaaaagtttcgaacaaccttgacagcaaaccaagggaatcctgaacagtttataacttattgctcatgcagaaacagaatctaattcaggctcctccgtccatacaatccagttgctgtacaagtagagaatcaccatcccaaatgtaaggaacaagaaatttaagagtaccaataaaagagaggtagagccaaacgatgttctccagatgcaataaacttcaaaaacacctccaaaatgtttaaatctacctccaaaacaccacctgatccagctaataacatttttctaattaagggcgatcaagcttcaaattaatccggtggcaatcttcacccaccagtgattgacatatcaaaaacaaagtcaaacctccagccttcagctgacctctccataaccagccaggtacttttgcatctaggacgaactccgagtctcctaaaagtgcgcagatttactaacaaatggaagcctatgaggaaagctaattttcaaagaagattgacaaaggatggttagtgaacaaacaaggaactctgaacagttcagaacttctgattgcaggagatgctggagaaaacaaccagccccaatttaaaacatttaagaattgcagcggacagaaatgtgtataaaccaatagaagagcgatttaggtagatatatcctgacaatcttcacccggtactatgggcatcagtccagtcaacgcctcaaatctacttcttgcccttacagatccggtaagcagcatttccaatgaagggtaatcaagattataatgccaattttcaaagaaaaatgacaggagagggggtggttagtgaacaaacacaaggaactctgaacatttccgaacttctgattgcacaagcgtaagccagatcgatcaaactcgcctccaacccatccattcatccatataatattgctggaaaaaaccaccagccccaatataagaaattaagaattgcagcggacaaaaac

SEQ ID NO: 59884 - DNA, 2312 bp, Zea Mays
acacgtaactggtttttgcgccaaacgaagtagctattcttttagcatattttatggatgaacatcgagcacacgtgtaaaataacaaagaagcagagcacatgtgtaaaacaacaaagaagcagtaaaatacaaagcagcagagcacatgtgtaaaacaacagagaagcaacaaagacgctacgtaaaaaaacaggaatttttttatgatcaataagtaaacctagtacgagaaggtatctgaagtatcgcgtttaaatactcaggaatgaacagtgaatgtgttccaattgtaaaacatcgaaaccttccacagttaatctcgtccaacaaaattagtgagtccacctatttggccaagggagaagatgcccaagtgccacaagaaccagctccaataaaaatcattctatgcgcaaaaacatagataagccagatgaagcacctaaaagcatagataagccagacgaagcatccacagatagaaatcccaaaccgaacattatgacagttgaactaccaattatttgagctaaatggtctgcagaacacagaataccagcagcacaagaattaatgcttcagtcagagcatagcatgataaagcagaaacaagcttgattaaatgtaagttgtagtactgtagttctagcgatctccagttgaatctctgaagttaaaacatgatcattaccttctaccactgcagattaaattagaagtatctgaatattaacgtagtattctggttcataaaggactggcctggtacaaatgcgagagaggtctcaagtcaccatgtcacgagtttgaagcagggctggtacaatagctctcaagtcaccatgtaacaggttcgaagcagtctcacaagtatcatggttcatatacaagaataagttagtacctccaacacataatccacgatgacaagcccaagcaaaaaaaaatatcagtaagacctgcaataatgaccctaatcattatctacttcaaggtacaagacactgaacaaacacaatgcaagttgaaggttgtaggtctgaatagatgcaaactggttccttcatacccagttatcacctagagatctgcaatcaatgagaccaccctcggataactacctatttgatagtgacaactgagaacacaaacagcatgaacattcatcaaatatcataggaacaggataaagcgtgtatcaatgggcaacaatttcagctggaagtcatatctctgtagcaatgcctcccaaaactgcacatccagtaccagaacatcaaaagcctacgagggaagtaaatttttaagaccattgacagcaaaagtttcgaacaaccttgacagcaaaccaagggaatcctgaacagtttataacttattgctcatgcagaaacagaatctaattcaggctcctccgtccatacaatccagttgctgtacaagtagagaatcaccatcccaaatgtaaggaacaagaaatttaagagtaccaataaaagagaggtagagccaaacgatgttctccagatgcaataaacttcaaaaacacctccaaaatgtttaaatctacctccaaaacaccacctgatccagctaataacatttttctaattaagggcgatcaagcttcaaattaatccggtggcaatcttcacccaccagtgattgacatatcaaaaacaaagtcaaacctccagccttcagctgacctctccataaccagccaggtacttttgcatctaggacgaactccgagtctcctaaaagtgcgcagatttactaacaaatggaagcctatgaggaaagctaattttcaaagaagattgacaaaggatggttagtgaacaaacaaggaactctgaacagttcagaacttctgattgcaggagatgctggagaaaacaaccagccccaatttaaaacatttaagaattgcagcggacagaaatgtgtataaaccaatagaagagcgatttaggtagatatatcctgacaatcttcacccggtactatgggcatcagtccagtcaacgcctcaaatctacttcttgcccttacagatccggtaagcagcatttccaatgaagggtaatcaagattataatgccaattttcaaagaaaaatgacaggagagggggtggttagtgaacaaacacaaggaactctgaacatttccgaacttctgattgcacaagcgtaagccagatcgatcaaactcgcctccaacccatccattcatccatataatattgctggaaaaaaccaccagccccaatataagaaattaagaattgcagcggacaaaaac

SEQ ID NO: 59885 - DNA, 3488 bp, Zea Mays
gggagaggggggatttttttggactttatatattgtcagttgtcacacaagtgggggcctttcaatagttttgctggtttatattccttccgcttccggcctttcaatgcagcgagcgcacgcagcgcgggagaaggcgaagcgcgagagcagaggcgcaacgcggcgccggcatggactcgggcagcaagagctggagcatcgatagctacctcaacgagcacttcgacatccccgccaagaacccgcccagcgaggcccgcctccgctggcgccgcgccgtcggcctcgtcgtccgcaaccgccgccgccgcttccgcatgttctcaggcctccacgccctcgacgacgcccagcgccgcaacatcctggtataagacgataccacctatctcctgagcttatcgaagaaggattttgtatcagtccagatgaactggcagcaattactggaatccgtgaagactctacgatcctcaagtcacatggtggaatcagtggaatatctaggaaaatcaaggcatcattggatgatggcatcaaggaaactgaaatagcaaccagacagaagctgtatggcagcaacaagcacaccgagaaacctcctagaagcttctggacgtttgtctgggatgcgttgcatgacctgacgttgattattctaatcgtttgtgccgttgtttctctaatggttggccttgccactgagggatggccgaagggcatctatgacggccttggcataataaccagcattttgttggtggtgctggtcacagcatccagtgattacaaacagtcacggaagttcatggagctggactacgagaaaaagaagatatacgcccttgtcactagagataggaaaaccaaaagggtactgattcatgatctggttgtgggtgacatcttgcatctttcagtaggcgatgtggttcctgcagatggcctgttcatctctggctactgcctagtcatagatgaatctagcttatcaggcgagagcgaaccagttgatgtttctgaagaaaagcctttcgttcatgctggaagtaaggtggtagatgggactgccaagatgcttgtgactgctgttggtatgcgtactgaatggggcaaagtcatggatactctgagtgctgatggagtggatgaaacccctttacaagttaagctcaatggtgtggccacgatcattggacagatcgggctggcgtttgctatcctcacatttctagtgctcctagtgaggttcctggtggacaaaggaatgcatgttgggttgtcaaattggtcagcaaatgatgcgctgacaatagtgaactactttgctattgcagtgacaatcatcgttgtcgcagtgcccgagggtctaccactggctgtgactcttagcctcgcgtttgccatgcagaagttgatgaatgacaaagcgctagtgagacatctcgctgcgtgtgagaccatgggttcagcaagttgtatttgcactgataagactggaactttgacgactaaccacatgatcgttgacaaggtttggatgggcgatgtatccaagtctgtcaacagtgatacaaatatgaacgagctgaaggatgctactgcagaaagtgctgtggacttacttgttcagggaatatttgtgaacactgctgctgagatcgtgaagggagatgatggcagaagatctatcttaggcacaccaactgaagcagcgttgttggagtttggcttgggcttgcaaggagatctatacggtgagtacaataagatggcaagagtcaaaatagagcccttcaactcagttaagaaaaagatgtctgtggtaatacagttacctaatggaggcctccggtccttctgcaaaggtgcatcagaacttattctagggcagtgtgacagcttcctcaacagtgaaggaaatttagcaccactgtcagaaatgcaaaagcagaatgtcttagatataataaactcgtttggatctgaggcgttaagaacgctctgtatcgcgtttaaggatctgggtgaaattcctgacgaccaaacaataccagaggatggttacacactaatagcgctttttggcataaaggatccagtccgtcccggtgtgagggatgcagtgatgacctgcatggctgctggaattaaagttacaatggtgactggagacaacatcaatactgctaaagccattgccaaggaatgtgggatattaaccgaggatggaatcgcaatagaaggaagagagcttcacgataagagcatggatgaactgaaggagatcctgcctaaaattcaggtaatggcccggtccttgccgatggacaaatataaactggtgacaagcctaaaaagtatgtatcaagaggtggtggcagttactggtgatggaaccaatgatgccccagcattgagtgagtcagacataggtctggccatgggaattgccggcactgaggtcgcaaaagaaaatgccgatgttataataatggatgataatttcagtaccattgtaaatgttgctagatggggtcgtgcggtttacttgaacattcagaagtttgtgcagttccagcttacagttaatatagtggctctgatagtgaatttcatctcagcgtgtatcataggtactgcaccacttactgccgtccagttgctatgggtgaacatgatcatggatacattaggagccttggccttagcgacagagccgcctaacgatgaaatgatgaatagaccaccagtgagacgggggcatggttttatcactcaggtcatgtggagaaatattcttgggcaggctttatatcagctccttgtgcttggtactctcatgtttaatgggaagaggatccttaacatcgaaggcccaaatgctgatagaactatcaataccctcatattcaactcttttgtgttttgccaggttttcaacgagataaatagcagggaaatggaaaagatcaacgtgttcagagggatactgaaaaactgggtctttatcggtatattgacaacaaccatcatattccaagtaatcatagtagagtttcttggaacctttgcaaacaccgtaccattgagttgggagctatggttgctcagcgctattcttggctcggtcagtttggttatctctgttatcctcaagtgcattcccgtcgaatctaggaaaacggatattaagccccatggctatgagttgattcctgaagccccagaaacagtttaggccgattattcctgtcccacatgaattggatgagattagagaaaattataaaggattttgatttatttggaattgagagggaattaagtttggcttgtacataatttaaattaaacgacgcttattctaggatggcgtatctatgtcatgtgtgcacacaacaccaagctagtgagtagtgatggtgcctttgcgtgcgatattctcgtccagtcgtccacagaggagagaggcagacacacgt

SEQ ID NO: 59886 - DNA, 3464 bp, Zea Mays
ttcaatgcagcgagcgcacgcagcgcgggagaaggcgaagcgcgagagcagaggcgcaacgcggcgccggcatggactcgggcagcaagagctggagcatcgatagctacctcaacgagcacttcgacatccccgccaagaacccgcccagcgaggcccgcctccgctggcgccgcgccgtcggcctcgtcgtccgcaaccgccgccgccgcttccgcatgttctcaggcctccacgccctcgacgacgcccagcgccgcaacatcctgatgtcctctgcagtgcagaggatccgagtctacgccgaagatggagcaggaggaggggaatttggtgtaggcgcggtggtagtggatgagatgactgggaggttgggagctttgatgattacgacatacatgaacgtgctactaggtaaattgccctaccttgttttccttttgccctccgccgcttatagtgtcaatgccaatgtcggccgtgtggtctgtttggccatctacagtgcagagtatagaggtataagacgataccacctatctcctgagcttatcgaagaaggattttgtatcagtccagatgaactggcagcaattactggaatccgtgaagactctacgatcctcaagtcacatggtggaatcagtggaatatctaggaaaatcaaggcatcattggatgatggcatcaaggaaactgaaatagcaaccagacagaagctgtatggcagcaacaagcacaccgagaaacctcctagaagcttctggacgtttgtctgggatgcgttgcatgacctgacgttgattattctaatcgtttgtgccgttgtttctctaatggttggccttgccactgagggatggccgaagggcatctatgacggccttggcataataaccagcattttgttggtggtgctggtcacagcatccagtgattacaaacagtcacggaagttcatggagctggactacgagaaaaagaagatatacgcccttgtcactagagataggaaaaccaaaagggtactgattcatgatctggttgtgggtgacatcttgcatctttcagtaggcgatgtggttcctgcagatggcctgttcatctctggctactgcctagtcatagatgaatctagcttatcaggcgagagcgaaccagttgatgtttctgaagaaaagcctttcgttcatgctggaagtaaggtggtagatgggactgccaagatgcttgtgactgctgttggtatgcgtactgaatggggcaaagtcatggatactctgagtgctgatggagtggatgaaacccctttacaagttaagctcaatggtgtggccacgatcattggacagatcgggctggcgtttgctatcctcacatttctagtgctcctagtgaggttcctggtggacaaaggaatgcatgttgggttgtcaaattggtcagcaaatgatgcgctgacaatagtgaactactttgctattgcagtgacaatcatcgttgtcgcagtgcccgagggtctaccactggctgtgactcttagcctcgcgtttgccatgcagaagttgatgaatgacaaagcgctagtgagacatctcgctgcgtgtgagaccatgggttcagcaagttgtatttgcactgataagactggaactttgacgactaaccacatgatcgttgacaaggtttggatgggcgatgtatccaagtctgtcaacagtgatacaaatatgaacgagctgaaggatgctactgcagaaagtgctgtggacttacttgttcagggaatatttgtgaacactgctgctgagatcgtgaagggagatgatggcagaagatctatcttaggcacaccaactgaagcagcgttgttggagtttggcttgggcttgcaaggagatctatacggtgagtacaataagatggcaagagtcaaaatagagcccttcaactcagttaagaaaaagatgtctgtggtaatacagttacctaatggaggcctccggtccttctgcaaaggtgcatcagaacttattctagggcagtgtgacagcttcctcaacagtgaaggaaatttagcaccactgtcagaaatgcaaaagcagaatgtcttagatataataaactcgtttggatctgaggcgttaagaacgctctgtatcgcgtttaaggatctgggtgaaattcctgacgaccaaacaataccagaggatggttacacactaatagcgctttttggcataaaggatccagtccgtcccggtgtgagggatgcagtgatgacctgcatggctgctggaattaaagttacaatggtgactggagacaacatcaatactgctaaagccattgccaaggaatgtgggatattaaccgaggatggaatcgcaatagaaggaagagagcttcacgataagagcatggatgaactgaaggagatcctgcctaaaattcaggtaatggcccggtccttgccgatggacaaatataaactggtgacaagcctaaaaagtatgtatcaagaggtggtggcagttactggtgatggaaccaatgatgccccagcattgagtgagtcagacataggtctggccatgggaattgccggcactgaggtactgcaccacttactgccgtccagttgctatgggtgaacatgatcatggatacattaggagccttggccttagcgacagagccgcctaacgatgaaatgatgaatagaccaccagtgagacgggggcatggttttatcactcaggtcatgtggagaaatattcttgggcaggctttatatcagctccttgtgcttggtactctcatgtttaatgggaagaggatccttaacatcgaaggcccaaatgctgatagaactatcaataccctcatattcaactcttttgtgttttgccaggttttcaacgagataaatagcagggaaatggaaaagatcaacgtgttcagagggatactgaaaaactgggtctttatcggtatattgacaacaaccatcatattccaagtaatcatagtagagtttcttggaacctttgcaaacaccgtaccattgagttgggagctatggttgctcagcgctattcttggctcggtcagtttggttatctctgttatcctcaagtgcattcccgtcgaatctaggaaaacggatattaagccccatggctatgagttgattcctgaagccccagaaacagtttaggccgattattcctgtcccacatgaattggatgagattagagaaaattataaaggattttgatttatttggaattgagagggaattaagtttggcttgtacataatttaaattaaacgacgcttattctaggatggcgtatctatgtcatgtgtgcacacaacaccaagctagtgagtagtgatggtgcctttgcgtgcgatattctcgtccagtcgtccacagaggagagaggcagacacacgt

SEQ ID NO: 59887 - DNA, 3525 bp, Zea Mays
tttcacacggtttctaaggcattggaaacgtgttgacatggttttatccccataaaactaattttatctcacaaaactcattcatcttaaatgtatggcatgtcatctaaaacactgatatgatacactattaaatgtgcatttgagaatagcctaaagacaagtggtcgtgccagcagccacgtttttgcttggcgagcaagctggctatgccgccacatggcacgcgaggaggcactagtgccacgccagccatacctcgagcaagcaagtcatcagtgtcgaagagatggttaaggctgcgcttccaggtccatgaactccttcccgctggccctacttcgccatcacggggaaaagttcaggttgtaattaatgtgcacaaggcagcgctgcattttatggacggtataagacgataccacctatctcctgagcttatcgaagaaggattttgtatcagtccagatgaactggcagcaattactggaatccgtgaagactctacgatcctcaagtcacatggtggaatcagtggaatatctaggaaaatcaaggcatcattggatgatggcatcaaggaaactgaaatagcaaccagacagaagctgtatggcagcaacaagcacaccgagaaacctcctagaagcttctggacgtttgtctgggatgcgttgcatgacctgacgttgattattctaatcgtttgtgccgttgtttctctaatggttggccttgccactgagggatggccgaagggcatctatgacggccttggcataataaccagcattttgttggtggtgctggtcacagcatccagtgattacaaacagtcacggaagttcatggagctggactacgagaaaaagaagatatacgcccttgtcactagagataggaaaaccaaaagggtactgattcatgatctggttgtgggtgacatcttgcatctttcagtaggcgatgtggttcctgcagatggcctgttcatctctggctactgcctagtcatagatgaatctagcttatcaggcgagagcgaaccagttgatgtttctgaagaaaagcctttcgttcatgctggaagtaaggtggtagatgggactgccaagatgcttgtgactgctgttggtatgcgtactgaatggggcaaagtcatggatactctgagtgctgatggagtggatgaaacccctttacaagttaagctcaatggtgtggccacgatcattggacagatcgggctggcgtttgctatcctcacatttctagtgctcctagtgaggttcctggtggacaaaggaatgcatgttgggttgtcaaattggtcagcaaatgatgcgctgacaatagtgaactactttgctattgcagtgacaatcatcgttgtcgcagtgcccgagggtctaccactggctgtgactcttagcctcgcgtttgccatgcagaagttgatgaatgacaaagcgctagtgagacatctcgctgcgtgtgagaccatgggttcagcaagttgtatttgcactgataagactggaactttgacgactaaccacatgatcgttgacaaggtttggatgggcgatgtatccaagtctgtcaacagtgatacaaatatgaacgagctgaaggatgctactgcagaaagtgctgtggacttacttgttcagggaatatttgtgaacactgctgctgagatcgtgaagggagatgatggcagaagatctatcttaggcacaccaactgaagcagcgttgttggagtttggcttgggcttgcaaggagatctatacggtgagtacaataagatggcaagagtcaaaatagagcccttcaactcagttaagaaaaagatgtctgtggtaatacagttacctaatggaggcctccggtccttctgcaaaggtgcatcagaacttattctagggcagtgtgacagcttcctcaacagtgaaggaaatttagcaccactgtcagaaatgcaaaagcagaatgtcttagatataataaactcgtttggatctgaggcgttaagaacgctctgtatcgcgtttaaggatctgggtgaaattcctgacgaccaaacaataccagaggatggttacacactaatagcgctttttggcataaaggatccagtccgtcccggtgtgagggatgcagtgatgacctgcatggctgctggaattaaagttacaatggtgactggagacaacatcaatactgctaaagccattgccaaggaatgtgggatattaaccgaggatggaatcgcaatagaaggaagagagcttcacgataagagcatggatgaactgaaggagatcctgcctaaaattcaggtaatggcccggtccttgccgatggacaaatataaactggtgacaagcctaaaaagtatgtatcaagaggtggtggcagttactggtgatggaaccaatgatgccccagcattgagtgagtcagacataggtctggccatgggaattgccggcactgaggtcgcaaaagaaaatgccgatgttataataatggatgataatttcagtaccattgtaaatgttgctagatggggtcgtgcggtttacttgaacattcagaagtttgtgcagttccagcttacagttaatatagtggctctgatagtgaatttcatctcagcgtgtatcataggtactgcaccacttactgccgtccagttgctatgggtgaacatgatcatggatacattaggagccttggccttagcgacagagccgcctaacgatgaaatgatgaatagaccaccagtgagacgggggcatggttttatcactcaggtcatgtggagaaatattcttgggcaggctttatatcagctccttgtgcttggtactctcatgtttaatgggaagaggatccttaacatcgaaggcccaaatgctgatagaactatcaataccctcatattcaactcttttgtgttttgccaggttttcaacgagataaatagcagggaaatggaaaagatcaacgtgttcagagggatactgaaaaactgggtctttatcggtatattgacaacaaccatcatattccaagtaatcatagtagagtttcttggaacctttgcaaacaccgtaccattgagttgggagctatggttgctcagcgctattcttggctcggtcagtttggttatctctgttatcctcaagtgcattcccgtcgaatctaggaaaacggatattaagccccatggctatgagttgattcctgaagccccagaaacagtttaggccgattattcctgtcccacatgaattggatgagattagagaaaattataaaggattttgatttatttggaattgagagggaattaagtttggcttgtacataatttaaattaaacgacgcttattctaggatggcgtatctatgtcatgtgtgcacacaacaccaagctagtgagtagtgatggtgcctttgcgtgcgatattctcgtccagtcgtccacagaggagagaggcagacacacgt

SEQ ID NO: 59888 - DNA, 3331 bp, Zea Mays
catggcacgcgaggaggcactagtgccacgccagccatacctcgagcaagcaagtcatcagtgtcgaagagatggttaaggctgcgcttccaggtccatgaactccttcccgctggccctacttcgccatcacggaatgatatttgcgtttgttaccagggaaaagttcaggttgtaattaatgtgcacaaggcagcgctgcattttatggacggtataagacgataccacctatctcctgagcttatcgaagaaggattttgtatcagtccagatgaactggcagcaattactggaatccgtgaagactctacgatcctcaagtcacatggtggaatcagtggaatatctaggaaaatcaaggcatcattggatgatggcatcaaggaaactgaaatagcaaccagacagaagctgtatggcagcaacaagcacaccgagaaacctcctagaagcttctggacgtttgtctgggatgcgttgcatgacctgacgttgattattctaatcgtttgtgccgttgtttctctaatggttggccttgccactgagggatggccgaagggcatctatgacggccttggcataataaccagcattttgttggtggtgctggtcacagcatccagtgattacaaacagtcacggaagttcatggagctggactacgagaaaaagaagatatacgcccttgtcactagagataggaaaaccaaaagggtactgattcatgatctggttgtgggtgacatcttgcatctttcagtaggcgatgtggttcctgcagatggcctgttcatctctggctactgcctagtcatagatgaatctagcttatcaggcgagagcgaaccagttgatgtttctgaagaaaagcctttcgttcatgctggaagtaaggtggtagatgggactgccaagatgcttgtgactgctgttggtatgcgtactgaatggggcaaagtcatggatactctgagtgctgatggagtggatgaaacccctttacaagttaagctcaatggtgtggccacgatcattggacagatcgggctggcgtttgctatcctcacatttctagtgctcctagtgaggttcctggtggacaaaggaatgcatgttgggttgtcaaattggtcagcaaatgatgcgctgacaatagtgaactactttgctattgcagtgacaatcatcgttgtcgcagtgcccgagggtctaccactggctgtgactcttagcctcgcgtttgccatgcagaagttgatgaatgacaaagcgctagtgagacatctcgctgcgtgtgagaccatgggttcagcaagttgtatttgcactgataagactggaactttgacgactaaccacatgatcgttgacaaggtttggatgggcgatgtatccaagtctgtcaacagtgatacaaatatgaacgagctgaaggatgctactgcagaaagtgctgtggacttacttgttcagggaatatttgtgaacactgctgctgagatcgtgaagggagatgatggcagaagatctatcttaggcacaccaactgaagcagcgttgttggagtttggcttgggcttgcaaggagatctatacggtgagtacaataagatggcaagagtcaaaatagagcccttcaactcagttaagaaaaagatgtctgtggtaatacagttacctaatggaggcctccggtccttctgcaaaggtgcatcagaacttattctagggcagtgtgacagcttcctcaacagtgaaggaaatttagcaccactgtcagaaatgcaaaagcagaatgtcttagatataataaactcgtttggatctgaggcgttaagaacgctctgtatcgcgtttaaggatctgggtgaaattcctgacgaccaaacaataccagaggatggttacacactaatagcgctttttggcataaaggatccagtccgtcccggtgtgagggatgcagtgatgacctgcatggctgctggaattaaagttacaatggtgactggagacaacatcaatactgctaaagccattgccaaggaatgtgggatattaaccgaggatggaatcgcaatagaaggaagagagcttcacgataagagcatggatgaactgaaggagatcctgcctaaaattcaggtaatggcccggtccttgccgatggacaaatataaactggtgacaagcctaaaaagtatgtatcaagaggtggtggcagttactggtgatggaaccaatgatgccccagcattgagtgagtcagacataggtctggccatgggaattgccggcactgaggtcgcaaaagaaaatgccgatgttataataatggatgataatttcagtaccattgtaaatgttgctagatggggtcgtgcggtttacttgaacattcagaagtttgtgcagttccagcttacagttaatatagtggctctgatagtgaatttcatctcagcgtgtatcataggtactgcaccacttactgccgtccagttgctatgggtgaacatgatcatggatacattaggagccttggccttagcgacagagccgcctaacgatgaaatgatgaatagaccaccagtgagacgggggcatggttttatcactcaggtcatgtggagaaatattcttgggcaggctttatatcagctccttgtgcttggtactctcatgtttaatgggaagaggatccttaacatcgaaggcccaaatgctgatagaactatcaataccctcatattcaactcttttgtgttttgccaggttttcaacgagataaatagcagggaaatggaaaagatcaacgtgttcagagggatactgaaaaactgggtctttatcggtatattgacaacaaccatcatattccaagtaatcatagtagagtttcttggaacctttgcaaacaccgtaccattgagttgggagctatggttgctcagcgctattcttggctcggtcagtttggttatctctgttatcctcaagtgcattcccgtcgaatctaggaaaacggatattaagccccatggctatgagttgattcctgaagccccagaaacagtttaggccgattattcctgtcccacatgaattggatgagattagagaaaattataaaggattttgatttatttggaattgagagggaattaagtttggcttgtacataatttaaattaaacgacgcttattctaggatggcgtatctatgtcatgtgtgcacacaacaccaagctagtgagtagtgatggtgcctttgcgtgcgatattctcgtccagtcgtccacagaggagagaggcagacacacgt

SEQ ID NO: 59889 - DNA, 1310 bp, Zea Mays
gttctttgctatgcttttgtttgttactgcctccacctatcccatatctcaatcttaccttggtgattacattatttttgttatctaaaatctccaatctcctatcccaatttgagaacagtgttttacttatcttatccttggcaacgtcctattctttaccgcgtgtaagccttgacatacctccattctttattgtacttataccactggctcttctatgccttcaccttttcccctatactcttgtctgttatcgcctttgacccttgcgatatttatgtcatctacctaaatgcttaccttaaacttattctttaaaagcctctcctttattttgagaaagtttgagagttgtgagttacccatctctcccttgatttcatttcacttcttatcgccttacaagtcttgtcttaattccatcctttgctgtgtgttttatttgctatcaccattaccttgtcatccatcggtcttgccttgacacttatctttattcttgctctttaaaaaaatctcctctcttccacctcaatttgagagtggcagtttacctatctggcccatggacgtaccctctccttttccatttgtaggtcttgtcttaactccatcctttgtggtatttatattcttggttcttatgaacatttacctcctctcctacatccttgtcagttatcacctttaaaccctcgtgatacctatgcccttgccatatgcctactttgaacctaccttttaaagccttctcttttctgtccctattcgagggtaatgcctcacccacttcaccattgattgctcccccttctttgacgccttgcaagttttgtctgaaatacaccccttcatgtgtgtttgtctgttatcaccttaacccttgttattcctcgatctttaccttgatgcctatcatgtacccatattttaaagccccctctcccgttttagttcaagagtgttgtcttacccctccccactcttgttcgttccctattcctctatcgtgttgcaagtcttgttttaactcgatcttttggtgtgcttttccttgttacctcctgtacctttgtaatctctagatctttccatgatgttacattatgcctaccttttgaaatatcatattttccatctcgatttgagaatggtgttttacctaccctgcccttggttgcattttctcccttgtcgattacaatccttgctttagctccatcctttactatgctcatgcccctatcctacatgttttatcgcccccttgtcttttgatggtcttatagtagtttccacattgtaag

SEQ ID NO: 59890 - DNA, 1381 bp, Zea Mays
cacgagtgagacccgcctgttagcctagtgccacactaaaagtctccaccttctctcatccccatttcctccccacgccccgtcggtttctctcatgccaatttctcttgccctggttctctctcgctcgtcggcgcgcagttggagtcgccgagagcgccgtctgcgccgaatggtactcgccgtcaaactccgtcgtggagctgaaggcgcgattggcgtgaactacggcatggtcgccaacaacctgccggcgccggagcaggtcgtctccatgtacaaggccaagaacatcagctacgtgcggctcttccacccggacacggacgcgttgaacgcgctccgcggctccggcgtcggcgtcgtcctgggcacgctgaacgaggacctcccgcgcctggcgtccgacccgtccttcgccgcgtcgtgggtggccacgaacgtgcagcccttcgccggcgccgtccagttccggtacatcaacgccggcaacgaggtcatcccgggggacgccgcggcgcgggtgctcccggccatgcagaacctggagtcggcgctccggtccgcgggggtcacgggcgtccccgtcaccacggccgtggccaccagcgtgctcggcgcctcgtacccgccgtcccagggcgcattctccgaggcggccgcgtcggtgatggcgcccatcgtctcgtacctgtcgtcgaagggcgcgccgctgctggtcaacgtatacccgtacttcgcctactcgagcagcggcgggcaggtggcgctcgggtacgcgctgctgtcggcggacgccggcgcggcgtcgtcggtcacggacgccggggtggtctacaccaacatgttcgacgctatcgtggacgcgacgcacgccgcggtggagaaagccggggtccaggggctggagctggtggtgtcggagaccggctggccgtcggccggcggcgagggcgccaccgtggagaatgccgcggcgtacaacaacaacgtggtgcggcacgtcggcggcggtaccccgcgccggccagggaaggccgtggagacgtaccttttcgccatgttcaacgagaacggcaaggccgagggcgtggagcagcacttcggcctcttccagccggacatgagcgaggtctaccacgtcgacttcacggcgggatccccctaggtctagggaggaggcggcttacccgcttcttcacttttagtagtaggctcatccttcattcccctgatctacttcgttttgttggagtagcaaaactgccgcacgtcacgtttactgtttattttttaatatcttatatagaaaaataatatcaacatttattctttaaataagtttatgtttactataaatatttttttaattcatctcata

SEQ ID NO: 59891 - DNA, 2133 bp, Zea Mays
ctcatccccatttcctccccacgccccgtcggtttctctcatgccaatttctcttgccctggttctctctcgctcgtcggcgcgcagttggagtcgccgagagcgccgtctgcgccgaatggtactcgccgtcaaactccgtcgtggtgagtccgctttcccttcccacctcatccctcccctctctgccccctgccgagcagttcgtctcctcccgacgagcccctgcacgactccctttccctccgatgcgcggctcctgcgcagggcgcggcgcggcggacagccagcgcgcccaggcgtctggcccctgcgcgtggagtcgtcgtagacgtgctgctccatgcctccgctgaccatgtgcggcgagccccaccggccatggacgctgctgtcgcgtcaacgtctaggcccgctagagtccgactagagccgtcgctgtccggccatggccaccgggccggtgccacccgccccgcctgctagcctcggctggagcagcacttccccatcgcctttgtgcatgcgtgctcgtcctagccgatggaaggaggaagagaaacctgttgctcatcataggctcgtagctgatggaattgagaaagaagaaataaccgctcgtggggcccgcatgcatgtctcccacacattcctcacgccatgcgcacgattagcatcctggaaagtggaaaccgcctggaccccatcgcatggcatgcatcttctttttgcatccctctgttgcgttttttttaaattcttttcctacgcatgcttggaaactccctcgtgttagatctactgcgtccgcgacttcgtaagcctctgtgtggcttggctctaaccagtcatattgcgtcactgcattaaatctggacgttattaaatacgagttaccatatgtgttagacgtccgatttatttcgttgcagtttcgttagcttcacaataatgtcatgtataaaaatattaatttatcgtaacacatgttttatgtagttaactaattattggtttaatcttcgattattaaaatggagatctaataaaaactaagttatagtttaaatttacgcttttataaatacaaattaatgtgataaatgtcaacacagatgattttgaattaatacttgtttagtataatcacgacatctgttagtggtgctcgtgtgtcgcgcgcgctgattacgagttattcgcgtgtgttgcgctcgtcgtcgtcatgttgttcccgtgtgtagcgcgacatctgcgcgtgataataaattgtttttgcttataaacactcatgttaataacgttaattcgtcgggccacatattttagataattaacttaagatttgctcgattaatatttattagattaactttctaattagattgaatatgtagggttcaacttgcgcttttataataaacgttaacatgactaatattaacttaactactttttatttatttaatatttgtttagtacaaatgcgtcacctatttagttgcttgtctgtcgtgcgtgctgttccgcacgtggtgtcgtgctggttcgcgcgtcgttcacactagtcgtgcgcactgcttcgtgtgtcgtgagcgtgctatatcgctcgtgtccacacgtcgttctgcactatgtagtgctattttgcgcaccgtgaatttgtctcacttagggtcgctgatgttatttaatttgcttaattaactgacaagctgttagagtagcagactaatcgagattaaatagtagttataatttatatttgagaaatgtcaaattaaatattctaactaatacttgcttagtgtaaacacgctaacccctcgactatagcttcgactatcgcggttcttttcctcgcataatcgtagaagcgctctctattttatattgctcgcttttataacatcttatcttgtatgatgtaatgttcttatgtatatgtatatgtttgtttgcttgtgcctgttcatcttcgcttcgcgtgcgattatatcgcgattcgtttctgagctttgaggaatcgacgatcaagcatggcgacaaagtgatcgaactcttcgagttctacgagatcgaagaccctgagcatctgtttggtgaaggcaagtgtcctttgacctatctatg

SEQ ID NO: 59892 - DNA, 1223 bp, Zea Mays
ctcagacgtatgatgtaatcgactatttcccttattaatactagtttgagcactgtgtgatgatgtccatattatgtaactgctgtgtacgtgaataactgatcctggcacgtacatggttcgcattcggtttgccttctaaaaccgggtgtgacataagtggtatcaaagccgtgctgactgtaggaccgctagcctagagtagcattggccgttttaaggacttattgatcattacttcacctcatccttgatgttgtttcaaaatattagtcacctcgactaattctatgttgtgctcctatatgcccccttgccaaaagtattttattccagtatggtctatacttttctcaatctattagatctgatctcactcttgtgcttgcgatatctttgtagatgccccctgaccataaccttcttgccttttgggatttattcttcttccatcactaaatttttacaatttggcaatccttattcctttgttattgacatgctcgtaccctagattcttaaatactcttgtttcaaatacttacatatgaatttctactgcctacttaaacatttcagtttatatgtccatcatcatcctgtcttttgagaccctttcctattctgttgctaagtcgctatcttttggcaattcgtactcccttggtcttggtatgctcgcaccttcgtaatcttgcatacttttacttcttatataaatgcttacctttgtaccccaatgtctgtttaaaacctttcagtttacatactcttgaccacctttgtttcttcatgatccatgagcggtcattttattttgcatatccttggtaatcttgttgtctccttgtaactccacttggtaattgattttctttacttcaaccattctgttgcaaccttacctatcttacccttgactgttttctgcacttcgccacctagcgagtcttgcttgaactctatccttattcttttcattattatcacctttacctttgacacttctatatcttacttgatgtttgtctcatacctgccctttaaaatcacctctctcccgtcttattctgagagctatacacctatctttaccttggtcgcatcctcttctttggcttgcgagtttgaaacttcgttctttgctatgcttttgtttgttactgcctccacctatcccatatctcaatcttaccttggtgattacattatttttgttatct

SEQ ID NO: 59893 - DNA, 1275 bp, Zea Mays
aggctggcgtccgtgcatggccgccgtgcatgtgtccacctccagcccacctcctgtcccatcccagtagcacagagccgacgctggaaataaggagctgaaggcgcgattggcgtgaactacggcatggtcgccaacaacctgccggcgccggagcaggtcgtctccatgtacaaggccaagaacatcagctacgtgcggctcttccacccggacacggacgcgttgaacgcgctccgcggctccggcgtcggcgtcgtcctgggcacgctgaacgaggacctcccgcgcctggcgtccgacccgtccttcgccgcgtcgtgggtggccacgaacgtgcagcccttcgccggcgccgtccagttccggtacatcaacgccggcaacgaggtcatcccgggggacgccgcggcgcgggtgctcccggccatgcagaacctggagtcggcgctccggtccgcgggggtcacgggcgtccccgtcaccacggccgtggccaccagcgtgctcggcgcctcgtacccgccgtcccagggcgcattctccgaggcggccgcgtcggtgatggcgcccatcgtctcgtacctgtcgtcgaagggcgcgccgctgctggtcaacgtatacccgtacttcgcctactcgagcagcggcgggcaggtggcgctcgggtacgcgctgctgtcggcggacgccggcgcggcgtcgtcggtcacggacgccggggtggtctacaccaacatgttcgacgctatcgtggacgcgacgcacgccgcggtggagaaagccggggtccaggggctggagctggtggtgtcggagaccggctggccgtcggccggcggcgagggcgccaccgtggagaatgccgcggcgtacaacaacaacgtggtgcggcacgtcggcggcggtaccccgcgccggccagggaaggccgtggagacgtaccttttcgccatgttcaacgagaacggcaaggccgagggcgtggagcagcacttcggcctcttccagccggacatgagcgaggtctaccacgtcgacttcacggcgggatccccctaggtctagggaggaggcggcttacccgcttcttcacttttagtagtaggctcatccttcattcccctgatctacttcgttttgttggagtagcaaaactgccgcacgtcacgtttactgtttattttttaatatcttatatagaaaaataatatcaacatttattctttaaataagtttatgtttactataaatatttttttaattcatctcata

SEQ ID NO: 59894 - DNA, 2289 bp, Zea Mays
gtttgcttctctggcaaagaaaagaacaaaagaaaattcacaccttgctcagcgaagctagtcctggtgcacaaagtgaatagccaagattgcctttgaatgttttttatatcactagttacgttaccgaggaaagatcactcggtaaatcacatactattagggtcgtcgttgttcaaacgatttccattagctctataaaacattggtctcttacatttcgggcgagcggctgaggaggtgcaagtgcaagcgagaatgtagcaagtatacaacggcacgtgaagacgaagacgaaacaaaatgaaagcatgcttcatacggtcacagtggcggcttcattcaacgcaacaactcccggaagctcctttccttccaacaattccaggctagcgccacctcccgtggaaatgtggctcataacgtcagcaactcccaccttctcgacggcggcgacggagtctccgcctccgatgatagttgtgacgcccttgccgctgagttctgccagcttcttttgctttacctcggttcctacagcgaacttgtcaaattcgaagacacccatgggcccgttccagatgaccgtcttggttgtatccagggctgcgttgaatgaagcgacagaatctgggccaatatccaggcccatccaaccatcaggaattgcagatgctggaacaatctgtaggaaaaaaaaaattatatggtcaagtttctccctacgcagcagaactgagagatgcttcagctccactacaaaagatctgctgattaggaaaaagagaagatgcaacaaacctggctgttagcatcaggggcaaacttgtcagcaatgacaacatcggttggcagcataagggagacacccttttccttagcctttgcaagtagagacgttgcaagctcgagtttgtcttcctcgaccaatgaagcaccaacagggagaccttgtgccttgtaaaacgtgaagatcataccaccacccaagagaaggatatcacacttctccaacagggactcaataaccccgatcttggatgacacctttgaaccacccacgatggcagcaaaagggcgtttagggcttgaaacagctccgacaaggtaagagataaccttctgcagaaggaaccctgcaacagaaggctgcaaaaacttggtaactccctcggtcgatgcatgcgccctgtgggctgttccaaatgcatcgttaacataaagatctgctagggaggcaagcttctgtgcaaactctgggtcattcttctcctcttccttgtagaatcttacgttctcaagcagcagaaccccaccgttgggcaaggccgccaccagcttctcaacttcagggccaataacatcgtcggctttttgcacctatttgtatgtatagatacgctttagtcagaacaatcaattagcacatgtgatttcattacaagtaccaatgatgtagaataaatcaatacctgaatgccaagaagctcagacaaccgtcctacaaggggagctaagctaaacttgggtgtaaaacccttagggcgaccctgcacatccagagatgaccttggcgcccttgctgaggatgtactggatggtggggatggcggcccggatgcgggtgtcgtcggtgatgttctggttctcgtcgagcggcacgttgaggtcggcgcgcacgaagacgcgcttcccctcgaggtcggcctccgtgagttcccctacgctcttcttcgccatggtggccatggcccgcgtgccacgcccggagaacgcctgccggcatcgcgacgcgacgtggaccgcgagccgcgcgtcgcccgccgcgaaagccagagaccgtgccggctggcacgccgtggcgaggcctcccctgcgcagcggggcgacggcggcggctggagcgcagggacagagagggagcgattcgggagggcgggaagaaggctttgtggacgataaagtggggaggagatttgcttatcgctggcgagaggtcaggacgacggttccggtgggtgtgtgggggaggagacggcggtgatcgattacggcgatggatggcgacgtgtgggggctcggtggcttcgttttcccctgtcctctgtgtgatctgggatcgccgtcccttctcagtcccacatttccgaaactcggtgagtttactggatttgtccaaaggcggcagccctcaaaaaataagttttactccatactcgccaagctttgcagccggccgcgttctcgcctaaggtgaattccctaccggaacagaacaggccgtcgtct

SEQ ID NO: 59895 - DNA, 4398 bp, Zea Mays
atgcctggccggagcagtggccaccactgtcgtcggatgaggagaagagggttccagttgcggtgtgggtcacttggccgaggagaagagggtcctcgggcggttctggctcccacctgtccccgtcaatccgcagtcaagtcggcaatcccagtccatgcaaacaccgcttctttctcctgcatgcgcggtctgcggtgtggctggctagtggctgcggcttccatccgtcgtctccgtccatccgtccctggccgactgcctgcctgctggctagggccaatgccacagggagcaggatcaccagcggcagccgacagcgagacgaggcgagtgctatgcgcccactcccaatcgcgcggggccgtttcctcccagaccgctgcggcgtcgaagccgcagcagcagcctcctcctcctcggcctccgcggcagccaccgtcgcctccatctcggtcgcgtgctcgaccgccttcacctggagaaacacaagttacacatatcagcagcacaaatacaggaagacgatggaacaacgactccatgggggaccgcaatcagcggcgagacgcgagcgtggcggcgaggtctttgcgtacgggcctgaaaccagagcatacctagaaacagcccaacatttgcgcgaggacgaaaccctcgcaccgtttcagttttccctcccaaacttgccccaaatatctaaatccatcctccttcgcaggcgctccaactttccccttcccggcaaccaccctgtgccttcctcgctgcctcgattccgcttctgtgctcggctagggagagcggcagagtatcaggcgggtgacctctatctcgccggggcggggcggggcggtgacgctcgcaatccctcgcttgctgctgcattttcgaatactgagatggccatggagatgtccccgcggcagtcgcctccgcggacgccgcgtagggcggcgaagccgcgactgttcatcaaggagatggtcctccgcaacttcaagtcctacgcaggggagcagcgcatcggtcctttccacaagagcttctcggctgttgttggtccaaatggcagtggaaagagtaatgtcattgacgcaatgctttttgtgtttgggaagcgtgcaaagcagatgcgcctaaacaaggtctccgagctcatacacaattcttccaatcatcagaacctagacagtgctggtgtttctgttcattttcaagaaattattgacatggatgatgggaactacagtgctgttgagggtagtgactttgtcatctcaagggttgctttccgtgacaacacttctaaatactacataaatgagcgtggaagcaattttactgaagtaactaaactgctgaagggcaaaggagttgaccttgataataaccgttttctcatcctccagggtgaggttgagcaaatctccctaatgaaaccaaaggctcaaggtccacatgatgaaggttttctagagtatcttgaagacataatagggacaaaccagtatgttgaaaaaattgaagaagcgtacaagcaactcgaattgctcaatgaaaagagaacagcatcagtgcagatgctaaaattagctgagaaagaaagagacagtttagagagtgcaaaaaatgaggctgaaacatacatgctgaaggaacttttgcttctgaaatggcaagaaaaggcaacgaagctggcttctgatgatgctatctcacgtgttaatcagtgtcaggagaatgtggcagacctggaaaagaatcttgccgctgaaagggagaagatacaccagaattcacaaactctgaaggaaatggaggctatttacagtaaacatgtcaaaaggcaagaggaccttgaaaataacatgaagagctgcaaagaccagtttaaagagtttgagaggaaagacgtaaaatacagggaagatctaaagcatcttaagcagaacatcaagaagctggatgacaaagctgaaaaggatacatcaaaacgtgatgaaaaaacaaaagagatggaggagtcatccaatctcattccacagctggaggcagaaatacccaaattgcaaaagcgacttaatgaagaagagaaagtcttagagcagatcaaagcatcctctcgagaagaaactgagaggtttcgtgctgaacttactcaagtaagaactgagcttgaaccatgggaaaatcaaattattgaacataaaggaaggttggatgttgcatctgcggagaaaaagttaatgaaacaaaagcatgatggagcacaagcagagttaactgatgcacaaaatcagatggaaagtataaaggagaaagttaaaacaaaggattcatacattgtggggcttcaagaaaaaatagagaagcatttgaatgaagcatctgaagctcgcaaaatcgaacaggaatgccaaaagcaggaggattcactgatccctctggaacaagcagcaaggcagaaagttgcagagatgaaaaccactagggattctgagaagaaccaaagtactgctctgaaggcaattttgcaagccaaggaatcaaatgaaatacaagggatttatggcaggcttggtgatcttggtgcaattgatgcaaaatatgacgtggccatatcaacatcagcttcatctgggcttaattatattgtggttgaaacaataaattcggcgcaagcttgtattgagttgttacgtagaaggaaccgtgaggaaactgtaacttgtttaatcctggaaaaacaaacacacctccttcacaaaattaaggagaaagtaaaaacacctgaaggagttccacgcctttttgatctagtaaaggttaaagatgagaagctgaagttagccttcttccatgtcttggggaatactgttgttgcaaatgatcttgatcaggcttcacgaattgcatacactgcagcaaaggagttccgtcgggtagttaccctcggcggtgaattatttgagaagtctggtaccatgagtggtggcggtaaaagggtacaacgaggcatgatgggaacagccatccgagaaagcttttcagaagaggctattaaaaatgctgaaaatgaactaaccaagcttgttgatgaactcaacaagttgcgtgaaaaaatgaataatgctaaaaaacaatatcgatccatggaagatgctaaatcccgtcttgaaatggaattggcaaaagctaaaaaggaggttgagagtatgaatgcacaatatatttacaatgaaaagcgactagattctctgaaaaccgcttcacaacctaaagctgacgagcttcgcagaatgcaagagctggatggcatcatatctagtgagcaagctgaactagagaggctcacaaagtgttccagcaaacttaaagatcaggcaagtgcctatagacagtctcgtttccatttccaggcttcggaacttcaacaaaaagttgaaaatgctggagggaagaagctgaaggaccagaagacaaaagttggcaacatccaatctgaacttgacaaaacaagttcagaaatcaacagacacaaagtcaacgtaacttcaggtgagaagttggtgaaaaggttaaccaagggcattgaggagtccaagaaagatagagaaaaactttctgctgaaacagagaagatgatgtctatgttcaaagagattgagaagaaagcgtttgttgttcaggaagagtataagaaaaccccggagatgatagacaaccataaagttgagcttgacaaaactaaggaagaatacaccaaactaaaaaaagcaatggatgaactgagagccacagaggttgacgctgagtacaaattgcaagatacaaaaaaacttgccaaggagtgggaaatgaaggtgaaaacattcaagaaaaggcttgatgaaattcagataaatgttgttaaacacatggatcaaatccaaaaggatgctgttgatcctgataaactcaaagcgactctaggtgatgagcaactaaatgatacatatgacatgaaaagggcaatggagatggtagcattgttagaggcccagattaaagatttgaacccaaatctggattccatagcagagtaccgcacaaaggcttgcttgtacggtgagcgtgttgatgagttaaatgctaccactcaagaacgtgatgatcttaaaaagttgtacgatgggttaaggaagagaaggctagatgaattcatggctggattcaacataatatctttgaaactgaaggagatgtaccagatgattactcttggaggtgatgctgaactggaacttgttgattccttggacccattttcagaaggtgttgttttcagtgtgaggcccccaaaagaaaagctggaaaaatattgccaatttatctggtggtgagaaggtatgttcc

SEQ ID NO: 59896 - DNA, 11659 bp, Zea Mays
gacctcatcaaatggactatgccatcaaatgagtggttgaactgctccttgatgtagtagcctcttttgcttcagttgcatcttaagacctcatcggctatctccacttttaggctactagcttgctagattggttctccacgaattgtttatgaactatgacaacacccgctaagttccacacgtccgcggcagcctctcacacaagtacacaacccctcgcacaacctgtcattgcctgtatggttttctgctttctgcacacaagaaacttaatcagcaaaaagagctcaaaagtcatagggcctgtttggttcctttagtctatggactaaagtttagtcccaaccctgtttagttttagggactaaaaatattcaaaacgcattaaatgacttataagaagaccaaaatgcctcttaacattgttcaaaagggacctcaaaccaaaagggaccttaggctcaatagaaaacgggattatcatagccataaggagattgataaaattgttcaaaacatgccttttgacaaagctccagtccttaatggatttaatggaaagtttctgagacacatcatcaaaattgatttttataaactttgtcatgatttttatgatggtaacattaatctggatggaattaacacctctttcatcgctctcatcccaaaggtgaacaaccctgttagggtgaatgattttaggccaatctctcttctcagtatagccatcaaattaatcacaaagctattggtgaataggctgaagcctgtgattcaacgaattgtgcacaaaaatcaatatgattttattaaaaacagaaccatacaggattgtgtcttgcttggtgctatgaatacttacatcagtgccatctttctagaaaggaagtggttgttctcaaattttgataaagcttttaatacagtggagcatagtgtcattattgctatactcaatcagttgggttttcccgtcaggtggattcgttgggtcagttcaaccttaaattctgaatcctctactgttcttttaaatggtgtttctgggaaaaaaaattctttgcaaaagaggtgttaggcagggggatcctttatctcccttgctctttgtgattgcaactgagcttctccaatacatcattagtaaggctacccatcttagggttttatcccttcctattgagcatatgttttgtctgaaagaaattcttcgctcattcacaaacactaccatgctcaaggtgaattatagcaaatcatgcctcttacccatcaatctggaagccaccaaaacagctcaattggctagtctttggttgccaagttggctctattccctttacatatctcagtctacaaatggggattattaagcccagaattaaggatttcttacctctgttgagtaaaatagaaagaagaccaattatgaccagcatgtggctatcaatggcttggagactgactatagtaaattccacattttctacgcttcctacatacaccatgtgcacaatcaagcttccagcttagtcatcaactctattgatagagccagaagagattgtttatggaaagagaatgatattaatgcaaatagtaagccaatgatttcttgggataaggttaccacccccaaggacaagggtggtctggggttattaaccttaaaaatacagaatattgctttgctaatgaaacatcttcataagttttatgatcgattagaagttccctatctggaatactcgctataactcatggcagattcctcattgctcctctgaaagagactcgttctagtggaaagatatttttagactgggagattactatagaggtattgctatgctgatggcaggtgatgagaaaccttttttttactatgggatgttgtctggaataactctcttttcaaatcggatttcatatgtctatgctcgtttgtcaaaaagaaaaactgctttcttgctcagtttctgggcaacatggacttccaagaaaattttcatgcacctctttctatggaagccactgaagaatatctcaagttctatgagacaattatttcagttcaaaacaacatgcatggcaaggacaaatggatctattcttgaggaaacagcaatttccgttcaagcaaggtctacagactaaacttccaatccatttgcccacctcctttcatgtggatctggaagtctaaagtgagtaaaaagatcaaggtgtccatttggctgacctatagagacagaatcaactcaaaaaatattcttcaaaaaacgaggtgtaaagttacaaatgatgattaacctatgtgctttgggacattaattgtgaggaaaccacctaggcacctatcatgttttatttgaatgtccattcagtacagcctgctggaatcacgttggtattcacagggatcattgtttgaatttctttgaaatgatcatatcagcgagggatcaattcacgaaaaagttcttcatggaaattctagctattacggcctgggagatttggaagcagaggaatgttgttatattcagagattttgttccatcctttacgtcttaaaggttttgcttcagtagcaggttgaagctccagatgcttagaatgaactcggacgttcgcttggcaatttccttatggcttgttctttataattgcttctttattttcttttttccttctgtctgcttttgcttctatactttctttattgtgcagttcctcctttttatttaatatataccactataagggtctcccctacaaatttatcggttaaaaagataaaaagtgaaatatggaaggtacataacaaagggaaattaagttctgacagataaagggcgtacccagtgtcgtaggcttcccgcactgtgcggggtctggggaagggtatctttaagcgccaagcgttacccgcataatatgcagaggctggggctcgaacccgggaccttccggttacagacggtaggctctaccgctgcatcaggcctgccactttaaattattattagtcgaataagaccactttgtccatccttgaaactttcaaactgaccaatctagtcatttaggtttcctttttcttttgctccaacataacctcggtacaacatgcctaatcagcctcaaagttgtcatcctttgttgggtcatcatggaaaagacgttccttttacccttattttgctccaataccaaggcctaatttggaagcaagagggggcaaacccaagatggaaagccccctgtggagaactaactgccataaaggaatgtacactgcaatctacagcccatgattaatcgacgcccccggcagctataaaaggttatctatggatagattatgtaataagtgagtagaattatcgacaatccaacaaaaaaagcaagagcatcggaagagaaagtaaagataacagtaaaaaggaacaaaaaagggtaaaaggtaaaaaagtaggtaagaatgagaaatttggaattgtgccatcatgaaatgtgggcttcgcaggattgccattaaatgggtgggtttcgctcaggtgccattataaacaatgacataagcgttataatgtcttttggctatttaacaaaaactgaaatgactttaatttagttatagcttataggagatgatatgactgttttggccctctctggttttcaatggccttctctttcccttctggtgaccacgcttcttcccccatgaccggtggtgtgcagctccaacgacagcagcgggagcgagcagtccggcctgccgcatttcatcctaggagagcagcctgtgtctgcgtggccatccacgttcccgcagatcttgtcactggttggggaaaaaacggatctcctgcgtgtatcctcctgtgtccagacgtgaagtatccatagctaggcaatgtgcaactacatgtaggtgaccttgagatttttttcgctcctcacgccgtatgctctcgtgaattcacatgttttatgcttgcaggataacgttgagtacaacgctggaaagaaaaagagaaaaagtgcatggtcacagggaaagaatggaggcggtcaccaggacagaaagagaagaccgtgaaaaggcagagaggggcaaactagtcagatcatctcctataattaaattaaagctatttcagtttttgttaaatagccaaaaggcattatagcgtgtacgccatcattttaatggcacctaagtgaaacccactcatttgatggcaatttggtggagcccatgtttcataatgacacagttccaaatttctcggtaagaatgtgcatagttgactggattgagatatttttgggggtcaaattggatacttttccaccaaattattattaaagatgcatgagaattgtgaaatatggaacatccacatggagttaaggacccgttcacaaaaacatggagttatggataatagtgacttacgtttattgtcctctttaattcctcctcgcttccatctccagctttcctgatgacaattcagcatttattaacacttcgtagaagattattttgacatgtaagaaccttatcaactacaggatagatatacgtcctttgccaagcttatcatcagcaataacatcagatgcaccaatatctggaacttcgctgactacttgcctcaagaagtcatggacatacatgtttgtatgaactgtttccagaacacattaatacaaactaatcagttaaataaatgatgattaataacatgcaaaagatgatactacagtccagaaaatactcattttttatctatatatgacataggcaagcaagtttgacgacgaacccacaaagcaattttttgccacctgaatcacactacataggcaagcggatttgtccgtaaacccacaaagcaatttgttgccacatgaaccacactgcataggcagtatgcagtaggcatgatagtgtggaaccctcagccaatgcgaggcaccgtaaatctagtatttaatggtaaaagttctttttgctaacgtggaaatgctgggatcctgcagagcttgcggctctcacaagtaaaaaaattcctgtcccgtattcaaaacaatgacagataagctgttgagttatgaatggcatggcacaatcagtattgatagggaagtaactgaaatgtgagaaggcatgatctaatggctgttcaatacaatcactggcgttatttcctttttggagcagaaaaaaacaaagtacattaaatggccccagataggaaatcattaagcaaattaaagggtagaggggggggggccacaggacacatgcaaaatttactctatggaaagatgtggaactttcaggaagtatgaatttagaagttgtttccttagaaagccaatatgtatgctttttcttgcccatgaaatccaaaatattcatttatatgcttctagttatcataaacatgcattcattcgcaatacagttctattctctagcatatagtcattttgcaacattaagattttaaactgggaagaatagcgaatttagtttttttttgcaatatgatattaaggaatatacatttgggtggccgatttttatgaggtatcatcaatatgtacccaggggctggcttgacaaagacaaaaattggcaccgaaattacccaactaattgcaaaaaagaaaacgagagcaaaacttattgacattggaaacttcaagcaagtacaccattgtggtgattatgatgagcaagagctaataatatgaaccaggaggattattttagtggtttagaactttagatgagcaagagctaacaatatgagctccaaacaagcactccattaattaaaactccaaataaaccatttattgacattggagcaaacacggaataattcgtacaagttcaatgttgatgccatttaaaccctaactccaagatagacatgaaactcatctatcctaccgcatcgtcaaacccaatgcaattgaagttctttacgaaaaaatgcatgcaaacaacttggtcggggagggaaagaccgccctcccggtattatattaagaagagacggaaacagatgtctcggacgagaaaatccccaaaccctagtcccctatcactaatggcccagcgccaaccgtccactctgcaacggcccaaccagagggtggcgcataggacatcgtaacccgagagctgatggggcacaacgaggggattctttttaaccaagcctgaaaaatcgccccccgggggggggggggggggggtcgagcccaggacttggaggtcctactcggaagcccttaatcactagactagaggccctttcactaaaaacactcctaggtttcccaaggtgtcaagaaatgttaagatacgatcctcatgatccaaaggtacgctcctaggatcacgaaggcctatctctaggagaccatagaggaccgtaccttcgtgatcctcaaggtgtgattccctcaaagtcaagaaatgttaagatgacatgtcctcgtgatcatggagtcaattcattgaaaccctcctaggttttgccttcaaaatacgatagtacatccaaatgttatgtcatcatgagtccttgatcctcaaggaaaccaagcttgagtctacatagagaagcaagaaggcagaagaaggaatgcaaccatggaaccaaccaccttgtacgaagcatctactaatgtggatggcacaccaaagaccacatgttcttcccccactaaaaaaggttgttcacatgtcattaacttttacatgcatcgagatcaagaaaagacttggatggctagcatggataagtggacaacctaagataggcttcaattttcattggaataccattgtaccctataggagaaccaaaactaatttatttggtagtaggcagatgatggtttagcaaaaaaaatcttataaaattaagagttgtttgatgccaccaatcacacaacgatgaactagaagtaaagaaatctccttggacaattttattgctgaaagaagtatatcaagtgtgaccaatttggaaaaacaaagcgatgatcacatgtttgtgtcttgaaccaatgcccactttccgaacatgaagacatccaagacttgcttgtaccatgtgtctttgcaagagagttttgacacaagctcttcacccatcggccgcaagagctaacagaagtttaagcgagctagagggatatcgtcgaagggtgcattgtgattagctagcaaacatgcccaacgttgcaatgggacatataccttatcatgcagccaccttgtggcttggagaaaagattgtgtcatgcgttccaattcgtctaggaatctaagtgagtgttatgcatgggcgtgcgatgcttgattgcataatgtgttcaaatatgtctcgggattggactccgctcatgccctagacccatgatactctaacttgcacatgcacaagcgtggtagaccatgaaacgctttgtgatattatacgagcaatcatgcttgtgcgttgctacgagacatattgggtttgtttggttcagctttttctgaccagcttttccgagaatctagttgtggggaggatctcgctttgtagagaatttgagtatcattacgattacgtgtggaggaagataaagttatccatggggctcaggatctataaagtgacggattattacgattgcgacgactcaaccgattatatgtttatgttaattttgaatggtttttactcaaacgaattttatagaagctggctgaaaagctgagtgtttggcagtccgcagcagcttttggtggctagaagctgcgaaaagccgaaacaaacaggggcatagcttgttgcatagtcacttggagaacttgtgactcagagacttattgaacgattgtgtcatgtgttttgatttgtcaaggaatcgaactttgtatcgtgcttggatgaatgttgctttaacttgtacatgcaaaagaggcatatagaattttcaataatgtcatgtgctccaattcgtcttgggattggatgtttgcacatacatatgatgtgatcaccttacgacttggagatatattcaaggatcatgtcatatgtttgagacccttccgaaagagagacaggacgaaacaaagctttgtttcatgtccctaacatgtatgaagaggtgaaaattcaaaacttcagggtccaattataaatactgaaattaagcaattttgcttatcccttctctccgaaggagccaaaggagagaagggtgttaacatcatgaaacatgaatgaatcacttcaggtattatatcacaatacacacaggcgaaggaccaagcatatgagcttcgataatgaattaccttcgaaaactctttcccgggactaaggtgctacaggcacaaggttacaaaataaccgacacccgtagcagtagtatttttcatttatttttagggccagaccggcacacctttatacatatgaaattacaattcagccctccctattacatagcatcccttcacgattgaggggatacaattccgtcattttacacccttgacgtgtagtgtatgacttttcttctcttggagatcaccttcggctcccttcactggcaaaccatatcggaggcaccaaaacttgtttatccttcctttggctttgcaacacatccgaagcctcggcttcaatctttgtctgaagcttccttatcttttgacttttatatagatctttatcatgagaaaaagcttaaacaatgatccttgttagtagggacctttggtcgaagacctcctcaacatcatgcttttcaattcactgtttaatctaacagagcgccatacctagacatgctcaacttgatttcgtcttgtgttcgaatacgtcttgggatcgtactctgccctaggactcatgttgctctaactcgcacaagcacaagagagtggtagactaggggaacactacatattgcaatattatatacacacatacatgctcgtacgttgcaacgagatgtacaattgtgaactaaaggtacctgaatgactggtgactcagagatttattcgacgattatgacatgtgctccaattcttcaaagaatcagactctaatcatgcttagatgcacaatgctttaactcgtataagcacgggaggcatggagattatcgattgtatcatgcgcgctaattcgtcttgggatcaaactcaacaccatgtctacacacgctactcttactcgtagcaaccacaggggtggcacgccatgcaaatgtaacatcttccaatttgtctttagattaaactcttcactgtgtctatgacacgagggagtgaaggagcatggaaatgttctatactttgatattaggtatagacatgcacaagggatacaactccctcatcattctagaattgatcagcatgatgggaagaaacatattgcaacggccatgcataaggaaatttgagtggttcttggtgtctcaacaatttggaaccatcagaccaatgtcatcttcaagaatggctcctcccttacagaggatgtaagatgttcacctacaaagcattgctagtaccatgggttgtagtcattttttgtcatcttcaagaatgactccccctcattacagatgtaggctaactcgcctctgatgccttgatagtgtcatgggttgtggtcttttttattaaacactagaataaatctaatttggaaaactaactggttgtaacaaactttcttaatgcaatgacacacatttcacgcttgttcaagaaaaaattgtcacaagtttggcaagctagagagaaaggtctagctactcaataaggataggaccatcgataaccaaacccaagcgaaggcaaagtggaaggaaaaaaaaaggagcaaccaaataaacttatgcaatggtaatacaaagagttaaacaatgacacattcgatggagttaaagttaaaacaacggaacatccattggccatagagaaaaatgcccatggtggtggccctctatcaagaaggtagaggcatgtccagcatcaagaagtttcaactttcaagtacttagtcaatatcgtgtcaacatccatccaatgttttcaagtcgtccgattaatcgcgattaatcgtccaaaatgccatggtggtggccctctatcaagaaggtagaggcatgtccagcatcaagacgtttcaactttcaagtacttagtcaatatcgtgtcaacatccatccaatgttttcaggtcatcctattaatcgcgattagtcgcgattaatcgtccaaaatggtttggaccaatcatgattaatcgcccaagtcggacagccagaacgaccagcaagtcgtccgacttgaaaacattccatccatccaacaaaagcttcatcatgacatgataagggcctataccgtaaacgtcacaatcatatgttgtgtagggttccacaatgaggtagaatgtttattactaatctatgttcactctctgtctagaaactaggttatcatgtggctaggtcgtatctctttacatcctcacttgcaatattgccccttgtcaaagtattggtcatcccttgcttttttagtttgatatttgatattaagctattctacccccatcttcctctgttttgatattgtattttagtgcacatctaataagaaaatgaataatatggccttgtagccctactaatctttttcttgccacggtgttgaactatataacatctagtaaactatagttgactataaattatgttatgtaggcacactttacgaacgtgtcttctattcaaacactataacactaaataaaagagaacttctcaacttatacaaaatacaaaacaaaaggggcaggacaatacatcaagcacaagaggagaaaagagtatgcattgttgtttaacacacattcgataaccaataaccatacatgcagttaagcttgttcttagctgcattagatgacatcacatttaacatgcaaacataaactaaaaatctaccatctccagttactcttaagggagttcagactgaagtctgcaaaaccaaccaggttcaagctacaaaacatattatttgaaacgactgccataccaatattaacttgttgggcctacaaatgaaggttaaccagattggtaggacagaaggttcaagctgtcatcaccattaagctcaagctcccatctcagagctgctgtatttgatggttggatgacatgtactgtgcctatcaacatatgccttcacaagtttttctatctttggtccacatgtggctatgtacttcgtaatcaactcttcagtagttggtacttgatttggctcaatggagtccacaaccttctcgacagattttctcactaccagtttatgagcatctttactcagattaccttttttccatattggtttgaccaactcctttatatgttctgccaaatgaaaacggaaatcccttgttttctcattgtaatcaactgcatccttttttctgtcacaagctttcaccttgatagtatcatccaggctagagctgcatcctctatcaggagcaataaagtaagcaggttcatttga

SEQ ID NO: 59897 - DNA, 691 bp, Zea Mays
gaaaggaggaaggagatgcgacgtggaggtgagcggggacgcgatgaaggtgatcgacatctgcgggctgtggcgggcgccggcggcggacggccgggactggcgctgcggccggtggtgggagcacggcttcgtccggcgggtggagctgccggaggacgcggagtggaggaaagtggaggcgcacttcgacgactgcgagggggccctggagataaaggtccccaagaccgccgacgacgacgatgcccaccacgccacggcctgagcctgacgccgagaatcggaacctcgccgccccatttgaggacggcattattattcttcgaacggacggcagaaacggaaaacgacggcataatcttgataagaatgttcgacggcagaaacggaaaacgacggcataatcttgataagaatttgcaagatacggaggaaacgcaggaggaggagcgagctaattaaactgatcgtcgcagcatgttgcatgtgcatgaatgcacgcgtgtccctgaaaaaaaaaacgatgtatgtaatagtatgttcttcagtgccaggtgttaattggcagtgagtgtcactgtcgcctctggtcatccttcaatcaaatccggcgtccagaccatgagtccgggatcgatcgatagatagatagatgagctcatgatacaggtcgcggattcagattctc

SEQ ID NO: 59898 - DNA, 1740 bp, Zea Mays
ggagtatatatgcaccgtattcttcggtacgacgcttgacctggacgacgcctctagctagctagctagctagcaaaccgaccccatggcagacgagtggtggagctgcacgcgtgctgccgacgacgacgacgacgccggtggctcgccctgctccacagccccggcaacaacggaccagctcgacgctgccgacgagccggcggcgacgagcactgcctcgatcgatttccggcggccaacctcattattgcacgtcgtccgccacgctgccgtcccgccatcatcccccttaatcctcgccgatccaccccatcatatcgacgactggacgcaagcctacttgtgcgggagagcgccgctcgcggcggcggcggcggcagaggcgagcacaagcctcagcgcgctgctccagctccacggcggcgacgctgctggccgccacttcctgctcgcccagcacctccacggtgacgctgctgacagcgcggcggcgcacgtggcagcagcgtcgcagagctcggccctgtacgccgccgccggcaaccagccgtactcctccagctacggcggcggcgcgccggcggcaggagcgctgatggcccagcagccgccgttccctcatcaggacgaattcgaattctcatccgccagcctctttgttggctcctcgtcgtcgacgcgggattccgccggcgtgccggcggcagcggcgcggcggcccgccgtgacgacgacgaagccgcttctcttgcaggccttggagcaaaaggctttcgcgttccactcccatcataaggaacgtacacgacaacacgacgcttcctcggcgacgacagcaagtgctcccggctcgcctgcgccggcgaagaagccccgggtcgtcgcgacgccgtctcctttgccgaccttcaaggtgtgtgcacatggactgctcgcaccgcacagaccgggcagctagctctagctgtgacgcatgcaacctaaagatagtattatcatcatcatcttgcaccttggattattcggacacatcttttggtttccagctcaacatgcaatccaaacaagtagttattcgatcttgttagctatgataatgatcggtgatcagctgtactactacgattgccttcgatttgatccttgtccgagcgcaggtgaggaaagagaagctcggggacagaatcactgcgctccagcagctagtctcgccttttggaaagacggatactgcatcggttcttcacgaggccatcgaatacatcaggttcctgcatgaccaagtagcttccctgagctctccctacctcgggtgtgggcggcccgtagtgcagcagatacagcaacgacgacaggcgaaggacgacggcggcgccgcggcgaaggaggacctgcgaagccgagggctgtgccttgtcccggtggcgagcactacgacttatgcagtggccgctggtggcgagacggcgccggagttctggctccctaactttgggggcacactacggtagggacagagacagagacatgaatatagtagcgtggacatggagatcttggtagctagctaggtctcgtaggcatgtatttgtagctaataaggccgtattctcatgtctgatgcaaaagcaaatgaataaacctgaccagtcgatcacactagtctctaagggtgtttagtttgctggaatgaactggagaaacacaatgggaagaggggaacaaataatatgcgga

SEQ ID NO: 59899 - DNA, 1728 bp, Zea Mays
ggagtatatatgcaccgtattcttcggtacgacgcttgacctggacgacgcctctagctagctagctagctagcaaaccgaccccatggcagacgagtggtggagctgcacgcgtgctgccgacgacgacgacgacgccggtggctcgccctgctccacagccccggcaacaacggaccagctcgacgctgccgacgagccggcggcgacgagcactgcctcgatcgatttccggcggccaacctcattattgcacgtcgtccgccacgctgccgtcccgccatcatcccccttaatcctcgccgatccaccccatcatatcgacgactggacgcaagcctacttgtgcgggagagcgccgctcgcggcggcggcggcggcagaggcgagcacaagcctcagcgcgctgctccagctccacggcggcgacgctgctggccgccacttcctgctcgcccagcacctccacggtgacgctgctgacagcgcggcggcgcacgtggcagcagcgtcgcagagctcggccctgtacgccgccgccggcaaccagccgtactcctccagctacggcggcggcgcgccggcggcaggagcgctgatggcccagcagccgccgttccctcatcaggacgaattcgaattctcatccgccagcctctttgttggctcctcgtcgtcgacgcgggattccgccggcgtgccggcggcagcggcgcggcggcccgccgtgacgacgacgaagccgcttctcttgcaggccttggagcaaaaggctttcgcgttccactcccatcataaggaacgtacacgacaacacgacgcttcctcggcgacgacagcaagtgctcccggctcgcctgcgccggcgaagaagccccgggtcgtcgcgacgccgtctcctttgccgaccttcaaggtgaggaaagagaagctcggggacagaatcactgcgctccagcagctagtctcgccttttggaaaggtagtacacctttttctaattcttccccactccaatctctctgcatcatcggtttctctccttccttcctctaaattaaactcttgcatttgagcgaaagcctcgtgttccattattattccaagttgttgatcgatatgaaccttgacttaatttggcatcatgcatttccgatgcacacggccggcggcaacatctatcgacgcatatatatatcgtctgcggatcttagacggatactgcatcggttcttcacgaggccatcgaatacatcaggttcctgcatgaccaagtagcttccctgagctctccctacctcgggtgtgggcggcccgtagtgcagcagatacagcaacgacgacaggcgaaggacgacggcggcgccgcggcgaaggaggacctgcgaagccgagggctgtgccttgtcccggtggcgagcactacgacttatgcagtggccgctggtggcgagacggcgccggagttctggctccctaactttgggggcacactacggtagggacagagacagagacatgaatatagtagcgtggacatggagatcttggtagctagctaggtctcgtaggcatgtatttgtagctaataaggccgtattctcatgtctgatgcaaaagcaaatgaataaacctgaccagtcgatcacactagtctctaagggtgtttagtttgctggaatgaactggagaaacacaatgggaagaggggaacaaataatatgcgga

SEQ ID NO: 59900 - DNA, 2302 bp, Zea Mays
atgtactacgcgggcaaagcaaagcatcggtgtctacctcattattttcggagtccgagtggcgaaacccgccgcagcttccactgggcagtgctccacaggctcatatccgattccgatccctaagacctcagccgctgcggcatccacggccaactcaagcgctggcaactggcaagggcagatgatctgtgtatagcactcgctaccttctcttgatttccccctcaggtcgctgaccaagggtcctgtccgccatggatgcggagcgaagctctgcacgcagcgccacaccttttggtccgccgtccgatcgccaccgctagacgccacgcctgcgttgccttcccggctgaatcgccgattcccttggcggtctagtgcctgcggtcggcgccagacgccggcgaggtagccgcgagacacaggtacgggtgccgaacgggaacggctgctgcccgccgagcccagcagcagaccgtcgccgaggccgcgcgcaagctccccgaggacgcggcgtccaggagggggctgttgctggacttcttcgtcatccttcccgtgatgcaggtggtggtgtgggttgcggcgccggcgatgatccgcgcggggctgacgacgccggtgatgacggtgctgctggtgtcgttcctgctggagtacctgcccaagatctaccacgcggcgcgcctgctccggcggatgcagaggcagtctggctacatcttcggcaccatctggtggggcatcgcgctcaacctcatggcctacttcgtcgccgcccatgctgtgggcgcgtgctggtacctgctcggcgtccagcgggccagcaagtgcctgaaagagcagtgcctccaggcggccgggtgcgcgcgcggcagcgcggtggcctgcgcggcgccgctgtactacggcggctccccgtctcccggagtcggcggcggcgacaggctcgcctgggccgggaacgcgcaggcccggggcacgtgcctcgccagcggcgacaactaccagtacggcgcgtacacgtggacggtgatgctggtggcgaacccgagccgggtggagcggatgctgctccccatcttctggggcctcatgacgctcagcacgttcggcaacctggagagcacgacggagtggctggagatcgtgttcaacatcatcaccatcacgggcgggctcgtcctcgtcaccatgctcatcggcaacatcaaggtgttcctgaacgcgaccacgtccaagaagcaggccatgcacacgcggctgcgcggcgtggagtggtggatgaagcgcaagaaactgccgcggagcttccgcggccgggtgcgccagttcgagcgccagcggtgggccgccacgcgcggcgtcgacgagtgccagatcgtgcgcgacctccccgagggcctccgccgggacatcaagtaccacctctgcctcgacctcgtccgccaggtcccattcttccagcacatggacgacctcgtgctcgagaacatctgcgacagggtgaaatccctcatctttcccaagggagaaaccatcgtgagggagggcgacgtggtgcagcggatgctgttcatcgtgcggggccacctgcagtgcagccaggtgctgcggaacggcgcgacgagcagctgcacgctggggcctggcaacttcagcggcgacgagctgctgtcgtggtgcctgcgccgcccgttcctggaacgcctcccgacgtcgtcggcgacgctggtgacgctggagagcaccgaggtgttcggcctggacgccgccgacgtcaagtacgtcacgcagcacttccgctacaccttcaccaacgacaaggtgcgccgcagcgctcgctactactcgcccggctggcgtacctgggcggccgtcgccgttcagctggcctggaggaggtacaagcaccgcaagacgctctcgtcgctctccttcatccgcccgcggcgcccgctgtcccgctgctcctcgctcggggaggagaagctccgcctgtacacggccatcctcacctcgcccaagcccaaccaggacgacgacttctagctagcttagctaggccgttccaggccggattctcttctcctcagcgaggagtatatatatcaaacaacatgcatttatttgtagtattcattactcgcatgtcgcatgagagacagagccatgaccgtactccctccgctttcctattagttgtcgtttaggataacgacacggtctctaatatataactttgaccaatattttttgttaaaatacaaataaactcttaatacatttatacttttat

SEQ ID NO: 59901 - DNA, 1813 bp, Zea Mays
ccatgcgcatcgtccagccgggtgcgagcacggacgacacggcccacggcgtcttcatctcgccaccaaggcaccaatccggtggtggtgtgggttgcggcgccggcgatgatccgcgcggggctgacgacgccggtgatgacggtgctgctggtgtcgttcctgctggagtacctgcccaagatctaccacgcggcgcgcctgctccggcggatgcagaggcagtctggctacatcttcggcaccatctggtggggcatcgcgctcaacctcatggcctacttcgtcgccgcccatgctgtgggcgcgtgctggtacctgctcggcgtccagcgggccagcaagtgcctgaaagagcagtgcctccaggcggccgggtgcgcgcgcggcagcgcggtggcctgcgcggcgccgctgtactacggcggctccccgtctcccggagtcggcggcggcgacaggctcgcctgggccgggaacgcgcaggcccggggcacgtgcctcgccagcggcgacaactaccagtacggcgcgtacacgtggacggtgatgctggtggcgaacccgagccgggtggagcggatgctgctccccatcttctggggcctcatgacgctcagcacgttcggcaacctggagagcacgacggagtggctggagatcgtgttcaacatcatcaccatcacgggcgggctcgtcctcgtcaccatgctcatcggcaacatcaaggtgttcctgaacgcgaccacgtccaagaagcaggccatgcacacgcggctgcgcggcgtggagtggtggatgaagcgcaagaaactgccgcggagcttccgcggccgggtgcgccagttcgagcgccagcggtgggccgccacgcgcggcgtcgacgagtgccagatcgtgcgcgacctccccgagggcctccgccgggacatcaagtaccacctctgcctcgacctcgtccgccaggtcccattcttccagcacatggacgacctcgtgctcgagaacatctgcgacagggtgaaatccctcatctttcccaagggagaaaccatcgtgagggagggcgacgtggtgcagcggatgctgttcatcgtgcggggccacctgcagtgcagccaggtgctgcggaacggcgcgacgagcagctgcacgctggggcctggcaacttcagcggcgacgagctgctgtcgtggtgcctgcgccgcccgttcctggaacgcctcccgacgtcgtcggcgacgctggtgacgctggagagcaccgaggtgttcggcctggacgccgccgacgtcaagtacgtcacgcagcacttccgctacaccttcaccaacgacaaggtgcgccgcagcgctcgctactactcgcccggctggcgtacctgggcggccgtcgccgttcagctggcctggaggaggtacaagcaccgcaagacgctctcgtcgctctccttcatccgcccgcggcgcccgctgtcccgctgctcctcgctcggggaggagaagctccgcctgtacacggccatcctcacctcgcccaagcccaaccaggacgacgacttctagctagcttagctaggccgttccaggccggattctcttctcctcagcgaggagtatatatatcaaacaacatgcatttatttgtagtattcattactcgcatgtcgcatgagagacagagccatgaccgtactccctccgctttcctattagttgtcgtttaggataacgacacggtctctaatatataactttgaccaatattttttgttaaaatacaaataaactcttaatacatttatacttttat

SEQ ID NO: 59902 - DNA, 1846 bp, Zea Mays
ccatgcgcatcgtccagccgggtgcgagcacggacgacacggcccacggcgtcttcatctcgccaccaaggcaccaatccggtcaccagaccgccttggaatttttttttactcgtggtggtgtgggttgcggcgccggcgatgatccgcgcggggctgacgacgccggtgatgacggtgctgctggtgtcgttcctgctggagtacctgcccaagatctaccacgcggcgcgcctgctccggcggatgcagaggcagtctggctacatcttcggcaccatctggtggggcatcgcgctcaacctcatggcctacttcgtcgccgcccatgctgtgggcgcgtgctggtacctgctcggcgtccagcgggccagcaagtgcctgaaagagcagtgcctccaggcggccgggtgcgcgcgcggcagcgcggtggcctgcgcggcgccgctgtactacggcggctccccgtctcccggagtcggcggcggcgacaggctcgcctgggccgggaacgcgcaggcccggggcacgtgcctcgccagcggcgacaactaccagtacggcgcgtacacgtggacggtgatgctggtggcgaacccgagccgggtggagcggatgctgctccccatcttctggggcctcatgacgctcagcacgttcggcaacctggagagcacgacggagtggctggagatcgtgttcaacatcatcaccatcacgggcgggctcgtcctcgtcaccatgctcatcggcaacatcaaggtgttcctgaacgcgaccacgtccaagaagcaggccatgcacacgcggctgcgcggcgtggagtggtggatgaagcgcaagaaactgccgcggagcttccgcggccgggtgcgccagttcgagcgccagcggtgggccgccacgcgcggcgtcgacgagtgccagatcgtgcgcgacctccccgagggcctccgccgggacatcaagtaccacctctgcctcgacctcgtccgccaggtcccattcttccagcacatggacgacctcgtgctcgagaacatctgcgacagggtgaaatccctcatctttcccaagggagaaaccatcgtgagggagggcgacgtggtgcagcggatgctgttcatcgtgcggggccacctgcagtgcagccaggtgctgcggaacggcgcgacgagcagctgcacgctggggcctggcaacttcagcggcgacgagctgctgtcgtggtgcctgcgccgcccgttcctggaacgcctcccgacgtcgtcggcgacgctggtgacgctggagagcaccgaggtgttcggcctggacgccgccgacgtcaagtacgtcacgcagcacttccgctacaccttcaccaacgacaaggtgcgccgcagcgctcgctactactcgcccggctggcgtacctgggcggccgtcgccgttcagctggcctggaggaggtacaagcaccgcaagacgctctcgtcgctctccttcatccgcccgcggcgcccgctgtcccgctgctcctcgctcggggaggagaagctccgcctgtacacggccatcctcacctcgcccaagcccaaccaggacgacgacttctagctagcttagctaggccgttccaggccggattctcttctcctcagcgaggagtatatatatcaaacaacatgcatttatttgtagtattcattactcgcatgtcgcatgagagacagagccatgaccgtactccctccgctttcctattagttgtcgtttaggataacgacacggtctctaatatataactttgaccaatattttttgttaaaatacaaataaactcttaatacatttatacttttat

SEQ ID NO: 59903 - DNA, 1937 bp, Zea Mays
gtgagtgagacccagaagtttacgtccagtcgtccacccatccaccatggaccacgattaaccctcctggaggagagcgcagatggggacgcggactccattccactccactgttctcgctttcccctccaccgacctgagacacagagtgagagcccgcagacaagtgagacaacccaccgcgaaaccgacatcccaatccgtcggaatccgtggccagaggctcgccgccgcccgccgcccgccgcgtcagagacacgctctcccccgggcccggacaaacacctcccggcggggctattttctcaccgcgtggtctctttcgatctatcagagcgacgactaggctaccgccgccctacgccagatgccctggtcttagtcgggcccttctccggcaacgagcacctaacagcagttcttacttctcccatcatgtgtgcagttcagatgattctgctggtgccataggtgtgaagtacttagtggggactggggagtgggcggacaagattttcattatagccatataaaatggagtgttccaattcaactagttcccaagggcatcatgtaggaaagtggaatcaagtgcaaatcattgatccttccattgttgaaatgggaccaagtcaccttccactgagtttcatgagaagatgccgtggagtattgtgtttggtgattatgatattaacagcatttatgatgatggtatacctgtcccctgttactactttccttgtgaggttgttcagtgtgcattacagcagaaagtctacatgcttcctgtttgggatgtggttagccatgtggccttttttgtttgagaagattaacaagaccaggtttgttttctctggtgaaagtgtgccagcaaaagagcgtgttctgttatttgctaaccacaggaccgaggttgactggatgtacttatgggattttgcattgaggaaaggccgcttgcagtgcatcaagtatatccttaagaaaagtttgatgaagttacctgttttcaactgggcatttcacattattgagtttattccggtagagagaaagtgggagattgatgaagcaataatccgaagcaggctttctgaatttaagaacccaaaggatcccctttggctggcagttttcccagaaggcactgattatactgagaagaagtgtatcaaaagtcaagaatatgcagcagagcatggtttgcctgttctgaaaaacgtactccttcccaagacaaagggtttcaattgctgtttgcaagtgctgaggagtaccatagatgctgtgtacgacatcacgatcgcctacaaacaccggccgccgacatttctggacaacgtctacggcgtgggtccttcggaagtccacatccacatcagcagcatccaggtctccgacataccggcgtccgaagacggggtggctggctggctggtggagcggttcaggctcaaggacgagctgctgtccggcttctccgcgctgggccacttccccgacgaagggaccgccgagggggacctgtcgacggccgagtgcctcgcgaacttcgcggccgtggtcgccgtcacgggcctgctcgcgtacctgaccctgttctcgtccgtgtggttcaagctcttcgtggcgttcagctgctcgtctctcacgctcgctacgtgctactctgtacatctgccccagatggtaggttttggctcaggtacccctgcgagcatccacgcgaaggaggcttgagcgtagtagcgttgtgactgtaactgagagctgtatgtatgtcagcagagaatttggtactgctacctggacgcggcttttgtatcaccacgttgctgtgtgtagtatatgtgttggtcaatgtgtttttgctaccgccatcttttatctggttcaagtaattgggcgtattcgttgcctaaggttttgac

SEQ ID NO: 59904 - DNA, 1901 bp, Zea Mays
gtgagacccagaagtttacgtccagtcgtccacccatccaccatggaccacgattaaccctcctggaggagagcgcagatggggacgcggactccattccactccactgttctcgctttcccctccaccgacctgagacacagagtgagagcccgcagacaagtgagacaacccaccgcgaaaccgacatcccaatccgtcggaatccgtggccagaggctcgccgccgcccgccgcccgccgcgtcagagacacgctctcccccgggcccggacaaacacctcccggcggggctattttctcaccgcgtggtctctttcgatctatcagagcgacgactaggctaccgccgccctacgccagatgccctggtcttagtcgggcccttctccggcaacgagcacctaacagcagatgattctgctggtgccataggtgtgaagtacttagtggggactggggagtgggcggacaagattttcattatagccatataaaatggagtgttccaattcaactagttcccaagggcatcatgtaggaaagtggaatcaagtgcaaatcattgatccttccattgttgaaatgggaccaagtcaccttccactgagtttcatgagaagatgccgtggagtattgtgtttggtgattatgatattaacagcatttatgatgatggtatacctgtcccctgttactactttccttgtgaggttgttcagtgtgcattacagcagaaagtctacatgcttcctgtttgggatgtggttagccatgtggccttttttgtttgagaagattaacaagaccaggtttgttttctctggtgaaagtgtgccagcaaaagagcgtgttctgttatttgctaaccacaggaccgaggttgactggatgtacttatgggattttgcattgaggaaaggccgcttgcagtgcatcaagtatatccttaagaaaagtttgatgaagttacctgttttcaactgggcatttcacattattgagtttattccggtagagagaaagtgggagattgatgaagcaataatccgaagcaggctttctgaatttaagaacccaaaggatcccctttggctggcagttttcccagaaggcactgattatactgagaagaagtgtatcaaaagtcaagaatatgcagcagagcatggtttgcctgttctgaaaaacgtactccttcccaagacaaagggtttcaattgctgtttgcaagtgctgaggagtaccatagatgctgtgtacgacatcacgatcgcctacaaacaccggccgccgacatttctggacaacgtctacggcgtgggtccttcggaagtccacatccacatcagcagcatccaggtctccgacataccggcgtccgaagacggggtggctggctggctggtggagcggttcaggctcaaggacgagctgctgtccggcttctccgcgctgggccacttccccgacgaagggaccgccgagggggacctgtcgacggccgagtgcctcgcgaacttcgcggccgtggtcgccgtcacgggcctgctcgcgtacctgaccctgttctcgtccgtgtggttcaagctcttcgtggcgttcagctgctcgtctctcacgctcgctacgtgctactctgtacatctgccccagatggtaggttttggctcaggtacccctgcgagcatccacgcgaaggaggcttgagcgtagtagcgttgtgactgtaactgagagctgtatgtatgtcagcagagaatttggtactgctacctggacgcggcttttgtatcaccacgttgctgtgtgtagtatatgtgttggtcaatgtgtttttgctaccgccatcttttatctggttcaagtaattgggcgtattcgttgcctaaggttttgac

SEQ ID NO: 59905 - DNA, 1912 bp, Zea Mays
actccattccactccactgttctcgctttcccctccaccgacctgagacacagagtgagagcccgcagacaagtgagacaacccaccgcgaaaccgacatcccaatccgtcggaatccgtggccagaggctcgccgccgcccgccgcccgccgcgtcagagacacgctctcccccgggcccggacaaacacctcccggcggggctattttctcaccgcgtggtctctttcgatctatcagagcgacgactaggctaccgccgccctacgccagatgccctggtcttagtcgggcccttctccggcaacgagcacctaacagcagtagggatgaccagcgatgcacaggagctatgaacaacgatgactaccgacctgcagcacatacgagcccatgacgcaaacgagttggccgaaatagttcagatgattctgctggtgccataggtgtgaagtacttagtggggactggggagtgggcggacaagattttcattatagccatataaaatggagtgttccaattcaactagttcccaagggcatcatgtaggaaagtggaatcaagtgcaaatcattgatccttccattgttgaaatgggaccaagtcaccttccactgagtttcatgagaagatgccgtggagtattgtgtttggtgattatgatattaacagcatttatgatgatggtatacctgtcccctgttactactttccttgtgaggttgttcagtgtgcattacagcagaaagtctacatgcttcctgtttgggatgtggttagccatgtggccttttttgtttgagaagattaacaagaccaggtttgttttctctggtgaaagtgtgccagcaaaagagcgtgttctgttatttgctaaccacaggaccgaggttgactggatgtacttatgggattttgcattgaggaaaggccgcttgcagtgcatcaagtatatccttaagaaaagtttgatgaagttacctgttttcaactgggcatttcacattattgagtttattccggtagagagaaagtgggagattgatgaagcaataatccgaagcaggctttctgaatttaagaacccaaaggatcccctttggctggcagttttcccagaaggcactgattatactgagaagaagtgtatcaaaagtcaagaatatgcagcagagcatggtttgcctgttctgaaaaacgtactccttcccaagacaaagggtttcaattgctgtttgcaagtgctgaggagtaccatagatgctgtgtacgacatcacgatcgcctacaaacaccggccgccgacatttctggacaacgtctacggcgtgggtccttcggaagtccacatccacatcagcagcatccaggtctccgacataccggcgtccgaagacggggtggctggctggctggtggagcggttcaggctcaaggacgagctgctgtccggcttctccgcgctgggccacttccccgacgaagggaccgccgagggggacctgtcgacggccgagtgcctcgcgaacttcgcggccgtggtcgccgtcacgggcctgctcgcgtacctgaccctgttctcgtccgtgtggttcaagctcttcgtggcgttcagctgctcgtctctcacgctcgctacgtgctactctgtacatctgccccagatggtaggttttggctcaggtacccctgcgagcatccacgcgaaggaggcttgagcgtagtagcgttgtgactgtaactgagagctgtatgtatgtcagcagagaatttggtactgctacctggacgcggcttttgtatcaccacgttgctgtgtgtagtatatgtgttggtcaatgtgtttttgctaccgccatcttttatctggttcaagtaattgggcgtattcgttgcctaaggttttgac

SEQ ID NO: 59906 - DNA, 1572 bp, Zea Mays
atcgtcgcatgggtgccctttttggatttactcgctgggatgctgtcttgaaattcttacttctcccatcatgtgtgcagttcagatgattctgctggtgccataggtgtgaagtacttagtggggactggggagtgggcggacaagattttcattatagccatataaaatggagtgttccaattcaactagttcccaagggcatcatgtaggaaagtggaatcaagtgcaaatcattgatccttccattgttgaaatgggaccaagtcaccttccactgagtttcatgagaagatgccgtggagtattgtgtttggtgattatgatattaacagcatttatgatgatggtatacctgtcccctgttactactttccttgtgaggttgttcagtgtgcattacagcagaaagtctacatgcttcctgtttgggatgtggttagccatgtggccttttttgtttgagaagattaacaagaccaggtttgttttctctggtgaaagtgtgccagcaaaagagcgtgttctgttatttgctaaccacaggaccgaggttgactggatgtacttatgggattttgcattgaggaaaggccgcttgcagtgcatcaagtatatccttaagaaaagtttgatgaagttacctgttttcaactgggcatttcacattattgagtttattccggtagagagaaagtgggagattgatgaagcaataatccgaagcaggctttctgaatttaagaacccaaaggatcccctttggctggcagttttcccagaaggcactgattatactgagaagaagtgtatcaaaagtcaagaatatgcagcagagcatggtttgcctgttctgaaaaacgtactccttcccaagacaaagggtttcaattgctgtttgcaagtgctgaggagtaccatagatgctgtgtacgacatcacgatcgcctacaaacaccggccgccgacatttctggacaacgtctacggcgtgggtccttcggaagtccacatccacatcagcagcatccaggtctccgacataccggcgtccgaagacggggtggctggctggctggtggagcggttcaggctcaaggacgagctgctgtccggcttctccgcgctgggccacttccccgacgaagggaccgccgagggggacctgtcgacggccgagtgcctcgcgaacttcgcggccgtggtcgccgtcacgggcctgctcgcgtacctgaccctgttctcgtccgtgtggttcaagctcttcgtggcgttcagctgctcgtctctcacgctcgctacgtgctactctgtacatctgccccagatggtaggttttggctcaggtacccctgcgagcatccacgcgaaggaggcttgagcgtagtagcgttgtgactgtaactgagagctgtatgtatgtcagcagagaatttggtactgctacctggacgcggcttttgtatcaccacgttgctgtgtgtagtatatgtgttggtcaatgtgtttttgctaccgccatcttttatctggttcaagtaattgggcgtattcgttgcctaaggttttgac

SEQ ID NO: 59907 - DNA, 1541 bp, Zea Mays
tcgcatgggtgccctttttggatttactcgctgggatgctgtcttgaaattcagatgattctgctggtgccataggtgtgaagtacttagtggggactggggagtgggcggacaagattttcattatagccatataaaatggagtgttccaattcaactagttcccaagggcatcatgtaggaaagtggaatcaagtgcaaatcattgatccttccattgttgaaatgggaccaagtcaccttccactgagtttcatgagaagatgccgtggagtattgtgtttggtgattatgatattaacagcatttatgatgatggtatacctgtcccctgttactactttccttgtgaggttgttcagtgtgcattacagcagaaagtctacatgcttcctgtttgggatgtggttagccatgtggccttttttgtttgagaagattaacaagaccaggtttgttttctctggtgaaagtgtgccagcaaaagagcgtgttctgttatttgctaaccacaggaccgaggttgactggatgtacttatgggattttgcattgaggaaaggccgcttgcagtgcatcaagtatatccttaagaaaagtttgatgaagttacctgttttcaactgggcatttcacattattgagtttattccggtagagagaaagtgggagattgatgaagcaataatccgaagcaggctttctgaatttaagaacccaaaggatcccctttggctggcagttttcccagaaggcactgattatactgagaagaagtgtatcaaaagtcaagaatatgcagcagagcatggtttgcctgttctgaaaaacgtactccttcccaagacaaagggtttcaattgctgtttgcaagtgctgaggagtaccatagatgctgtgtacgacatcacgatcgcctacaaacaccggccgccgacatttctggacaacgtctacggcgtgggtccttcggaagtccacatccacatcagcagcatccaggtctccgacataccggcgtccgaagacggggtggctggctggctggtggagcggttcaggctcaaggacgagctgctgtccggcttctccgcgctgggccacttccccgacgaagggaccgccgagggggacctgtcgacggccgagtgcctcgcgaacttcgcggccgtggtcgccgtcacgggcctgctcgcgtacctgaccctgttctcgtccgtgtggttcaagctcttcgtggcgttcagctgctcgtctctcacgctcgctacgtgctactctgtacatctgccccagatggtaggttttggctcaggtacccctgcgagcatccacgcgaaggaggcttgagcgtagtagcgttgtgactgtaactgagagctgtatgtatgtcagcagagaatttggtactgctacctggacgcggcttttgtatcaccacgttgctgtgtgtagtatatgtgttggtcaatgtgtttttgctaccgccatcttttatctggttcaagtaattgggcgtattcgttgcctaaggttttgac

SEQ ID NO: 59908 - DNA, 2333 bp, Zea Mays
ggagatctaactccaaagcgtgaattggtcaagtcttaatgtaaatttgtcgtagcaattgttaagatggcattgtattggattctggtaggctttagagcaactccaagagaaaccttaaaataacactaaaaacatttattggtgaaaaacaccttattgagacgtccaacaatatcttcatcctctccccaaaacattcgcatcccgaatccgcccgtccctctcccgcatatattggcgtcgccgaatcctccccaatcgcccgagcgcacgcgcacccagttgtttggtacacaatagtttgctcgcacccagtatcgttggttttggaaggcacgaaccgtcagtggccacgggaggtttcagcggcagcggtagaggagacgggagagggtacaacagcggtggaggaggcggaggcggcgtcgacggagggagatgaagcctggttgcggcgctgctccgaaagcgccagtggaatccatcggaggcaaagtttctcatatgcagatggccggagatggagaaatagactgtgacggtggaggcgccttgcaaggacctctccgcccatcagtgccaggacgcgcaagagccatcgcaaatccattttcattccccttcggatgcagcgacgtggccttctgttcatccttcaagctagcggctaaaaaggcatgaaactgggtgtttagggtaggaacgtggctacttgtgtttgtgtctgattggggtcgcaggaggaatccatgattagcatcgctgatgctttgtgtcagtctccaaacacggaggtttatgtttcgcagatccattcatgtccgattcattagacaagttcagatgattctgctggtgccataggtgtgaagtacttagtggggactggggagtgggcggacaagattttcattatagccatataaaatggagtgttccaattcaactagttcccaagggcatcatgtaggaaagtggaatcaagtgcaaatcattgatccttccattgttgaaatgggaccaagtcaccttccactgagtttcatgagaagatgccgtggagtattgtgtttggtgattatgatattaacagcatttatgatgatggtatacctgtcccctgttactactttccttgtgaggttgttcagtgtgcattacagcagaaagtctacatgcttcctgtttgggatgtggttagccatgtggccttttttgtttgagaagattaacaagaccaggtttgttttctctggtgaaagtgtgccagcaaaagagcgtgttctgttatttgctaaccacaggaccgaggttgactggatgtacttatgggattttgcattgaggaaaggccgcttgcagtgcatcaagtatatccttaagaaaagtttgatgaagttacctgttttcaactgggcatttcacattattgagtttattccggtagagagaaagtgggagattgatgaagcaataatccgaagcaggctttctgaatttaagaacccaaaggatcccctttggctggcagttttcccagaaggcactgattatactgagaagaagtgtatcaaaagtcaagaatatgcagcagagcatggtttgcctgttctgaaaaacgtactccttcccaagacaaagggtttcaattgctgtttgcaagtgctgaggagtaccatagatgctgtgtacgacatcacgatcgcctacaaacaccggccgccgacatttctggacaacgtctacggcgtgggtccttcggaagtccacatccacatcagcagcatccaggtctccgacataccggcgtccgaagacggggtggctggctggctggtggagcggttcaggctcaaggacgagctgctgtccggcttctccgcgctgggccacttccccgacgaagggaccgccgagggggacctgtcgacggccgagtgcctcgcgaacttcgcggccgtggtcgccgtcacgggcctgctcgcgtacctgaccctgttctcgtccgtgtggttcaagctcttcgtggcgttcagctgctcgtctctcacgctcgctacgtgctactctgtacatctgccccagatggtaggttttggctcaggtacccctgcgagcatccacgcgaaggaggcttgagcgtagtagcgttgtgactgtaactgagagctgtatgtatgtcagcagagaatttggtactgctacctggacgcggcttttgtatcaccacgttgctgtgtgtagtatatgtgttggtcaatgtgtttttgctaccgccatcttttatctggttcaagtaattgggcgtattcgttgcctaaggttttgac

SEQ ID NO: 59909 - DNA, 1504 bp, Zea Mays
cgcagatccattcatgtccgattcattagacaagggatgaccagcgatgcacaggagctatgaacaacgatgactaccgacctgcagcacatacgagcccatgacgcaaacgagttggccgaaatagatgattctgctggtgccataggtgtgaagtacttagtggggactggggagtgggcggacaagattttcattatagccatataaaatggagtgttccaattcaactagttcccaagggcatcatgtaggaaagtggaatcaagtgcaaatcattgatccttccattgttgaaatgggaccaagtcaccttccactgagtttcatgagaagatgccgtggagtattgtgtttggtgattatgatattaacagcatttatgatgatggtatacctgtcccctgttactactttccttgtgaggttgttcagtgtgcattacagcagaaagtctacatgcttcctgtttgggatgtggttagccatgtggccttttttgtttgagaagattaacaagaccaggccgcttgcagtgcatcaagtatatccttaagaaaagtttgatgaagttacctgttttcaactgggcatttcacattattgagtttattccggtagagagaaagtgggagattgatgaagcaataatccgaagcaggctttctgaatttaagaacccaaaggatcccctttggctggcagttttcccagaaggcactgattatactgagaagaagtgtatcaaaagtcaagaatatgcagcagagcatggtttgcctgttctgaaaaacgtactccttcccaagacaaagggtttcaattgctgtttgcaagtgctgaggagtaccatagatgctgtgtacgacatcacgatcgcctacaaacaccggccgccgacatttctggacaacgtctacggcgtgggtccttcggaagtccacatccacatcagcagcatccaggtctccgacataccggcgtccgaagacggggtggctggctggctggtggagcggttcaggctcaaggacgagctgctgtccggcttctccgcgctgggccacttccccgacgaagggaccgccgagggggacctgtcgacggccgagtgcctcgcgaacttcgcggccgtggtcgccgtcacgggcctgctcgcgtacctgaccctgttctcgtccgtgtggttcaagctcttcgtggcgttcagctgctcgtctctcacgctcgctacgtgctactctgtacatctgccccagatggtaggttttggctcaggtacccctgcgagcatccacgcgaaggaggcttgagcgtagtagcgttgtgactgtaactgagagctgtatgtatgtcagcagagaatttggtactgctacctggacgcggcttttgtatcaccacgttgctgtgtgtagtatatgtgttggtcaatgtgtttttgctaccgccatcttttatctggttcaagtaattgggcgtattcgttgcctaaggttttgac

SEQ ID NO: 59910 - DNA, 477 bp, Zea Mays
ttcttaattttcgatgcaataagttgtattatttcaatcatcgccactagttcttcatcgttaaaagaagctaaaataacacacaccagtgagatgggaattgctagctatcttctggtcgatgtgtcatgaaacgatggcgattgggcgggtgcgactggatctggatgagtcaacgacgaccgaagggccctcctgggacgttgctgttggccttgggcgccggcggcgcccaagcttcgccggccgtcctgtccggcctcagcacatccctccgccacgcccggaatccagagcctgcatgcatgcctctttggcgagaggtgagccccgcctgccgcgactgaactgtcgtagccgtcgctgtcgccgtcgtagagatcaatagcaccaaaacaaaaacgaacaggaggcaggagacggctggtcgccgccatgctgcccttgccgtgctcttgcctctcagcggagcatcca

SEQ ID NO: 59911 - DNA, 1091 bp, Zea Mays
gaataattaaccatctcgttctgagcatcaccagttcagctcgtggagaagcaaccggatgtggcgatcgtgtggttctggaaggcaatcaactcaggggacagggtggacagcgccctgaaggacatggccatggtgatgaagcagcaggaccgttccgaggaggcaatcgaggccatcaggtccttcaggcacctctgctccaagcaggctcaggaatccctcgacaacctcctcattgacctctacaagaaatgcgggaaagttgaggagcagatcgagctcctgaaacagaagctcaagtcgatataccttggcgaggccttcaacgggaaggcgacgaagaaagcgcggtcccatggcaagaagtttcaggtctcgatccaacaagagacgtctcgtattctgggcaatcttggctgggcttacatgcagcagaacaacttcgaggccgccgagctggtgtaccgcaaggcgcaagctatcgagcccgatgccaacagggcgtgcaaccttgggctgtgcctgatcaagcagggcaggcacgacgaggcacggcaagcgctcgaggacgtccgattgcgcagaatctatggatcagaagatggaaaggtggttgcccgtgcggagcagcttctccgcgagctaaacccgttgcaatgcgtttcatcgccgttccaggttggcctcagcgtccatgaagggatcatgggtaaaccagacctagtagtgatgaacgagtggacgccgttcaggtcgaggaggctgcctgtgtttgaggagatagcaactttccgggaccaaatggcttgttgatgcattactttgcatggtttaatttatctgtcagtgtcacactcacatccctctagaagtttttgttcgtatagagatcagtatatatcatatagctggggttgatgcaaagcgttgcctttaggatagtatttggttcatgttatatcactgtatggttcagatttcagtgaacaaatgttcgtgcgtgccctgatcttgtacaggatttacagttggctgttgtgaaatggtcgcttctaatcttgtcttgtacaggatttacagtcggcttc

SEQ ID NO: 59912 - DNA, 1085 bp, Zea Mays
cgctgttgtaggcatgaacaacctcatgagttactcgtggagaagcaaccggatgtggcgatcgtgtggttctggaaggcaatcaactcaggggacagggtggacagcgccctgaaggacatggccatggtgatgaagcagcaggaccgttccgaggaggcaatcgaggccatcaggtccttcaggcacctctgctccaagcaggctcaggaatccctcgacaacctcctcattgacctctacaagaaatgcgggaaagttgaggagcagatcgagctcctgaaacagaagctcaagtcgatataccttggcgaggccttcaacgggaaggcgacgaagaaagcgcggtcccatggcaagaagtttcaggtctcgatccaacaagagacgtctcgtattctgggcaatcttggctgggcttacatgcagcagaacaacttcgaggccgccgagctggtgtaccgcaaggcgcaagctatcgagcccgatgccaacagggcgtgcaaccttgggctgtgcctgatcaagcagggcaggcacgacgaggcacggcaagcgctcgaggacgtccgattgcgcagaatctatggatcagaagatggaaaggtggttgcccgtgcggagcagcttctccgcgagctaaacccgttgcaatgcgtttcatcgccgttccaggttggcctcagcgtccatgaagggatcatgggtaaaccagacctagtagtgatgaacgagtggacgccgttcaggtcgaggaggctgcctgtgtttgaggagatagcaactttccgggaccaaatggcttgttgatgcattactttgcatggtttaatttatctgtcagtgtcacactcacatccctctagaagtttttgttcgtatagagatcagtatatatcatatagctggggttgatgcaaagcgttgcctttaggatagtatttggttcatgttatatcactgtatggttcagatttcagtgaacaaatgttcgtgcgtgccctgatcttgtacaggatttacagttggctgttgtgaaatggtcgcttctaatcttgtcttgtacaggatttacagtcggcttc

SEQ ID NO: 59913 - DNA, 4957 bp, Zea Mays
atggagatgatcggttctggctccaggagttgtctgtgtcactcttctttcctgcctggtttctttactggtggggaacatgcagaaaaactgagtcacaaaagaactgaaaggtcacaccctcttccatttcttgtaaaggaagaggagcttagtggcgatgagcttgaggaatttatcaagaatcgatacagtaatcgtgtgaaatatgctgctgatcggagctattctagagaagacgatgacattttccccatggattgtgcactcaaggagcctactatttggagagttaaatgcatggttgggcgtgagcgccaaatggccttctgcttcatgcaaaaatttgttgacctgcgaaaaattggtaccaaagtgccaattatcacagcatttgcacttgatcacataagagggtttgtttttgttgaagcggagaaggccggttatgttacagaggcatgcaaagggttttgtagtgtgtacacaagcagaattacttctgttcctgcaactgaagttcctagcttgttatccagccgtacgaaaccatttgaaatctctcgtggtacatggatacgcatgaagaatggtaactataaaggtgatctggcacaggtcgttaacatggattctggacggaaaaaagtgatgataaaaattatacccagagttgacctccatgctatttcgaaaaaatttggtggtgcagtttcactaaaagaagctgcagttcctgccccacggttcttcaggcctcacattgaaataaagcgcgatcgtcagactggcgaagtttttgaagtacttgatggtttgatgttcaaggatggatttctgtataaaaaggttgcacttagttctttgatttattgggggatacaaccgacagaaacagagcttttgaaattctcttctagtccaagcaatagagcttctgctgatgacctggattggctctccggcatgtatggttctaagaaaaggaaccttccagcagaacgagatatgaagtcatcatcttctaaaataaaatcctccaaagcaccagaccttaaagggtcaacttctactgaaaattatgacgacaatgatgaattcaaccttcatgatcttgtactctatgggcgaaaagattttggtgtgatcattgctgttgagaaagatggttttaggatactaaagggtggtcccgaaggatctgcggtgacagtgaggaagcaggatattaagaaaggctgtgtagacaaaatgtttacagctgttgatcatcataaaaagacgatatccattaatgacactgttaatgttgtggaagggccatttcagggtaagcaagggctcgttaaacacttgtacttgggaatactgtttatttttaatgaaagtgaaagtgagaactgtgggtttttctgtgctcaaagtgggtcatgcgaaaagatacggaagggtctgggaagctctactactgaaaattcggactttccaactcccatgttttctgaacctgcttatgagcaaaatgagcataggaacactgaagggccttacaggagcaccagagaacaacttttctctattgggcagatgctgcgcattagaaagggtcctttgaagggctacctctgtcgagtagttaggatatttcggaatgatgtgactgttaagctagactctctactgaaaattgttacagtacaagctgatcttctttcagtcccagctaataggggggataacttgtctggtgctccagctagtaaatttggaagtcaagatacacccttcttcgaagcaggcaaaacttcatgggacagggggttgccatcatttggcagtgactcatggcaacccttttcaagttccacgctaccagtccagaatgcaggtgcagaatcagaagctgatccatggtgtaagaaaacttctgctgaagatgattctgatccatggggtaagaaaacagacggtgattctgatccgtggggtaaggaagcggtatctgctgctgacggtgattgcaatccatggggtaaggaaacagtaccttctgctgctggtgattctgatccatggggtaagaaagtgttttctgctgatggtgattctgatccatggggtaagaaagcaatatcatcagctgttgaagtttggaacactagtgccacacaaaaggaaggttctagtggcaatgcatgggacaaacaagctggagttggtggatctgatgctgctggcagctcctgggacagagcggttgtcaataaggagagtgaaaagagtgacaactggggagaggcttgcagggttatggacatgggaactggagctgacacagacccttggggaagcaaggtcaaagcagtagatatggaaggaccaaatagctgggaaaaggctacaatgcctccagacaataagctggaggatgtcagccaaggatggaaccaacataagggcaactcaactgaagaccaagcaaaagacaatgtttctaaagatgaggacaacaatagggcttggagcagttctttgcctgtcactgaagatggtacctggggcaaatcaaaagacgacaactgtgatggagcaggtggtgcaggaggttgggatgcttctgttgccaactggaacaaatcatccgttctggctgatgcacaggatgagggttggggaaaaggaaattggtcatctgctaagtctgaagaaacaaacaatgaaattggaaattggaacaaagctggagcttcggaccaagctggaccgaaatcttttggtggtgatggttggaacaagggtggtgatcagaatagcagttggaacagtcctggaaattttggaggtgggcgtggctttgggcgaggacgagggagagttaggggtcgggaatctggagatttcaatggcagaaatgatcaaggaaattggaagaattcatggggtggtgacaatgctgaaaaatcttcttggaggtctgataatcaggtagacaatgaagctggagattctggtggatataggggacggggaagaggaggaagggggcaatatggaggacgaggaagagggagagacaatggttggagaaatggtgatggaccaaaatggggtggtggagataattggaacgctacaaatccaccaagtaatcagccttggagtagcagtggaggcaccaagtcatatggtcaaaatcagccttccacttggaataatccagaggataacaaaccatctgtaggtgaacaaggtgatccttgggcaagcaaggtgtcttctactgaaggtaaaggacaacagaatgattcttggtcaagtaagatgacttctcgtggtgctgaggataccagcggtggctgggacagcaaggagaagggctcttcctgcaatggtgggggtgaaggactacaaaatgatccatgggcaaacaagattggttctaacgaaggtaaagaacaagaagctgatccttgggccagcaagatgtcttctgctgtgggtgctgatgacaagaatggtacctgggacacgacaacaaagggcactctatctaacgaaaaggctgacgacccttggaatagtaagcggggtaatgatgatgacagcaagaaaactgacgcctggggtgctggctcgtcaggtgggaatcaggaatcttcttggagtaaacctattttctctctgggggatcaggaacctacttggaacaacccaaggtttggtgacgatgacaatgtaaataatagaggtgggtttggacgcggaaatcaaggcagagggagaggaaggagttttggtggtggtggtggtggatcatcatggaatgaaagcaacaaaaacggtgaatcaggtgggggaaggtctggagaaccatggaacagaaggggttttgatggcggcagaggaagaggccgctttgggcgaggtgaccgcaatcaaggcaacaacttggggtcaggagatggtggcagctggggctctggcaggggaaatggtggtggccgtggtggttacaggaactggaacgataacaacgaaagaaggcccttcggtcaaggtggtggctggtctcagtcttccgactggaatgccaacaaaggaagtggcgaaggaaatcaagctttctcgaagagcaagcccagctgggacgcgcagaacgcctctggtggagatgaccaggcaggaaagaagagtgacacagacaactcctggagccagaaccgatcatctccatctatcctgggtcagccaagcggtgatgctaataacaagtctagcgcttgggacggcgctcccaacggaggagctggcaggggaggttcaggttcttggggaaagagcgacgaggatggctggaactcgtcgtcgggaggatcagccagagagaagccttcgtggggtggtggggcagaagctcctcccaggaaggaggacgacggcgcatggggcaaaggcggcgaggggagccggagcctaggaggaggaggagagggtggtagcagcagttcctgggataaaccggcagatggtgcatggagcggcaacaacaagggtggcagtggcagtggtgggtggtaactggtaagcttgcgacttattggcgctgactgcatgtaaatattgtgcccgcgctgtgtgaactgttctggtgcgtgtctagttcgtatcagttacttggccatgcgtactctaaactaaaataaaacatggcttgtgactgtgactagttaaatgtagcctgttgctgacagtaattaggtgccttaactttcagaaactcatttgttagcatcctcgattcctagacctacgaattaaaaaaaatccgacgtgctagcagatgcagcaccatttgcttgtgctggataaaattgtctacctaacagaaacaaccgtgtttctcatgtcatggaccgactgagaccgaccattgttccaacttccaagtgggttttcc

SEQ ID NO: 59914 - DNA, 4903 bp, Zea Mays
atggagatgatcggttctggctccaggagttgtctgtgtcactcttctttcctgcctggtttctttactggtggggaacatgcagaaaaactgagtcacaaaagaactgaaaggtcacaccctcttccatttcttgtaaaggaagaggagcttagtggcgatgagcttgaggaatttatcaagaatcgatacagtaatcgtgtgaaatatgctgctgatcggagctattctagagaagacgatgacattttccccatggattgtgcactcaaggagcctactatttggagagttaaatgcatggttgggcgtgagcgccaaatggccttctgcttcatgcaaaaatttgttgacctgcgaaaaattggtaccaaagtgccaattatcacagcatttgcacttgatcacataagagggtttgtttttgttgaagcggagaaggccggttatgttacagaggcatgcaaagggttttgtagtgtgtacacaagcagaattacttctgttcctgcaactgaagttcctagcttgttatccagccgtacgaaaccatttgaaatctctcgtggtacatggatacgcatgaagaatggtaactataaaggtgatctggcacagggtggtgcagtttcactaaaagaagctgcagttcctgccccacggttgatcagctcccaagaacttgagttcttcaggcctcacattgaaataaagcgcgatcgtcagactggcgaagtttttgaagtacttgatggtttgatgttcaaggatggatttctgtataaaaaggttgcacttagttctttgatttattgggggatacaaccgacagaaacagagcttttgaaattctcttctagtccaagcaatagagcttctgctgatgacctggattggctctccggcatgtatggttctaagaaaaggaaccttccagcagaacgagatatgaagtcatcatcttctaaaataaaatcctccaaagcaccagaccttaaagggtcaacttctactgaaaattatgacgacaatgatgaattcaaccttcatgatcttgtactctatgggcgaaaagattttggtgtgatcattgctgttgagaaagatggttttaggatactaaagggtggtcccgaaggatctgcggtgacagtgaggaagcaggatattaagaaaggctgtgtagacaaaatgtttacagctgttgatcatcataaaaagacgatatccattaatgacactgttaatgttgtggaagggccatttcagggtaagcaagggctcgttaaacacttgtacttgggaatactgtttatttttaatgaaagtgaaagtgagaactgtgggtttttctgtgctcaaagtgggtcatgcgaaaagatacggaagggtctgggaagctctactactgaaaattcggactttccaactcccatgttttctgaacctgcttatgagcaaaatgagcataggaacactgaagggccttacaggagcaccagagaacaacttttctctattgggcagatgctgcgcattagaaagggtcctttgaagggctacctctgtcgagtagttaggatatttcggaatgatgtgactgttaagctagactctctactgaaaattgttacagtacaagctgatcttctttcagtcccagctaataggggggataacttgtctggtgctccagctagtaaatttggaagtcaagatacacccttcttcgggtcagaagcaggcaaaacttcatgggacagggggttgccatcatttggcagtgactcatggcaacccttttcaagttccacgctaccagtccagaatgcaggtgcagaatcagaagctgatccatggtgtaagaaaacttctgctgaagatgattctgatccatggggtaagaaaacagacggtgattctgatccgtggggtaaggaagcggtatctgctgctgacggtgattgcaatccatggggtaaggaaacagtaccttctgctgctggtgattctgatccatggggtaagaaagtgttttctgctgatggtgattctgatccatggggtaagaaagcaatatcatcagctgttgaagtttggaacactagtgccacacaaaaggaaggttctagtggcaatgcatgggacaaacaagctggagttggtggatctgatgctgctggcagctcctgggacagagcggttgtcaataaggagagtgaaaagagtgacaactggggagaggcttgcagggttatggacatgggaactggagctgacacagacccttggggaagcaaggtcaaagcagtagatatggaaggaccaaatagctgggaaaaggctacaatgcctccagacaataagctggaggatgtcagccaaggatggaaccaacataagggcaactcaactgaagaccaagcaaaagacaatgtttctaaagatgaggacaacaatagggcttggagcagttctttgcctgtcactgaagatggtacctggggcaaatcaaaagacgacaactgtgatggagcaggtggtgcaggaggttgggatgcttctgttgccaactggaacaaatcatccgttctggctgatgcacaggatgagggttggggaaaaggaaattggtcatctgctaagtctgaagaaacaaacaatgaaattggaaattggaacaaagctggagcttcggaccaagctggaccgaaatcttttggtggtgatggttggaacaagggtggtgatcagaatagcagttggaacagtcctggaaattttggaggtgggcgtggctttgggcgaggacgagggagagttaggggtcgggaatctggagatttcaatggcagaaatgatcaaggaaattggaagaattcatggggtggtgacaatgctgaaaaatcttcttggaggtctgataatcaggtagacaatgaagctggagattctggtggatataggggacggggaagaggaggaagggggcaatatggaggacgaggaagagggagagacaatggttggagaaatggtgatggaccaaaatggggtggtggagataattggaacgctacaaatccaccaagtaatcagccttggagtagcagtggaggcaccaagtcatatggtcaaaatcagccttccacttggaataatccagaggataacaaaccatctgtaggtgaacaaggtgatccttgggcaagcaaggtgtcttctactgaaggtaaaggacaacagaatgattcttggtcaagtaagatgacttctcgtggtgctgaggataccagcggtggctgggacagcaaggagaagggctcttcctgcaatggtgggggtgaaggactacaaaatgatccatgggcaaacaagattggttctaacgaaggtaaagaacaagaagctgatccttgggccagcaagatgtcttctgctgtgggtgctgatgacaagaatggtacctgggacacgacaacaaagggcactctatctaacgaaaaggctgacgacccttggaatagtaagcggggtaatgatgatgacagcaagaaaactgacgcctggggtgctggctcgtcaggtgggaatcaggaatcttcttggagtaaacctattttctctctgggggatcaggaacctacttggaacaacccaaggtttggtgacgatgacaatgtaaataatagaggtgggtttggacgcggaaatcaaggcagagggagaggaaggagttttggtggtggtggtggtggatcatcatggaatgaaagcaacaaaaacggtgaatcaggtgggggaaggtctggagaaccatggaacagaaggggttttgatggcggcagaggaagaggccgctttgggcgaggtgaccgcaatcaaggcaacaacttggggtcaggagatggtggcagctggggctctggcaggggaaatggtggtggccgtggtggttacaggaactggaacgataacaacgaaagaaggcccttcggtcaaggtggtggctggtctcagtcttccgactggaatgccaacaaaggaagtggcgaaggaaatcaagctttctcgaagagcaagcccagctgggacgcgcagaacgcctctggtggagatgaccaggcaggaaagaagagtgacacagacaactcctggagccagaaccgatcatctccatctatcctgggtcagccaagcggtgatgctaataacaagtctagcgcttgggacggcgctcccaacggaggagctggcaggggaggttcaggttcttggggaaagagcgacgaggatggctggaactcgtcgtcgggaggatcagccagagagaagccttcgtggggtggtggggcagaagctcctcccaggaaggaggacgacggcgcatggggcaaaggcggcgaggggagccggagcctaggaggaggaggagagggtggtagcagcagttcctgggataaaccggcagatggtgcatggagcggcaacaacaagggtggcagtggcagtggtgggtggtaactggtaagcttgcgacttattggcgctgactgcatgtaaatattgtgcccgcgctgtgtgaactgttctggtgcgtgtctagttcgtatcagttacttggccatgcgtactctaaactaaaataaaacatggcttgtgactgtgactagttaaatgtagcctgttgctgacagtaattaggtgccttaactttcagaaactcatttgttagcatcctcgattcctagacctacgaattaaaaaaaatccgacgtgctagcagatgcagcaccatttgcttgtgctggataaaattgtctacctaacagaaacaaccgtgtttctcatgtcatggaccgactgagaccgaccattgttccaacttccaagtgggttttcc

SEQ ID NO: 59915 - DNA, 4963 bp, Zea Mays
atggagatgatcggttctggctccaggagttgtctgtgtcactcttctttcctgcctggtttctttactggtggggaacatgcagaaaaactgagtcacaaaagaactgaaaggtcacaccctcttccatttcttgtaaaggaagaggagcttagtggcgatgagcttgaggaatttatcaagaatcgatacagtaatcgtgtgaaatatgctgctgatcggagctattctagagaagacgatgacattttccccatggattgtgcactcaaggagcctactatttggagagttaaatgcatggttgggcgtgagcgccaaatggccttctgcttcatgcaaaaatttgttgacctgcgaaaaattggtaccaaagtgccaattatcacagcatttgcacttgatcacataagagggtttgtttttgttgaagcggagaaggccggttatgttacagaggcatgcaaagggttttgtagtgtgtacacaagcagaattacttctgttcctgcaactgaagttcctagcttgttatccagccgtacgaaaccatttgaaatctctcgtggtacatggatacgcatgaagaatggtaactataaaggtgatctggcacaggtcgttaacatggattctggacggaaaaaagtgatgataaaaattatacccagagttgacctccatgctatttcgaaaaaatttggtggtgcagtttcactaaaagaagctgcagttcctgccccacggttcttcaggcctcacattgaaataaagcgcgatcgtcagactggcgaagtttttgaagtacttgatggtttgatgttcaaggatggatttctgtataaaaaggttgcacttagttctttgatttattgggggatacaaccgacagaaacagagcttttgaaattctcttctagtccaagcaatagagcttctgctgatgacctggattggctctccggcatgtatggttctaagaaaaggaaccttccagcagaacgagatatgaagtcatcatcttctaaaataaaatcctccaaagcaccagaccttaaagggtcaacttctactgaaaattatgacgacaatgatgaattcaaccttcatgatcttgtactctatgggcgaaaagattttggtgtgatcattgctgttgagaaagatggttttaggatactaaagggtggtcccgaaggatctgcggtgacagtgaggaagcaggatattaagaaaggctgtgtagacaaaatgtttacagctgttgatcatcataaaaagacgatatccattaatgacactgttaatgttgtggaagggccatttcagggtaagcaagggctcgttaaacacttgtacttgggaatactgtttatttttaatgaaagtgaaagtgagaactgtgggtttttctgtgctcaaagtgggtcatgcgaaaagatacggaagggtctgggaagctctactactgaaaattcggactttccaactcccatgttttctgaacctgcttatgagcaaaatgagcataggaacactgaagggccttacaggagcaccagagaacaacttttctctattgggcagatgctgcgcattagaaagggtcctttgaagggctacctctgtcgagtagttaggatatttcggaatgatgtgactgttaagctagactctctactgaaaattgttacagtacaagctgatcttctttcagtcccagctaataggggggataacttgtctggtgctccagctagtaaatttggaagtcaagatacacccttcttcgggtcagaagcaggcaaaacttcatgggacagggggttgccatcatttggcagtgactcatggcaacccttttcaagttccacgctaccagtccagaatgcaggtgcagaatcagaagctgatccatggtgtaagaaaacttctgctgaagatgattctgatccatggggtaagaaaacagacggtgattctgatccgtggggtaaggaagcggtatctgctgctgacggtgattgcaatccatggggtaaggaaacagtaccttctgctgctggtgattctgatccatggggtaagaaagtgttttctgctgatggtgattctgatccatggggtaagaaagcaatatcatcagctgttgaagtttggaacactagtgccacacaaaaggaaggttctagtggcaatgcatgggacaaacaagctggagttggtggatctgatgctgctggcagctcctgggacagagcggttgtcaataaggagagtgaaaagagtgacaactggggagaggcttgcagggttatggacatgggaactggagctgacacagacccttggggaagcaaggtcaaagcagtagatatggaaggaccaaatagctgggaaaaggctacaatgcctccagacaataagctggaggatgtcagccaaggatggaaccaacataagggcaactcaactgaagaccaagcaaaagacaatgtttctaaagatgaggacaacaatagggcttggagcagttctttgcctgtcactgaagatggtacctggggcaaatcaaaagacgacaactgtgatggagcaggtggtgcaggaggttgggatgcttctgttgccaactggaacaaatcatccgttctggctgatgcacaggatgagggttggggaaaaggaaattggtcatctgctaagtctgaagaaacaaacaatgaaattggaaattggaacaaagctggagcttcggaccaagctggaccgaaatcttttggtggtgatggttggaacaagggtggtgatcagaatagcagttggaacagtcctggaaattttggaggtgggcgtggctttgggcgaggacgagggagagttaggggtcgggaatctggagatttcaatggcagaaatgatcaaggaaattggaagaattcatggggtggtgacaatgctgaaaaatcttcttggaggtctgataatcaggtagacaatgaagctggagattctggtggatataggggacggggaagaggaggaagggggcaatatggaggacgaggaagagggagagacaatggttggagaaatggtgatggaccaaaatggggtggtggagataattggaacgctacaaatccaccaagtaatcagccttggagtagcagtggaggcaccaagtcatatggtcaaaatcagccttccacttggaataatccagaggataacaaaccatctgtaggtgaacaaggtgatccttgggcaagcaaggtgtcttctactgaaggtaaaggacaacagaatgattcttggtcaagtaagatgacttctcgtggtgctgaggataccagcggtggctgggacagcaaggagaagggctcttcctgcaatggtgggggtgaaggactacaaaatgatccatgggcaaacaagattggttctaacgaaggtaaagaacaagaagctgatccttgggccagcaagatgtcttctgctgtgggtgctgatgacaagaatggtacctgggacacgacaacaaagggcactctatctaacgaaaaggctgacgacccttggaatagtaagcggggtaatgatgatgacagcaagaaaactgacgcctggggtgctggctcgtcaggtgggaatcaggaatcttcttggagtaaacctattttctctctgggggatcaggaacctacttggaacaacccaaggtttggtgacgatgacaatgtaaataatagaggtgggtttggacgcggaaatcaaggcagagggagaggaaggagttttggtggtggtggtggtggatcatcatggaatgaaagcaacaaaaacggtgaatcaggtgggggaaggtctggagaaccatggaacagaaggggttttgatggcggcagaggaagaggccgctttgggcgaggtgaccgcaatcaaggcaacaacttggggtcaggagatggtggcagctggggctctggcaggggaaatggtggtggccgtggtggttacaggaactggaacgataacaacgaaagaaggcccttcggtcaaggtggtggctggtctcagtcttccgactggaatgccaacaaaggaagtggcgaaggaaatcaagctttctcgaagagcaagcccagctgggacgcgcagaacgcctctggtggagatgaccaggcaggaaagaagagtgacacagacaactcctggagccagaaccgatcatctccatctatcctgggtcagccaagcggtgatgctaataacaagtctagcgcttgggacggcgctcccaacggaggagctggcaggggaggttcaggttcttggggaaagagcgacgaggatggctggaactcgtcgtcgggaggatcagccagagagaagccttcgtggggtggtggggcagaagctcctcccaggaaggaggacgacggcgcatggggcaaaggcggcgaggggagccggagcctaggaggaggaggagagggtggtagcagcagttcctgggataaaccggcagatggtgcatggagcggcaacaacaagggtggcagtggcagtggtgggtggtaactggtaagcttgcgacttattggcgctgactgcatgtaaatattgtgcccgcgctgtgtgaactgttctggtgcgtgtctagttcgtatcagttacttggccatgcgtactctaaactaaaataaaacatggcttgtgactgtgactagttaaatgtagcctgttgctgacagtaattaggtgccttaactttcagaaactcatttgttagcatcctcgattcctagacctacgaattaaaaaaaatccgacgtgctagcagatgcagcaccatttgcttgtgctggataaaattgtctacctaacagaaacaaccgtgtttctcatgtcatggaccgactgagaccgaccattgttccaacttccaagtgggttttcc

SEQ ID NO: 59916 - DNA, 4987 bp, Zea Mays
atggagatgatcggttctggctccaggagttgtctgtgtcactcttctttcctgcctggtttctttactggtggggaacatgcagaaaaactgagtcacaaaagaactgaaaggtcacaccctcttccatttcttgtaaaggaagaggagcttagtggcgatgagcttgaggaatttatcaagaatcgatacagtaatcgtgtgaaatatgctgctgatcggagctattctagagaagacgatgacattttccccatggattgtgcactcaaggagcctactatttggagagttaaatgcatggttgggcgtgagcgccaaatggccttctgcttcatgcaaaaatttgttgacctgcgaaaaattggtaccaaagtgccaattatcacagcatttgcacttgatcacataagagggtttgtttttgttgaagcggagaaggccggttatgttacagaggcatgcaaagggttttgtagtgtgtacacaagcagaattacttctgttcctgcaactgaagttcctagcttgttatccagccgtacgaaaccatttgaaatctctcgtggtacatggatacgcatgaagaatggtaactataaaggtgatctggcacaggtcgttaacatggattctggacggaaaaaagtgatgataaaaattatacccagagttgacctccatgctatttcgaaaaaatttggtggtgcagtttcactaaaagaagctgcagttcctgccccacggttgatcagctcccaagaacttgagttcttcaggcctcacattgaaataaagcgcgatcgtcagactggcgaagtttttgaagtacttgatggtttgatgttcaaggatggatttctgtataaaaaggttgcacttagttctttgatttattgggggatacaaccgacagaaacagagcttttgaaattctcttctagtccaagcaatagagcttctgctgatgacctggattggctctccggcatgtatggttctaagaaaaggaaccttccagcagaacgagatatgaagtcatcatcttctaaaataaaatcctccaaagcaccagaccttaaagggtcaacttctactgaaaattatgacgacaatgatgaattcaaccttcatgatcttgtactctatgggcgaaaagattttggtgtgatcattgctgttgagaaagatggttttaggatactaaagggtggtcccgaaggatctgcggtgacagtgaggaagcaggatattaagaaaggctgtgtagacaaaatgtttacagctgttgatcatcataaaaagacgatatccattaatgacactgttaatgttgtggaagggccatttcagggtaagcaagggctcgttaaacacttgtacttgggaatactgtttatttttaatgaaagtgaaagtgagaactgtgggtttttctgtgctcaaagtgggtcatgcgaaaagatacggaagggtctgggaagctctactactgaaaattcggactttccaactcccatgttttctgaacctgcttatgagcaaaatgagcataggaacactgaagggccttacaggagcaccagagaacaacttttctctattgggcagatgctgcgcattagaaagggtcctttgaagggctacctctgtcgagtagttaggatatttcggaatgatgtgactgttaagctagactctctactgaaaattgttacagtacaagctgatcttctttcagtcccagctaataggggggataacttgtctggtgctccagctagtaaatttggaagtcaagatacacccttcttcgggtcagaagcaggcaaaacttcatgggacagggggttgccatcatttggcagtgactcatggcaacccttttcaagttccacgctaccagtccagaatgcaggtgcagaatcagaagctgatccatggtgtaagaaaacttctgctgaagatgattctgatccatggggtaagaaaacagacggtgattctgatccgtggggtaaggaagcggtatctgctgctgacggtgattgcaatccatggggtaaggaaacagtaccttctgctgctggtgattctgatccatggggtaagaaagtgttttctgctgatggtgattctgatccatggggtaagaaagcaatatcatcagctgttgaagtttggaacactagtgccacacaaaaggaaggttctagtggcaatgcatgggacaaacaagctggagttggtggatctgatgctgctggcagctcctgggacagagcggttgtcaataaggagagtgaaaagagtgacaactggggagaggcttgcagggttatggacatgggaactggagctgacacagacccttggggaagcaaggtcaaagcagtagatatggaaggaccaaatagctgggaaaaggctacaatgcctccagacaataagctggaggatgtcagccaaggatggaaccaacataagggcaactcaactgaagaccaagcaaaagacaatgtttctaaagatgaggacaacaatagggcttggagcagttctttgcctgtcactgaagatggtacctggggcaaatcaaaagacgacaactgtgatggagcaggtggtgcaggaggttgggatgcttctgttgccaactggaacaaatcatccgttctggctgatgcacaggatgagggttggggaaaaggaaattggtcatctgctaagtctgaagaaacaaacaatgaaattggaaattggaacaaagctggagcttcggaccaagctggaccgaaatcttttggtggtgatggttggaacaagggtggtgatcagaatagcagttggaacagtcctggaaattttggaggtgggcgtggctttgggcgaggacgagggagagttaggggtcgggaatctggagatttcaatggcagaaatgatcaaggaaattggaagaattcatggggtggtgacaatgctgaaaaatcttcttggaggtctgataatcaggtagacaatgaagctggagattctggtggatataggggacggggaagaggaggaagggggcaatatggaggacgaggaagagggagagacaatggttggagaaatggtgatggaccaaaatggggtggtggagataattggaacgctacaaatccaccaagtaatcagccttggagtagcagtggaggcaccaagtcatatggtcaaaatcagccttccacttggaataatccagaggataacaaaccatctgtaggtgaacaaggtgatccttgggcaagcaaggtgtcttctactgaaggtaaaggacaacagaatgattcttggtcaagtaagatgacttctcgtggtgctgaggataccagcggtggctgggacagcaaggagaagggctcttcctgcaatggtgggggtgaaggactacaaaatgatccatgggcaaacaagattggttctaacgaaggtaaagaacaagaagctgatccttgggccagcaagatgtcttctgctgtgggtgctgatgacaagaatggtacctgggacacgacaacaaagggcactctatctaacgaaaaggctgacgacccttggaatagtaagcggggtaatgatgatgacagcaagaaaactgacgcctggggtgctggctcgtcaggtgggaatcaggaatcttcttggagtaaacctattttctctctgggggatcaggaacctacttggaacaacccaaggtttggtgacgatgacaatgtaaataatagaggtgggtttggacgcggaaatcaaggcagagggagaggaaggagttttggtggtggtggtggtggatcatcatggaatgaaagcaacaaaaacggtgaatcaggtgggggaaggtctggagaaccatggaacagaaggggttttgatggcggcagaggaagaggccgctttgggcgaggtgaccgcaatcaaggcaacaacttggggtcaggagatggtggcagctggggctctggcaggggaaatggtggtggccgtggtggttacaggaactggaacgataacaacgaaagaaggcccttcggtcaaggtggtggctggtctcagtcttccgactggaatgccaacaaaggaagtggcgaaggaaatcaagctttctcgaagagcaagcccagctgggacgcgcagaacgcctctggtggagatgaccaggcaggaaagaagagtgacacagacaactcctggagccagaaccgatcatctccatctatcctgggtcagccaagcggtgatgctaataacaagtctagcgcttgggacggcgctcccaacggaggagctggcaggggaggttcaggttcttggggaaagagcgacgaggatggctggaactcgtcgtcgggaggatcagccagagagaagccttcgtggggtggtggggcagaagctcctcccaggaaggaggacgacggcgcatggggcaaaggcggcgaggggagccggagcctaggaggaggaggagagggtggtagcagcagttcctgggataaaccggcagatggtgcatggagcggcaacaacaagggtggcagtggcagtggtgggtggtaactggtaagcttgcgacttattggcgctgactgcatgtaaatattgtgcccgcgctgtgtgaactgttctggtgcgtgtctagttcgtatcagttacttggccatgcgtactctaaactaaaataaaacatggcttgtgactgtgactagttaaatgtagcctgttgctgacagtaattaggtgccttaactttcagaaactcatttgttagcatcctcgattcctagacctacgaattaaaaaaaatccgacgtgctagcagatgcagcaccatttgcttgtgctggataaaattgtctacctaacagaaacaaccgtgtttctcatgtcatggaccgactgagaccgaccattgttccaacttccaagtgggttttcc

SEQ ID NO: 59917 - DNA, 3221 bp, Zea Mays
ccattgagggatgagttactttcttttaatggaaaagctgaatttaggagggtcagaagcaggcaaaacttcatgggacagggggttgccatcatttggcagtgactcatggcaacccttttcaagttccacgctaccagtccagaatgcaggtgcagaatcagaagctgatccatggtgtaagaaaacttctgctgaagatgattctgatccatggggtaagaaaacagacggtgattctgatccgtggggtaaggaagcggtatctgctgctgacggtgattgcaatccatggggtaaggaaacagtaccttctgctgctggtgattctgatccatggggtaagaaagtgttttctgctgatggtgattctgatccatggggtaagaaagcaatatcatcagctgttgaagtttggaacactagtgccacacaaaaggaaggttctagtggcaatgcatgggacaaacaagctggagttggtggatctgatgctgctggcagctcctgggacagagcggttgtcaataaggagagtgaaaagagtgacaactggggagaggcttgcagggttatggacatgggaactggagctgacacagacccttggggaagcaaggtcaaagcagtagatatggaaggaccaaatagctgggaaaaggctacaatgcctccagacaataagctggaggatgtcagccaaggatggaaccaacataagggcaactcaactgaagaccaagcaaaagacaatgtttctaaagatgaggacaacaatagggcttggagcagttctttgcctgtcactgaagatggtacctggggcaaatcaaaagacgacaactgtgatggagcaggtggtgcaggaggttgggatgcttctgttgccaactggaacaaatcatccgttctggctgatgcacaggatgagggttggggaaaaggaaattggtcatctgctaagtctgaagaaacaaacaatgaaattggaaattggaacaaagctggagcttcggaccaagctggaccgaaatcttttggtggtgatggttggaacaagggtggtgatcagaatagcagttggaacagtcctggaaattttggaggtgggcgtggctttgggcgaggacgagggagagttaggggtcgggaatctggagatttcaatggcagaaatgatcaaggaaattggaagaattcatggggtggtgacaatgctgaaaaatcttcttggaggtctgataatcaggtagacaatgaagctggagattctggtggatataggggacggggaagaggaggaagggggcaatatggaggacgaggaagagggagagacaatggttggagaaatggtgatggaccaaaatggggtggtggagataattggaacgctacaaatccaccaagtaatcagccttggagtagcagtggaggcaccaagtcatatggtcaaaatcagccttccacttggaataatccagaggataacaaaccatctgtaggtgaacaaggtgatccttgggcaagcaaggtgtcttctactgaaggtaaaggacaacagaatgattcttggtcaagtaagatgacttctcgtggtgctgaggataccagcggtggctgggacagcaaggagaagggctcttcctgcaatggtgggggtgaaggactacaaaatgatccatgggcaaacaagattggttctaacgaaggtaaagaacaagaagctgatccttgggccagcaagatgtcttctgctgtgggtgctgatgacaagaatggtacctgggacacgacaacaaagggcactctatctaacgaaaaggctgacgacccttggaatagtaagcggggtaatgatgatgacagcaagaaaactgacgcctggggtgctggctcgtcaggtgggaatcaggaatcttcttggagtaaacctattttctctctgggggatcaggaacctacttggaacaacccaaggtttggtgacgatgacaatgtaaataatagaggtgggtttggacgcggaaatcaaggcagagggagaggaaggagttttggtggtggtggtggtggatcatcatggaatgaaagcaacaaaaacggtgaatcaggtgggggaaggtctggagaaccatggaacagaaggggttttgatggcggcagaggaagaggccgctttgggcgaggtgaccgcaatcaaggcaacaacttggggtcaggagatggtggcagctggggctctggcaggggaaatggtggtggccgtggtggttacaggaactggaacgataacaacgaaagaaggcccttcggtcaaggtggtggctggtctcagtcttccgactggaatgccaacaaaggaagtggcgaaggaaatcaagctttctcgaagagcaagcccagctgggacgcgcagaacgcctctggtggagatgaccaggcaggaaagaagagtgacacagacaactcctggagccagaaccgatcatctccatctatcctgggtcagccaagcggtgatgctaataacaagtctagcgcttgggacggcgctcccaacggaggagctggcaggggaggttcaggttcttggggaaagagcgacgaggatggctggaactcgtcgtcgggaggatcagccagagagaagccttcgtggggtggtggggcagaagctcctcccaggaaggaggacgacggcgcatggggcaaaggcggcgaggggagccggagcctaggaggaggaggagagggtggtagcagcagttcctgggataaaccggcagatggtgcatggagcggcaacaacaagggtggcagtggcagtggtgggtggtaactggtaagcttgcgacttattggcgctgactgcatgtaaatattgtgcccgcgctgtgtgaactgttctggtgcgtgtctagttcgtatcagttacttggccatgcgtactctaaactaaaataaaacatggcttgtgactgtgactagttaaatgtagcctgttgctgacagtaattaggtgccttaactttcagaaactcatttgttagcatcctcgattcctagacctacgaattaaaaaaaatccgacgtgctagcagatgcagcaccatttgcttgtgctggataaaattgtctacctaacagaaacaaccgtgtttctcatgtcatggaccgactgagaccgaccattgttccaacttccaagtgggttttcc

SEQ ID NO: 59918 - DNA, 1451 bp, Zea Mays
gcaattcttccccccccccccaaaaaaaacacacggtgcggcggaaggaagcagccatggcgctcacgcctgtcttgctcctcctgctggcctactgcctctcgggcgtgagctcatctgcaggcccgccgccacgcagcttcacctccctgttcgccctcggggactcgtacatcgacgccggcaacttcgtgaccatggccacgccggtcgctccggtgtgggtcgacaagcctccctacggcatgaccttcttcgaacgcccgacggggcgcttcagcgacggaagggtcatcgtagacttcgtagccgcggcgcttggcgtcccgttcctcccggcttcgctagccaacagctcggacgacgacgtcgcgcgccgcggcggcgtgaacttcgccgtcggcggcgcgacggcggtcgacgtcgccttcttcgagaggagacggctggtgccgttcaagctgctgaacaactcgctggacgtgcagctgggctggttcgaggaactcgagccgtccctttgcaacgccacggcggaaactgcaggttcttatggtggcggacggtgtttcagcagatcgcttttcttggtgggcgagtttggggtcaacgactacaccttcctatggacggcgaacaagacggagtccgaggtgatggcgttcgtgccaagagttgtgagaaccatcgcctcggccgtcgagaggctcatcgtccgcgacggcgcggcgcacgtcgtggtgacggggaacccgccgatcgggtgctcgcccacgctcctcaccctgctccgccggacgagccgccccaccagcgcggcggacgacgacgactacgaccacatcggctgcctgcgcggcgtcaacgacgtggccaggcaccacaacgcgctgctcggcgcggccgtggtcggcctcagggccaggcatccccgggccaccatcgtcttcgccgacttctacaccccgatccgtagaatcctggaaaaccccaaccagggtggtggtcagtgacgtcctgaaggcgtgctgcggcaccggcggcgcctacaactggaacggcagcgccgtgtgcgggatgccgggggtgcccgcgtgcgccaacccgtcggcgtacgtgagctgggacggcgtacacttcacggaggccgtcaaccgctacgttgccgaggggtggctctacgggccctacgctcatccgccgatactcaaagccatgcgacggccctagccgccctacaagcagcagctcagctgctgacaacaaattaaaaagagatcaatataactggctgattaagggtctgtttgtctgtataagctatgtaacagctgttgcgctgagaaaactcaaagctatttggttgaaacaactttcaacaatcaattttgtaacaatatgatgcctgcttggtttctcaaataaaccgattcgacaacataacatcacca

SEQ ID NO: 59919 - DNA, 2200 bp, Zea Mays
agtcgtccgtcgctttccttgtggctcgttcatcgcctccatccaataggccgccccgcctgccttgctctcccagcgcgctcgtgtagtcgtcgccatcttcgcttctcttctccacatttctgcgctatcccggcgtacggctgcgatccatacacgcccaatccaaaccctacctaaaactccgcctcgtgcctccgggctcacactcgtaggcacggagtgccgttccgtggtgggtggaatcaccaaaaatgccctccgtccaccaccacctcctcctcctgacgctcgccgccttggccgtggcggcagccaccgctagcgccggcggggacccgccggcaatcgaggcgcagttcgacgcctggtgcgcggagcacgggaaggcctacgccacgcccgaggagcgcgccgcgcggctggccgtgttcgcggacaacgccgccttcgtcgccgcgcacaacgcccgtgcaggcgccaacgccgctggcggcggcggcggcggcgccgcgcccccgtcctacacgctcgcgctcaacgccttcgcggacctcacgcacgaggagttccgcgccgcgcgcctcggccgcatcgcgccgggggcggcgctccggagccgcgccgcgcccgtgtactggggcctcggcggcggtgccgcggtgcctgatgcgctggactggaggaagagcggggccgtcaccaaggtcaaggaccaaggcagctgcggagcttgttggagtttttccgcaacaggtgctatggaaggaataaacaaaataaagacaggctctctggtcagtctttctgaacaggaactaattgactgtgacagatcttataatagtggctgtggtggtggcctcatggattatgcttataagtttgtgataaaaaatggtggaattgacacagaggaggactacccctatcgtgaagcagatgggacatgtaacaagaacaagctgaaaaagcgagttgtgactattgatggttacactgatgtaccttccaacaaagaagatttgttacttcaggctgttgcccagcaacctgttagtgtaggaatatgtggtagcgctagagcatttcagttatactaccagggtatctttgatggtccatgtccgacatctcttgatcatgctgtgttaatcgttggctatggttctgaaggtggcaaggattactggattgtgaaaaactcttggggtgaaagttggggaatgaagggctatatgcatatgcatcgaaacactggtgattccaagggtgtctgcggtataaacatgatggcatcatttcctaccaaaacaagcccgaatcctcctccttcaccaggcccaggtcctaccaaatgcagtctgctcacatactgtcctgagggatccacctgttgttgctcatggcgtgtcttgggcttttgcctttcctggagctgttgcgaactggacaatgcagtttgctgcaaggataaccggccagcggcaacttctctgctatagaaggaatcaggaggaaacagtctttctctaaagctccctcgtggactggctggctggagttgatggaccaatgagcgtataatcagacatggatagtagcttcatgcaagttgtgcgatccgtaggtcggtcattggccttgttccagtgccctgccacattcctgtacgcctactgcccgctgcgttgcaccgagatgcccttattttctctttattattgaaccctatggtgtaaagtttcacgattgtacatgtatgtcacacttgtattggcctatgcattagacgtctccattagtttacctatatgatcatctaaaatattgttttgcagtttttatactgtagagtgaagtttgaatataaaaatgaggatggtgctggatatagccttataggcgcgccctgcagattatttgccgcggttgagcttttgagggccaggccgcatatatattaatagaggactttgtgtaatgtttcatggctatatggtacagaaggatgcatctagcgcaggtcaatgtggtagtatcatacgctgttttggtacgacgagcaactaggaattcgttttcgtgtacacgttaaacatacttatattgtatcataaacaggcgagtaaggcgtaggcatagggcggcctagacatgttggtttttacaatgataattaattttagtgacttgggaa

SEQ ID NO: 59920 - DNA, 2087 bp, Zea Mays
agtcgtccgtcgctttccttgtggctcgttcatcgcctccatccaataggccgccccgcctgccttgctctcccagcgcgctcgtgtagtcgtcgccatcttcgcttctcttctccacatttctgcgctatcccggcgtacggctgcgatccatacacgcccaatccaaaccctacctaaaactccgcctcgtgcctccgggctcacactcgtaggcacggagtgccgttccgtggtgggtggaatcaccaaaaatgccctccgtccaccaccacctcctcctcctgacgctcgccgccttggccgtggcggcagccaccgctagcgccggcggggacccgccggcaatcgaggcgcagttcgacgcctggtgcgcggagcacgggaaggcctacgccacgcccgaggagcgcgccgcgcggctggccgtgttcgcggacaacgccgccttcgtcgccgcgcacaacgcccgtgcaggcgccaacgccgctggcggcggcggcggcggcgccgcgcccccgtcctacacgctcgcgctcaacgccttcgcggacctcacgcacgaggagttccgcgccgcgcgcctcggccgcatcgcgccgggggcggcgctccggagccgcgccgcgcccgtgtactggggcctcggcggcggtgccgcggtgcctgatgcgctggactggaggaagagcggggccgtcaccaaggtcaaggaccaaggcagctgcggagcttgttggagtttttccgcaacaggtgctatggaaggaataaacaaaataaagacaggctctctggtcagtctttctgaacaggaactaattgactgtgacagatcttataatagtggctgtggtggtggcctcatggattatgcttataagtttgtgataaaaaatggtggaattgacacagaggaggactacccctatcgtgaagcagatgggacatgtaacaagaacaagctgaaaaagcgagttgtgactattgatggttacactgatgtaccttccaacaaagaagatttgttacttcaggctgttgcccagcaacctgttagtgtaggaatatgtggtagcgctagagcatttcagttatactaccagggtatctttgatggtccatgtccgacatctcttgatcatgctgtgttaatcgttggctatggttctgaaggtggcaaggattactggattgtgaaaaactcttggggtgaaagttggggaatgaagggctatatgcatatgcatcgaaacactggtgattccaagggtgtctgcggtataaacatgatggcatcatttcctaccaaaacaagcccgaatcctcctccttcaccaggcccaggtcctaccaaatgcagtctgctcacatactgtcctgagggatccacctgttgttgctcatggcgtgtcttgggcttttgcctttcctggagctgttgcgaactggacaatgcagtttgctgcaaggataaccggtactgctgccctcatgactatcctgtttgtgatacaggtcgcgggcagtgtctcaaggccagcggcaacttctctgctatagaaggaatcaggaggaaacagtctttctctaaagctccctcgtggactggctggctggagttgatggaccaatgagcgtataatcagacatggatagtagcttcatgcaagttgtgcgatccgtaggtcggtcattggccttgttccagtgccctgccacattccttttttatactgtagagtgaagtttgaatataaaaatgaggatggtgctggatatagccttataggcgcgccctgcagattatttgccgcggttgagcttttgagggccaggccgcatatatattaatagaggactttgtgtaatgtttcatggctatatggtacagaaggatgcatctagcgcaggtcaatgtggtagtatcatacgctgttttggtacgacgagcaactaggaattcgttttcgtgtacacgttaaacatacttatattgtatcataaacaggcgagtaaggcgtaggcatagggcggcctagacatgttggtttttacaatgataattaattttagtgacttgggaa

SEQ ID NO: 59921 - DNA, 1636 bp, Zea Mays
gttcagtgagtactcacatgtaggtgcatgctcttcaaaaaccttactggctgctatcccaagcaggattttcaacgaccaaggctttggaggcctactcttgtcaggagcttgttggagtttttccgcaacaggtgctatggaaggaataaacaaaataaagacaggctctctggtcagtctttctgaacaggaactaattgactgtgacagatcttataatagtggctgtggtggtggcctcatggattatgcttataagtttgtgataaaaaatggtggaattgacacagaggaggactacccctatcgtgaagcagatgggacatgtaacaagaacaagctgaaaaagcgagttgtgactattgatggttacactgatgtaccttccaacaaagaagatttgttacttcaggctgttgcccagcaacctgttagtgtaggaatatgtggtagcgctagagcatttcagttatactaccagggtatctttgatggtccatgtccgacatctcttgatcatgctgtgttaatcgttggctatggttctgaaggtggcaaggattactggattgtgaaaaactcttggggtgaaagttggggaatgaagggctatatgcatatgcatcgaaacactggtgattccaagggtgtctgcggtataaacatgatggcatcatttcctaccaaaacaagcccgaatcctcctccttcaccaggcccaggtcctaccaaatgcagtctgctcacatactgtcctgagggatccacctgttgttgctcatggcgtgtcttgggcttttgcctttcctggagctgttgcgaactggacaatgcagtttgctgcaaggataaccggtactgctgccctcatgactatcctgtttgtgatacaggtcgcgggcagtgtctcaaggccagcggcaacttctctgctatagaaggaatcaggaggaaacagtctttctctaaagctccctcgtggactggctggctggagttgatggaccaatgagcgtataatcagacatggatagtagcttcatgcaagttgtgcgatccgtaggtcggtcattggccttgttccagtgccctgccacattcctgtacgcctactgcccgctgcgttgcaccgagatgcccttattttctctttattattgaaccctatggtgtaaagtttcacgattgtacatgtatgtcacacttgtattggcctatgcattagacgtctccattagtttacctatatgatcatctaaaatattgttttgcagtttttatactgtagagtgaagtttgaatataaaaatgaggatggtgctggatatagccttataggcgcgccctgcagattatttgccgcggttgagcttttgagggccaggccgcatatatattaatagaggactttgtgtaatgtttcatggctatatggtacagaaggatgcatctagcgcaggtcaatgtggtagtatcatacgctgttttggtacgacgagcaactaggaattcgttttcgtgtacacgttaaacatacttatattgtatcataaacaggcgagtaaggcgtaggcatagggcggcctagacatgttggtttttacaatgataattaattttagtgacttgggaa

SEQ ID NO: 59922 - DNA, 3216 bp, Zea Mays
gtccgacgcttcgcttacgccttcgggcgagcggcgctgctctcccgttcataatggtgaggtctgacggaaatcgagatcccaaccaaattcgttttttttagcgtgggagaagcgcggcgccaagacggcattgagctcgtcggcggcgctttcgaaagctggagcacgcgaagagcacattgccagaactagggttcaacaaattactttccatgatgtcagcgtgtccactgcttgaaccgaaatcaagattagaccggtgaagtgcaagcaaaagaaccccttctggaagatggaatcaagaacccaccgagttacatttgctagggaatcttgcaaaggccggtgtggcccgggattggagatcggtgaaaggcgaatatgaggggctggaaacagaccgacaatcgcttcgtgaaaactgtgcgcgtgaattggctccagtaggtcagagaatccagttccctcgttttcttccaggtctcctcaaccgttaacactgcctcctgcttgcgtgttgcgatgactagtggctggtttggcactggcgtcctttactttagtcatcctataaattggcaggggcatgcttcttcttgtcttattaaactcacaacacggtagcagggggtggtagtagaaggcataagctctgttctctgaccctcaagtgtttgagcctatttgcgcaacgaaaaaatggtactttctattgttcgtttgtttgtaagcttgtatgtgtgcgtgcacacacatatttctatgtttgttttccaaaacatatttgtgtccataatgaacttgcaagtatgcatagaaccttaaaaatgccatcgtataattatgcagaatagttgggatcacagcacatgacaaacaatttggagttttcatttgccagtgttggtaattggacgcttttggacctttttttggaaatcttagaacctggaacaggacttgcatccaatgacgcttttttacttccatgaaaaacttgccgactgaatgtgatagcagcacttcgattttgctagatatgaatttaagttgaagttaaaaacacaacggtttttgtgatatatcatatagtttttagaattctagttctattaccatggcctaacaaaaaaaattgtgatttatgtccactagagcatcaaaagcattaatggaaagagccccatagtggttggaccttggggagggacaggagggtacccttgggatgacggcgtgtactcaacaatacgccagatcgtgattggccatggtgcagctattgactcaataaggattgaatatgatctgaaaggaaggtcggtttggtcagaaacgcatggaggtactgatggtggctccgaaacagataaggtgaaactagattttccagatgaagtcctcgtgtctgtaagtggacactacggatctgtctgcgggacaccggtcatcataagatcgttgacgtttcagagcaacagctcgacgtacggacccttcggcaccgaggatggcacacctttctcactcccagttagcagtggcaagatcattggattccacgggcggtctgggtcgtatctcaactcaatcggtttctacctgaagcaggtgcattttccaactccagtgaatccttctccagcttcacctctgagcctcccgagtccacaaagtagaaacagcgcctatggcctcaccggtggcgacgctagacctgacatggttctcgccgtgcgagacagaggagacagctatgctgtctacgcgagcaatcaccccaaacagcagtacacaaacccgtcaccggacggagcaatctggaacaagatggtttctgtccccagttactacggagatactacaggagctgcagccgtgggcggcagccctcagacctatggcccctggggtgggagcggcggcaccatatttgacgacggcgtgtacactggcgtgtggcagatcaacttgacgcgcgcagtgggaatctcttctatcaaggttctgtatgatcggaacgggcaggccgtgtggggtaacaagcatggtttcagcagcggtgtcataccagacaagataatattcgacttcccgtcagaggtgctgactcacataaccgggttctacgattcagcaataatcatgggcccgaccgtggtcaggtctctgacgtttcacacgaacaagcggacgtacgggccgtacggcgatgagtacggcacgtacttctccacgagctttaccaatggaaggatagtggggtttcatggccgggaggggtggtacatcgacggcattggagtccatgttcaggaaggcaaggtggcgcagcagcggtttgttagcagaccgaagactccgactagcccattggtgcattacaacatgctcgcccaggcgccgagtgctacttacacggacggcgaggttgcttatggcatggtgaaagaaccggtcccgatgggaccagggccatggggtggggagggaggtcgggcatgggacgacggggtttacactggcgtgaagcagatctacgtcatgagaggagcgttcatcgggtcgatacagatcgagtatgacaggagcggccactccatctggtcttcaaggcacgggaacagcggccacatcacccacagggtgaagctggacttcccgcacgaagtgctgacgtgcgtgtacggctactacaacacgagcaaggaggacgggccccgggtcctgaggtcgctgacgttcctcaccaacaggggcaagtacgggccgttcggcgacgagttcggcgcctacttctcgtcggcgacgacggaggggaaggtggtggggttccacggccgcagcggccagcacctggacgccatcggcgtgcacatgcagcactggctcggggacaggaggcctgcccccaagtacgtgctgtccaagtacctgttctgattcatcacctggctgctcgggttacacgtatctaattttgggcgggtggattctaattacttgtatcatcaccatttattggttcggggcatactcatgcttgatttcgtatcgattaattgaaaagaagtacatcatctctctctctctctctctctgttgaatttcaagacattctttgtcagttatgatgcccaaatattcattgtgcctctgcttgttatggacgcagtacgcagatgcagggtgctccatctttttacgagttct

SEQ ID NO: 59923 - DNA, 2508 bp, Zea Mays
gtccgacgcttcgcttacgccttcgggcgagcggcgctgctctcccgttcataatggtgaggtctgacggaaatcgagatcccaaccaaattcgttttttttagcgtgggagaagcgcggcgccaagacggcattgagctcgtcggcggcgctttcgaaagctggagcacgcgaagagcacattgccagaactagggttcaacaaattactttccatgatgtcagcgtgtccactgcttgaaccgaaatcaagattagaccggtgaagtgcaagcaaaagaaccccttctggaagatggaatcaagaacccaccgagttacatttgctagggaatcttgcaaaggccggtgtggcccgggattggagatcggtgaaaggcgaatatgaggggctggaaacagaccgacaatcgcttcgtgaaaactgtgcgcgtgaattggctccagtagagcatcaaaagcattaatggaaagagccccatagtggttggaccttggggagggacaggagggtacccttgggatgacggcgtgtactcaacaatacgccagatcgtgattggccatggtgcagctattgactcaataaggattgaatatgatctgaaaggaaggtcggtttggtcagaaacgcatggaggtactgatggtggctccgaaacagataaggtgaaactagattttccagatgaagtcctcgtgtctgtaagtggacactacggatctgtctgcgggacaccggtcatcataagatcgttgacgtttcagagcaacagctcgacgtacggacccttcggcaccgaggatggcacacctttctcactcccagttagcagtggcaagatcattggattccacgggcggtctgggtcgtatctcaactcaatcggtttctacctgaagcaggtgcattttccaactccagtgaatccttctccagcttcacctctgagcctcccgagtccacaaagtagaaacagcgcctatggcctcaccggtggcgacgctagacctgacatggttctcgccgtgcgagacagaggagacagctatgctgtctacgcgagcaatcaccccaaacagcagtacacaaacccgtcaccggacggagcaatctggaacaagatggtttctgtccccagttactacggagatactacaggagctgcagccgtgggcggcagccctcagacctatggcccctggggtgggagcggcggcaccatatttgacgacggcgtgtacactggcgtgtggcagatcaacttgacgcgcgcagtgggaatctcttctatcaaggttctgtatgatcggaacgggcaggccgtgtggggtaacaagcatggtttcagcagcggtgtcataccagacaagataatattcgacttcccgtcagaggtgctgactcacataaccgggttctacgattcagcaataatcatgggcccgaccgtggtcaggtctctgacgtttcacacgaacaagcggacgtacgggccgtacggcgatgagtacggcacgtacttctccacgagctttaccaatggaaggatagtggggtttcatggccgggaggggtggtacatcgacggcattggagtccatgttcaggaaggcaaggtggcgcagcagcggtttgttagcagaccgaagactccgactagcccattggtgcattacaacatgctcgcccaggcgccgagtgctacttacacggacggcgaggttgcttatggcatggtgaaagaaccggtcccgatgggaccagggccatggggtggggagggaggtcgggcatgggacgacggggtttacactggcgtgaagcagatctacgtcatgagaggagcgttcatcgggtcgatacagatcgagtatgacaggagcggccactccatctggtcttcaaggcacgggaacagcggccacatcacccacagggtgaagctggacttcccgcacgaagtgctgacgtgcgtgtacggctactacaacacgagcaaggaggacgggccccgggtcctgaggtcgctgacgttcctcaccaacaggggcaagtacgggccgttcggcgacgagttcggcgcctacttctcgtcggcgacgacggaggggaaggtggtggggttccacggccgcagcggccagcacctggacgccatcggcgtgcacatgcagcactggctcggggacaggaggcctgcccccaagtacgtgctgtccaagtacctgttctgattcatcacctggctgctcgggttacacgtatctaattttgggcgggtggattctaattacttgtatcatcaccatttattggttcggggcatactcatgcttgatttcgtatcgattaattgaaaagaagtacatcatctctctctctctctctctctgttgaatttcaagacattctttgtcagttatgatgcccaaatattcattgtgcctctgcttgttatggacgcagtacgcagatgcagggtgctccatctttttacgagttct

SEQ ID NO: 59924 - DNA, 2167 bp, Zea Mays
attaaactcacaacacggtagcagggggtggtagtagaaggcataagctctgttctctgaccctcaagtgtttgagcctatttgcgcaacgaaaaaatgagcatcaaaagcattaatggaaagagccccatagtggttggaccttggggagggacaggagggtacccttgggatgacggcgtgtactcaacaatacgccagatcgtgattggccatggtgcagctattgactcaataaggattgaatatgatctgaaaggaaggtcggtttggtcagaaacgcatggaggtactgatggtggctccgaaacagataaggtgaaactagattttccagatgaagtcctcgtgtctgtaagtggacactacggatctgtctgcgggacaccggtcatcataagatcgttgacgtttcagagcaacagctcgacgtacggacccttcggcaccgaggatggcacacctttctcactcccagttagcagtggcaagatcattggattccacgggcggtctgggtcgtatctcaactcaatcggtttctacctgaagcaggtgcattttccaactccagtgaatccttctccagcttcacctctgagcctcccgagtccacaaagtagaaacagcgcctatggcctcaccggtggcgacgctagacctgacatggttctcgccgtgcgagacagaggagacagctatgctgtctacgcgagcaatcaccccaaacagcagtacacaaacccgtcaccggacggagcaatctggaacaaggtgtgacaaaatggtttctgtccccagttactacggagatactacaggagctgcagccgtgggcggcagccctcagacctatggcccctggggtgggagcggcggcaccatatttgacgacggcgtgtacactggcgtgtggcagatcaacttgacgcgcgcagtgggaatctcttctatcaaggttctgtatgatcggaacgggcaggccgtgtggggtaacaagcatggtttcagcagcggtgtcataccagacaagataatattcgacttcccgtcagaggtgctgactcacataaccgggttctacgattcagcaataatcatgggcccgaccgtggtcaggtctctgacgtttcacacgaacaagcggacgtacgggccgtacggcgatgagtacggcacgtacttctccacgagctttaccaatggaaggatagtggggtttcatggccgggaggggtggtacatcgacggcattggagtccatgttcaggaaggcaaggtggcgcagcagcggtttgttagcagaccgaagactccgactagcccattggtgcattacaacatgctcgcccaggcgccgagtgctacttacacggacggcgaggttgcttatggcatggtgaaagaaccggtcccgatgggaccagggccatggggtggggagggaggtcgggcatgggacgacggggtttacactggcgtgaagcagatctacgtcatgagaggagcgttcatcgggtcgatacagatcgagtatgacaggagcggccactccatctggtcttcaaggcacgggaacagcggccacatcacccacagggtgaagctggacttcccgcacgaagtgctgacgtgcgtgtacggctactacaacacgagcaaggaggacgggccccgggtcctgaggtcgctgacgttcctcaccaacaggggcaagtacgggccgttcggcgacgagttcggcgcctacttctcgtcggcgacgacggaggggaaggtggtggggttccacggccgcagcggccagcacctggacgccatcggcgtgcacatgcagcactggctcggggacaggaggcctgcccccaagtacgtgctgtccaagtacctgttctgattcatcacctggctgctcgggttacacgtatctaattttgggcgggtggattctaattacttgtatcatcaccatttattggttcggggcatactcatgcttgatttcgtatcgattaattgaaaagaagtacatcatctctctctctctctctctctgttgaatttcaagacattctttgtcagttatgatgcccaaatattcattgtgcctctgcttgttatggacgcagtacgcagatgcagggtgctccatctttttacgagttct

SEQ ID NO: 59925 - DNA, 1855 bp, Zea Mays
cagggtgcgaactattggtgcgcatctactcgcgggcaaggacatcaacatcatggagcctcgcgttgtcattttactagtgttttaggcagggaagagaactgcaggcttctgcgttcccggtgtgagtgaagggaaaaccatgccagcctttctcatgtcaaaccaaaactcctccaattctcaagcgccacttcagttcaaggataccatgctccaagcattcagcaaaacaaccgcagcacagagcatctcatctggacacaatgcagatgagctgatagcctgcccggtgccagcaaaacacactgcaacccaaagttagtatgtctctattaggtaaggtaaaataggggacgcataactataaatgacaatgtttgtagagtgaagtttgaaatagaagatacgatagaggatctgctctgctggagatagcattagagccaacatatcaagcacacataaaatccaatttcagatatgcaaggacctgctatttcttccaagaaaatttatggagcttttctgcatcttcaaaacaagagtacagtctgttggataagtgatagtgatctcaggcccatggaataggtatgcgccaaagagtcatcaacttcttccccacctgagtcctagatgacctctacttccgactaccgatggcggactaccctgaagatcacgattagtcatcaatccactaacgcgttcgagatcctgtggcttactccctaatttctctaacacaggcttctgctgctagtgcgctgctcaagatacaatgggcctgggcagatcacgaaatttcaaccatcgatcagagcaaggcaaaacaatccagaggaaaaaagacaagctgtccaatttctccagacaagtagcaacctagtccagagggacgaggcccccaattgttcccccctggctgctggtatctactgtctccctccctctctgccttgctatcgccttccagctctatttctatgcctctgccggttcgcagggccttagctttcatgagcactggagatggacatcgagtcggtgaggtgcgcctgctgtagcctcagagaggactgcacccaggaatacatagacaatgtcaagggcagctttggggggagatggctctgtggcttgtgctccgaggctgtaagggatgagctcagcaaacacaggaccggccagggtagagttgaagaggctgtcaaggctcacatggaattctgcaggatgacgctgtcaagcccagctgtccgggtagccgatggcatgaaggagatgctcaggaggaggtcaggggacaagaggaggccagcaacgccatcaaaagcacacccagcatagcaaggtaggtaagggctgtcgacagagatgcttctagtcgccttaaggtcagtgcatcgatgtgggagcctctcaaatctactaaatgtatgtgtcctactataagtatattgtatttatatataatacaggcagcatgtcaactgtaaatatgagcgatattattaatccgaggtttcatgatcactacatgaatcaagtgccgtccacaggagatacatctaccttattttctgtttttagtttcttatttcctgcatttgtttccttcagatctagttggtgattttgtttcttttcctcaatttatttattctggtaatttgtttccacgagtcaattcttactattcagttctaatggtgtgaagagtgaacagtagcttcacttgattaatcgtaaggtacttgaagatagtactggaaacaaagggtacttctttttttactaaaagaaagccaacatgaggatcaaggaggcctagataatgagttaatgacag

SEQ ID NO: 59926 - DNA, 2720 bp, Zea Mays
aatcagactcctcgtttccctccctatcctctctcgtcacgccgttgtcgtcccgttgctcgattcgaaggcgcgacccttcgccatcgctcttgcctcgccttgccggcggcgccaatacccgtgctcgcgtcggagcgcccaacttccccacggtggccgttccgccgcggcgcacgcaggtgggcgatgcggtcggatgagtgggcggcggcggcggcggcggcagtgtttcgtggaaaggaggaggaggggggccttgtgctttcccgcggcgttgctgtctccgccgcatacgcccctcggagccggtgatggccccgaccgcggagtcgtcttccccgccgccgcaacggcgcccccgcacgggcccacccccggggctgaagaacctcagcaatacctgctacctcaactgcgtcctacagtgcctcgcgtccacgccgcccctcgccacgttctgccttgcctctggccactccgacatttgcaagaaggtgtccccgaatagggacaaggagtgcgcgttctgcgtgcttgagcggcagatcgcccggctgcttcgggcagatgctggggcgctcgattccccagcaaaggtaatccgctgcatgcccctattcgctgagcacttcaggtgggggcgccaggaggatgcgcacgagttcctccgctatgtggtagatgcctgtcacactgctggcctccgcacgcgcaagctgctactcgctaaaggtgccaatggtaactgtggtgaggatggcagggggcagggggcatgtctggttatgagggagacatttggtggggcattgctgagtcaagtgaaatgccttgtgtgcaacagagagtctaacaagactgatgaaataatggacatcagtctcgatctgcctgggagcagttctgttgctgatgcccttgcccgcttctttaagccggagatattggaaggtgcaaacaaatatagttgtgaaagatgtaaaacgctcacctcagcgcagaagcaaatgtttatgctgagggcacctaaggtgcttgtcatacaactcaagaggtttgaggggataaatggtggaaagatcaacaggaatatagaattcaaggagacacttggtatttctgattgcatgtacaataaaagccaggtaaaacatcaaatttcgattgcttattctttggtttttttcttaggcatgcaaacttctgtggatgcaaaaactatctgtgaaaccaattatttagctgtggtaggttgctcattgatatgaaaccacatgttaactgccatcaatttctagtttgtttaaggacattgtttccagttatgtggatcaaacttctttaaggtaatcacagcaactatcaaatcacgatcctttaataacgtaagttccaattaactgataaacttaaatggatatgaactagtttatggtaacttaatttaatagtatgtgatatcacttcaggggtttctgttggagctagtggttaattgttgagctaactactttttaggttagacctttatttgtagttgtatttagtccttgcatatgaggcctactcgtctgacattcgagttgcgaaccttttttagcactaaaatgggtctcctgaatgagaaaagataccattgccatactattctaatttgatgggcgaagctagctttccagctccgaagtcctaccgaactcttgtctttgctggacaatgcgagttaagggctagcatgggaatcaagcatgccctaatctctgtcctccattttgatataactagcagctatcaccgcttttgttttcgagctatttgtgagcatctttttgtgcaaccagtttgctgctactatcacaaacaccgcccatttgtagatatatgatgtttgaacatcaatacagttttcaatatgcataaatccaatggtactaccaacacacagttttgtttaaagcattggtcaaagttagaaagctttgactttgtgctttctacataaaacatctatggacagtcagaataagtgacaatcttcaatttgctaattgtgcacttctttatgtcttagcaaagtattccttcttcctgtctttgttaaacgcattactcagacaaagtgtgtaacaatgatcagcgcgcttggttgcggaggctaattttgcctcaggtcatacgcacatgctgcttcatttccctggctgatttaatatgctgctccttctcccatggtgcgattggccaatcctatgttggtagtagcaggatggtacatttttgtggtcgatttaatgcacatcacaactgcacaagtcattcttgtaagtagttgaagtaatggagaacaggcctgatttgtttttccttggtctttgtgttttatgcttagagcaactccaacagaatccataaagtaacccgtaaaatgtttattagggaaaaagcccactttgagccctccaacaattcccccttctttcccccaatatcttcgcgtcgccaatatccagctttctctcctccaaatatccgtgtcctgtattcctccccaatcccctcagcgcgcgggcatctagctgcttccctcgttttttcctcgcgcgtatttttgttggtggctgaacgacgagaagcgtaagtggcgacgagaaacttgagcggcagagagggagcaccagccccgagagaaagcaaccctgctggtggacgaccaaggc

SEQ ID NO: 59927 - DNA, 1728 bp, Zea Mays
aatcagactcctcgtttccctccctatcctctctcgtcacgccgttgtcgtcccgttgctcgattcgaaggcgcgacccttcgccatcgctcttgcctcgccttgccggcggcgccaatacccgtgctcgcgtcggagcgcccaacttccccacggtggccgttccgccgcggcgcacgcaggtgggcgatgcggtcggatgagtgggcggcggcggcggcggcggcagtgtttcgtggaaaggaggaggaggggggccttgtgctttcccgcggcgttgctgtctccgccgcatacgcccctcggagccggtgatggccccgaccgcggagtcgtcttccccgccgccgcaacggcgcccccgcacgggcccacccccggggctgaagaacctcagcaatacctgctacctcaactgcgtcctacagtgcctcgcgtccacgccgcccctcgccacgttctgccttgcctctggccactccgacatttgcaagaaggtgtccccgaatagggacaaggagtgcgcgttctgcgtgcttgagcggcagatcgcccggctgcttcgggcagatgctggggcgctcgattccccagcaaaggtaatccgctgcatgcccctattcgctgagcacttcaggtgggggcgccaggaggatgcgcacgagttcctccgctatgtggtagatgcctgtcacactgctggcctccgcacgcgcaagctgctactcgctaaaggtgccaatggtaactgtggtgaggatggcagggggcagggggcatgtctggttatgagggagacatttggtggggcattgctgagtcaagtgaaatgccttgtgtgcaacagagagtctaacaagactgatgaaataatggacatcagtctcgatctgcctgggagcagttctgttgctgatgcccttgcccgcttctttaagccggagatattggaaggtgcaaacaaatatagttgtgaaagatgtaaaacgctcacctcagcgcagaagcaaatgtttatgctgagggcacctaaggtgcttgtcatacaactcaagaggtttgaggggataaatggtggaaagatcaacaggaatatagaattcaaggagacacttggtatttctgattgcatgtacaataaaagccagcgcgcttggttgcggaggctaattttgcctcaggtcatacgcacatgctgcttcatttccctggctgatttaatatgctgctccttctcccatggtgcgattggccaatcctatgttggtagtagcaggatggtacatttttgtggtcgatttaatgcacatcacaactgcacaagtcattcttgtaagtagttgaagtaatggagaacaggcctgatttgtttttccttggtctttgtgttttatgcttagagcaactccaacagaatccataaagtaacccgtaaaatgtttattagggaaaaagcccactttgagccctccaacaattcccccttctttcccccaatatcttcgcgtcgccaatatccagctttctctcctccaaatatccgtgtcctgtattcctccccaatcccctcagcgcgcgggcatctagctgcttccctcgttttttcctcgcgcgtatttttgttggtggctgaacgacgagaagcgtaagtggcgacgagaaacttgagcggcagagagggagcaccagccccgagagaaagcaaccctgctggtggacgaccaaggc

SEQ ID NO: 59928 - DNA, 426 bp, Zea Mays
accactcgcagcttaaaccccccatttgtgtagaacgactcagggatgcttcctgaatcgtcacattcatcaggctcggtgtggccactgtcatcagagggagcggcgctcggactatctgagccagctgaggagggggagggcgacggcgaggctgaggatgctccaaggatgacgcagctgcccagtgtggacccgaagtcagccttccacttgagcatcacgccatcgtccatgccgagctcgcccgctgggagctcgatgcgaaggtggcggagctccttgaaggaacggagcacctccgatggcgagtggtgcgacacgtccccagcaggcagtggcgaggaggaggacgacgacgacgatagcgacgaagcggcggatgccggaaagccggaggcggagttggcgggtgagaggatctga

SEQ ID NO: 59929 - DNA, 123 bp, Zea Mays
ctcattgcatcaaaatcttgagtaacgtctgaacttagaagtcgacgcctcttttgcgagcgcataaaattatagacatcatccatccatacagacagccgaagctcagaagaagctgactta

SEQ ID NO: 59930 - DNA, 2117 bp, Zea Mays
ctctctttcgatcctagaggctagaccctctctcgcgcacacgctctctcctctcttcacacggtttttgcctcgcaaacgaaaagacaccaacccgggcccggagggtcaagtggagagcaggggaggaggggagaggaaagggaaaagcgggtcgcgagtcgcgactcgcgagtgcccgcttttgctccaatccaatcggtgccgcctcgggcgagatccgctccgcgtgccccgccgctgccgaggcgctggatgttggagagaaaattacaagatgccgaagttcctgtagaagagcaaaataacattcttaagcatttggagaaaaaagagactgaatatatgcgcttgcagagacacaagatgggagttgaagattttgaacttttgactattattgggagaggtgcattcggagaggtgcgtcttgtagagagaaggtctctaagaatgtttatgcaatgaaaaagctcaagaaatctgaaatgcttcgtaggggccaggtagaacatgtcaaagctgaaaggaaccttcttgctgaagttgatagtgcttacatagttaagctctattattctttccaagacgaagagttcttatatctcatcatggaataccttcctggtggagacatgatgactttacttatgcgcaaagacacactaacagaagatgaagctagattttatattgcagaaactgtgcttgccatcgagtctattcacaagcacaactatgttcatcgtaatttccctaatttgaatgaaccagattatatgtctggaaaagttaccacacctttgcctgataccactcggttaagcaacccttctgcaccgaggcgtacacagcaggagcaattgtcacactggcaaaagaaccgtcggatgttggcatactcaacagtcggtacacctgattatattgctccagaagtgctactgaagaaaggatatggaacggagtgtgactggtggtcccttggtgctattatgtatgaaatgctagttggttaccctccattttattcagaggacccaatgtctacttgcagaaagattgtgaactggagaagtcacttgaaattccctgaagaggcaaagcttcctcctgaagctaaggctctcatcagcaagcttttgtgtaatgttgagcatcgacttggtacaaaaggagcccatgaaataaaagcgcatccatggttcggaggtgttcagtgggagaagttgtatcagatgaaagctgctttcataccagaagttaatggagagttggatactcagaattttgagaatttcgaggagattggaactcaaattcaaagttcatccaagtcaggcccttggagaaagatgcttccatccaaagatgcaaactttgttgggtatacgtacaagaactttgaaattgtgaatgatgatgaagtggcaggaattgcagagttgaagaaaaagagttccaaaccaaagcgaccaaccatcaagacaatgtttgagaggatggacgaagaggagcctgttcaagggagtttcttaagtatgttgcccccggagggccaaccttcgtcccactccagcgttccacaggaaaaataccaacctcgccgtaaataggatatggaggtttggaaagtaaagcataggaaagtaaaacaagaaaaaaaatcgtctgctgccttttgatctgttccctgtctaggttttgtaaatcctaaccaatgcgttctttagtcaaatgcttaaaaaaatctctccggcaaaatagtgtattgcatttgatgtgaacatcagtgttcggctgtatattgtgtcaccgttctaacttcgaagtgatgcttctcagccatattggcaaaaacttgccataccaggagcaggcaagttgtgctgctgtgggcctgtggcaagcatgggctatgtgtatgacctttagatgtttctttggggtcatggttcataggagcttgatcaacttgcacttgtagcatactccctctatacccaaaagctcctatgaattgagggactgcattcttttcggacagattttgacttacctgggattaaaacccactcaatccctctcaattcatatggattggagttgaatcgaac

SEQ ID NO: 59931 - DNA, 2597 bp, Zea Mays
ctctctttcgatcctagaggctagaccctctctcgcgcacacgctctctcctctcttcacacggtttttgcctcgcaaacgaaaagacaccaacccgggcccggagggtcaagtggagagcaggggaggaggggagaggaaagggaaaagcgggtcgcgagtcgcgactcgcgagtgcccgcttttgctccaatccaatcggtgccgcctcgggcgagatccgctccgcgtgccccgccgctgccgagatagagggtgtcgtccccactccccagcatctggttccacggagagttgttgatcttggatacctgatccgcaatttggggctgattgagtcacttgaccttttcaacatctgccccgttcctgctgccttgctcactataagaggctggcctggttccagagatgattctattgtgagtggagatggattctgtgagaagttggttccagaagttccagccgagagacaaatcgaagaggccagtggtggctgccagacatggaaaagatccaggaaagcccccgatggacgatgccccttctagtgcgacgaaacagagggttgccgctgcaaaacagtacattgagaaccactacaagacccagatgaagtccctgcaagataggaaagagaggcgctggatgttggagagaaaattacaagatgccgaagttcctgtagaagagcaaaataacattcttaagcatttggagaaaaaagagactgaatatatgcgcttgcagagacacaagatgggagttgaagattttgaacttttgactattattgggagaggtgcattcggagaggtgcgtcttgtagagagaaggtctctaagaatgtttatgcaatgaaaaagctcaagaaatctgaaatgcttcgtaggggccaggtagaacatgtcaaagctgaaaggaaccttcttgctgaagttgatagtgcttacatagttaagctctattattctttccaagacgaagagttcttatatctcatcatggaataccttcctggtggagacatgatgactttacttatgcgcaaagacacactaacagaagatgaagctagattttatattgcagaaactgtgcttgccatcgagtctattcacaagcacaactatgttcatcgggatatcaaaccagataatcttttgttagatcacagtggtcacctgaagctttctgacttcggtttgtgtaaacctttggacagcagtaatttccctaatttgaatgaaccagattatatgtctggaaaagttaccacacctttgcctgataccactcggttaagcaacccttctgcaccgaggcgtacacagcaggagcaattgtcacactggcaaaagaaccgtcggatgttggcatactcaacagtcggtacacctgattatattgctccagaagtgctactgaagaaaggatatggaacggagtgtgactggtggtcccttggtgctattatgtatgaaatgctagttggttaccctccattttattcagaggacccaatgtctacttgcagaaagattgtgaactggagaagtcacttgaaattccctgaagaggcaaagcttcctcctgaagctaaggctctcatcagcaagcttttgtgtaatgttgagcatcgacttggtacaaaaggagcccatgaaataaaagcgcatccatggttcggaggtgttcagtgggagaagttgtatcagatgaaagctgctttcataccagaagttaatggagagttggatactcagaattttgagaatttcgaggagattggaactcaaattcaaagttcatccaagtcaggcccttggagaaagatgcttccatccaaagatgcaaactttgttgggtatacgtacaagaactttgaaattgtgaatgatgatgaagtggcaggaattgagttgaagaaaaagagttccaaaccaaagcgaccaaccatcaagacaatgtttgagaggatggacgaagaggagcctgttcaagggagtttcttaagtatgttgcccccggagggccaaccttcgtcccactccagcgttccacaggaaaaataccaacctcgccgtaaataggatatggaggtttggaaagtaaagcataggaaagtaaaacaagaaaaaaaatcgtctgctgccttttgatctgttccctgtctaggttttgtaaatcctaaccaatgcgttctttagtcaaatgcttaaaaaaatctctccggcaaaatagtgtattgcatttgatgtgaacatcagtgttcggctgtatattgtgtcaccgttctaacttcgaagtgatgcttctcagccatattggcaaaaacttgccataccaggagcaggcaagttgtgctgctgtgggcctgtggcaagcatgggctatgtgtatgacctttagatgtttctttggggtcatggttcataggagcttgatcaacttgcacttgtagcatactccctctatacccaaaagctcctatgaattgagggactgcattcttttcggacagattttgacttacctgggattaaaacccactcaatccctctcaattcatatggattggagttgaatcgaac

SEQ ID NO: 59932 - DNA, 2516 bp, Zea Mays
ctctctttcgatcctagaggctagaccctctctcgcgcacacgctctctcctctcttcacacggtttttgcctcgcaaacgaaaagacaccaacccgggcccggagggtcaagtggagagcaggggaggaggggagaggaaagggaaaagcgggtcgcgagtcgcgactcgcgagtgcccgcttttgctccaatccaatcggtgccgcctcgggcgagatccgctccgcgtgccccgccgctgccgagatagagggtgtcgtccccactccccagcatctggttccacggagagttgttgatcttggatacctgatccgcaatttggggctgattgagtcacttgaccttttcaacatctgccccgttcctgctgccttgctcactataagaggctggcctggttccagagatgattctattgtgagtggagatggattctgtgagaagttggttccagaagttccagccgagagacaaatcgaagaggccagtggtggctgccagacatggaaaagatccaggaaagcccccgatggacgatgccccttctagtgcgacgaaacagagggttgccgctgcaaaacagtacattgagaaccactacaagacccagatgaagtccctgcaagataggaaagagaggcgctggatgttggagagaaaattacaagatgccgaagttcctgtagaagagcaaaataacattcttaagcatttggagaaaaaagagactgaatatatgcgcttgcagagacacaagatgggagttgaagattttgaacttttgactattattgggagaggtgcattcggagaggtgcgtcttgtagagagaaggtctctaagaatgtttatgcaatgaaaaagctcaagaaatctgaaatgcttcgtaggggccaggtagaacatgtcaaagctgaaaggaaccttcttgctgaagttgatagtgcttacatagttaagctctattattctttccaagacgaagagttcttatatctcatcatggaataccttcctggtggagacatgatgactttacttatgcgcaaagacacactaacagaagatgaagctagattttatattgcagaaactgtgcttgccatcgagtctattcacaagcacaactatgttcatcgcagtaatttccctaatttgaatgaaccagattatatgtctggaaaagttaccacacctttgcctgataccactcggttaagcaacccttctgcaccgaggcgtacacagcaggagcaattgtcacactggcaaaagaaccgtcggatgttggcatactcaacagtcggtacacctgattatattgctccagaagtgctactgaagaaaggatatggaacggagtgtgactggtggtcccttggtgctattatgtatgaaatgctagttggttaccctccattttattcagaggacccaatgtctacttgcagaaagattgtgaactggagaagtcacttgaaattccctgaagaggcaaagcttcctcctgaagctaaggctctcatcagcaagcttttgtgtaatgttgagcatcgacttggtacaaaaggagcccatgaaataaaagcgcatccatggttcggaggtgttcagtgggagaagttgtatcagatgaaagctgctttcataccagaagttaatggagagttggatactcagaattttgagaatttcgaggagattggaactcaaattcaaagttcatccaagtcaggcccttggagaaagatgcttccatccaaagatgcaaactttgttgggtatacgtacaagaactttgaaattgtgaatgatgatgaagtggcaggaattgcagagttgaagaaaaagagttccaaaccaaagcgaccaaccatcaagacaatgtttgagaggatggacgaagaggagcctgttcaagggagtttcttaagtatgttgcccccggagggccaaccttcgtcccactccagcgttccacaggaaaaataccaacctcgccgtaaataggatatggaggtttggaaagtaaagcataggaaagtaaaacaagaaaaaaaatcgtctgctgccttttgatctgttccctgtctaggttttgtaaatcctaaccaatgcgttctttagtcaaatgcttaaaaaaatctctccggcaaaatagtgtattgcatttgatgtgaacatcagtgttcggctgtatattgtgtcaccgttctaacttcgaagtgatgcttctcagccatattggcaaaaacttgccataccaggagcaggcaagttgtgctgctgtgggcctgtggcaagcatgggctatgtgtatgacctttagatgtttctttggggtcatggttcataggagcttgatcaacttgcacttgtagcatactccctctatacccaaaagctcctatgaattgagggactgcattcttttcggacagattttgacttacctgggattaaaacccactcaatccctctcaattcatatggattggagttgaatcgaac

SEQ ID NO: 59933 - DNA, 2643 bp, Zea Mays
ctctctttcgatcctagaggctagaccctctctcgcgcacacgctctctcctctcttcacacggtttttgcctcgcaaacgaaaagacaccaacccgggcccggagggtcaagtggagagcaggggaggaggggagaggaaagggaaaagcgggtcgcgagtcgcgactcgcgagtgcccgcttttgctccaatccaatcggtgccgcctcgggcgagatccgctccgcgtgccccgccgctgccgagatagagggtgtcgtccccactccccagcatctggttccacggagagttgttgatcttggatacctgatccgcaatttggggctgattgagtcacttgaccttttcaacatctgccccgttcctgctgccttgctcactataagaggctggcctggttccagagatgattctattgtgagtggagatggattctgtgagaagttggttccagaagttccagccgagagacaaatcgaagaggccagtggtggctgccagacatggaaaagatccaggaaagcccccgatggacgatgccccttctagtgcgacgaaacagagggttgccgctgcaaaacagtacattgagaaccactacaagacccagatgaagtccctgcaagataggaaagagaggaacttgtgatcttacctttacaatatattggtttacttttaggcgctggatgttggagagaaaattacaagatgccgaagttcctgtagaagagcaaaataacattcttaagcatttggagaaaaaagagactgaatatatgcgcttgcagagacacaagatgggagttgaagattttgaacttttgactattattgggagaggtgcattcggagaggtgcgtcttgtagagagaaggtctctaagaatgtttatgcaatgaaaaagctcaagaaatctgaaatgcttcgtaggggccaggtagaacatgtcaaagctgaaaggaaccttcttgctgaagttgatagtgcttacatagttaagctctattattctttccaagacgaagagttcttatatctcatcatggaataccttcctggtggagacatgatgactttacttatgcgcaaagacacactaacagaagatgaagctagattttatattgcagaaactgtgcttgccatcgagtctattcacaagcacaactatgttcatcgggatatcaaaccagataatcttttgttagatcacagtggtcacctgaagctttctgacttcggtttgtgtaaacctttggacagcagtaatttccctaatttgaatgaaccagattatatgtctggaaaagttaccacacctttgcctgataccactcggttaagcaacccttctgcaccgaggcgtacacagcaggagcaattgtcacactggcaaaagaaccgtcggatgttggcatactcaacagtcggtacacctgattatattgctccagaagtgctactgaagaaaggatatggaacggagtgtgactggtggtcccttggtgctattatgtatgaaatgctagttggttaccctccattttattcagaggacccaatgtctacttgcagaaagattgtgaactggagaagtcacttgaaattccctgaagaggcaaagcttcctcctgaagctaaggctctcatcagcaagcttttgtgtaatgttgagcatcgacttggtacaaaaggagcccatgaaataaaagcgcatccatggttcggaggtgttcagtgggagaagttgtatcagatgaaagctgctttcataccagaagttaatggagagttggatactcagaattttgagaatttcgaggagattggaactcaaattcaaagttcatccaagtcaggcccttggagaaagatgcttccatccaaagatgcaaactttgttgggtatacgtacaagaactttgaaattgtgaatgatgatgaagtggcaggaattgcagagttgaagaaaaagagttccaaaccaaagcgaccaaccatcaagacaatgtttgagaggatggacgaagaggagcctgttcaagggagtttcttaagtatgttgcccccggagggccaaccttcgtcccactccagcgttccacaggaaaaataccaacctcgccgtaaataggatatggaggtttggaaagtaaagcataggaaagtaaaacaagaaaaaaaatcgtctgctgccttttgatctgttccctgtctaggttttgtaaatcctaaccaatgcgttctttagtcaaatgcttaaaaaaatctctccggcaaaatagtgtattgcatttgatgtgaacatcagtgttcggctgtatattgtgtcaccgttctaacttcgaagtgatgcttctcagccatattggcaaaaacttgccataccaggagcaggcaagttgtgctgctgtgggcctgtggcaagcatgggctatgtgtatgacctttagatgtttctttggggtcatggttcataggagcttgatcaacttgcacttgtagcatactccctctatacccaaaagctcctatgaattgagggactgcattcttttcggacagattttgacttacctgggattaaaacccactcaatccctctcaattcatatggattggagttgaatcgaac

SEQ ID NO: 59934 - DNA, 2513 bp, Zea Mays
ctctctttcgatcctagaggctagaccctctctcgcgcacacgctctctcctctcttcacacggtttttgcctcgcaaacgaaaagacaccaacccgggcccggagggtcaagtggagagcaggggaggaggggagaggaaagggaaaagcgggtcgcgagtcgcgactcgcgagtgcccgcttttgctccaatccaatcggtgccgcctcgggcgagatccgctccgcgtgccccgccgctgccgagatagagggtgtcgtccccactccccagcatctggttccacggagagttgttgatcttggatacctgatccgcaatttggggctgattgagtcacttgaccttttcaacatctgccccgttcctgctgccttgctcactataagaggctggcctggttccagagatgattctattgtgagtggagatggattctgtgagaagttggttccagaagttccagccgagagacaaatcgaagaggccagtggtggctgccagacatggaaaagatccaggaaagcccccgatggacgatgccccttctagtgcgacgaaacagagggttgccgctgcaaaacagtacattgagaaccactacaagacccagatgaagtccctgcaagataggaaagagaggcgctggatgttggagagaaaattacaagatgccgaagttcctgtagaagagcaaaataacattcttaagcatttggagaaaaaagagactgaatatatgcgcttgcagagacacaagatgggagttgaagattttgaacttttgactattattgggagaggtgcattcggagaggtgcgtcttgtagagagaaggtctctaagaatgtttatgcaatgaaaaagctcaagaaatctgaaatgcttcgtaggggccaggtagaacatgtcaaagctgaaaggaaccttcttgctgaagttgatagtgcttacatagttaagctctattattctttccaagacgaagagttcttatatctcatcatggaataccttcctggtggagacatgatgactttacttatgcgcaaagacacactaacagaagatgaagctagattttatattgcagaaactgtgcttgccatcgagtctattcacaagcacaactatgttcatcgtaatttccctaatttgaatgaaccagattatatgtctggaaaagttaccacacctttgcctgataccactcggttaagcaacccttctgcaccgaggcgtacacagcaggagcaattgtcacactggcaaaagaaccgtcggatgttggcatactcaacagtcggtacacctgattatattgctccagaagtgctactgaagaaaggatatggaacggagtgtgactggtggtcccttggtgctattatgtatgaaatgctagttggttaccctccattttattcagaggacccaatgtctacttgcagaaagattgtgaactggagaagtcacttgaaattccctgaagaggcaaagcttcctcctgaagctaaggctctcatcagcaagcttttgtgtaatgttgagcatcgacttggtacaaaaggagcccatgaaataaaagcgcatccatggttcggaggtgttcagtgggagaagttgtatcagatgaaagctgctttcataccagaagttaatggagagttggatactcagaattttgagaatttcgaggagattggaactcaaattcaaagttcatccaagtcaggcccttggagaaagatgcttccatccaaagatgcaaactttgttgggtatacgtacaagaactttgaaattgtgaatgatgatgaagtggcaggaattgcagagttgaagaaaaagagttccaaaccaaagcgaccaaccatcaagacaatgtttgagaggatggacgaagaggagcctgttcaagggagtttcttaagtatgttgcccccggagggccaaccttcgtcccactccagcgttccacaggaaaaataccaacctcgccgtaaataggatatggaggtttggaaagtaaagcataggaaagtaaaacaagaaaaaaaatcgtctgctgccttttgatctgttccctgtctaggttttgtaaatcctaaccaatgcgttctttagtcaaatgcttaaaaaaatctctccggcaaaatagtgtattgcatttgatgtgaacatcagtgttcggctgtatattgtgtcaccgttctaacttcgaagtgatgcttctcagccatattggcaaaaacttgccataccaggagcaggcaagttgtgctgctgtgggcctgtggcaagcatgggctatgtgtatgacctttagatgtttctttggggtcatggttcataggagcttgatcaacttgcacttgtagcatactccctctatacccaaaagctcctatgaattgagggactgcattcttttcggacagattttgacttacctgggattaaaacccactcaatccctctcaattcatatggattggagttgaatcgaac

SEQ ID NO: 59935 - DNA, 3714 bp, Zea Mays
ctctctttcgatcctagaggctagaccctctctcgcgcacacgctctctcctctcttcacacggtttttgcctcgcaaacgaaaagacaccaacccgggcccggagggtcaagtggagagcaggggaggaggggagaggaaagggaaaagcgggtcgcgagtcgcgactcgcgagtgcccgcttttgctccaatccaatcggtgccgcctcgggcgagatccgctccgcgtgccccgccgctgccgagatagagggtgtcgtccccactccccagcatctggttccacggagagttgttgatcttggatacctgatccgcaatttggggctgattgagtcacttgaccttttcaacatctgccccgttcctgctgccttgctcactataagaggctggcctggttccagagatgattctattgtgagtggagatggattctgtgagaagttggttccagaagttccagccgagagacaaatcgaagaggccagtggtggctgccagacatggaaaagatccaggaaagcccccgatggacgatgccccttctagtgcgacgaaacagagggttgccgctgcaaaacagtacattgagaaccactacaagacccagatgaagtccctgcaagataggaaagagaggcgctggatgttggagagaaaattacaagatgccgaagttcctgtagaagagcaaaataacattcttaagcatttggagaaaaaagagactgaatatatgcgcttgcagagacacaagatgggagttgaagattttgaacttttgactattattgggagaggtgcattcggagaggtgcgtcttgtagagagaaggtctctaagaatgtttatgcaatgaaaaagctcaagaaatctgaaatgcttcgtaggggccaggtagaacatgtcaaagctgaaaggaaccttcttgctgaagttgatagtgcttacatagttaagctctattattctttccaagacgaagagttcttatatctcatcatggaataccttcctggtggagacatgatgactttacttatgcgcaaagacacactaacagaagatgaagctagattttatattgcagaaactgtgcttgccatcgagtctattcacaagcacaactatgttcatcgggatatcaaaccagataatcttttgttagatcacagtggtcacctgaagctttctgacttcggtttgtgtaaacctttggacagcagtaatttccctaatttgaatgaaccagattatatgtctggaaaagttaccacacctttgcctgataccactcggttaagcaacccttctgcaccgaggcgtacacagcaggagcaattgtcacactggcaaaagaaccgtcggatgttggcatactcaacagtcggtacacctgattatattgctccagaagtgctactgaagaaaggatatggaacggagtgtgactggtggtcccttggtgctattatgtatgaaatgctagttggttaccctccattttattcagaggacccaatgtctacttgcagaaagattgtgaactggagaagtcacttgaaattccctgaagaggcaaagcttcctcctgaagctaaggctctcatcagcaagcttttgtgtaatgttgagcatcgacttggtacaaaaggagcccatgaaataaaagcgcatccatggttcggaggtgttcagtgggagaagttgtatcagatgaaagctgctttcataccagaagttaatggagagttggatactcagaattttgagaatttcgaggagattggaactcaaattcaaagttcatccaagtcaggcccttggagaaagatgcttccatccaaagatgcaaactttgttgggtatacgtacaagaactttgaaattgtgaatgatgatgaagtggcaggaattgcagagttgaagaaaaagagttccaaaccaaagcgaccaaccatcaagacaatgtttgagaggatggacgaagaggagcctgttcaagggagtttcttaactatcaagatgctgcagaaagggatgtcgagagatatgagcggtcattcaaaatgcttcctacagcgcacaagaaacttcttttccacctcggtctgaagtaccaaagtctgagatggtgtatatccatgaatgcatcttttatcatgaaaatgcttgaggcgtttgaacctccttttgacatgagtcagtatgtagatgatgatgttcatgctcatccatcaatcttgcatgaccatagtcatatggattgcactcattccagcgagaggggtgattgctctataattgctatctccagaagcaatttatcattggatgagcagcatgatagtcccaaagaatataccaagagacatgaaccttcaagagaaactgataataataagggaggggaagatcacatggcaggctgctcccagcctgttggcaacatggggatgtctcaaggtgcaggcattgcatgtaatggtgataaaaatacgggtgcagcagcttatttccaggataaagatgtctctgcatcttctgctattgaaaatgtagcactgcggcactgcacagcttcatcgctcaagttaaatgttcctccaattgatgttgacaaggtaagatgcatagtaagaaatatcgtgagagattggggtgatgagggtcaaaaggaacgtgatgagtgctataagcccattcttgaggagcttaatcgcctttttcctaaccggagcgatcagaggcctccttcatgtcttgtccctggtgctgggcttgggagattggctcttgatatatcttctctgggttttgtaagccaagggaatgaattctcatattacatgctgatctgttcaaatttcatcctgaaccacactcaagaagctaatgagtggtccatatatccttggatacatagcaactgcaattctctttctgacaacgatcaacttcgtcctgtttcatttcctgacattcatccctcaagtgcaggtatcacagagggattttcaatgtgcgctggggactttgtagaggtctacagcgaggaaagccaagaatctgcatgggatgctgttgtaacttgctttttcctggatacggcacacaatatcgttgaatacatcgagatcatatcaaaagttctcaaggatggtggggtctggattaacttgggtccccttctgtatcactttgctgattcatatgggccagatgatgatatgtctattgaattaagtttggaagatgtgaaaaaggttgcttaccattatggatttacaatggaggtggagaaaatgatcgagactacttacactgcaaacatgaaagcaatgatgcagaatcggtaccgtgcagcattctggacaatgaggaaagatgcgtctcggtcaaaagcttgtaagcctcgttgaagtgaagatcatccatggcggacgatcagttcgtgccatcattattcactgttgtattcaaactccacacaggccgtgccagaccaagttagatagatatatcagatgagctgcctgattcacagaatataattggcttaacataggaaaggaggtgctgagccacgctagctagctcatccttttctcctatatcacagatattcaaactgtactatgaactctgtaagaatgagcaataaactaagcagacagaagttaaaaatagaagtaacagaaatttagaa

SEQ ID NO: 59936 - DNA, 2343 bp, Zea Mays
aggtagctccagtaccatattatgttgtagctgttcttttttgtgaattgtattaagtcgtagctctgtagtgaatagtgatacacaatgatctagcaaagctatgaactcaacgctgaatatgattttatggacttctttaggattgactctttgaacttaaaaacttactcaagtaaacttacatactcattctaaatgatgttcaccgaatttgtttcaaaacttatgcaattcaaacttatacctacaatcatcatcaaatttcaaatgtgaagacttaattttctcgtcaaccaatctacttgctggatttcatttatttgatgcaaattgacttgcaggaacttgtgatcttacctttacaatatattggtttacttttaggcgctggatgttggagagaaaattacaagatgccgaagttcctgtagaagagcaaaataacattcttaagcatttggagaaaaaagagactgaatatatgcgcttgcagagacacaagatgggagttgaagattttgaacttttgactattattgggagaggtgcattcggagaggtgcgtcttgtagagagaaggtctctaagaatgtttatgcaatgaaaaagctcaagaaatctgaaatgcttcgtaggggccaggtagaacatgtcaaagctgaaaggaaccttcttgctgaagttgatagtgcttacatagttaagctctattattctttccaagacgaagagttcttatatctcatcatggaataccttcctggtggagacatgatgactttacttatgcgcaaagacacactaacagaagatgaagctagattttatattgcagaaactgtgcttgccatcgagtctattcacaagcacaactatgttcatcgggatatcaaaccagataatcttttgttagatcacagtggtcacctgaagctttctgacttcggtttgtgtaaacctttggacagcagtaatttccctaatttgaatgaaccagattatatgtctggaaaagttaccacacctttgcctgataccactcggttaagcaacccttctgcaccgaggcgtacacagcaggagcaattgtcacactggcaaaagaaccgtcggatgttggcatactcaacagtcggtacacctgattatattgctccagaagtgctactgaagaaaggatatggaacggagtgtgactggtggtcccttggtgctattatgtatgaaatgctagttggttaccctccattttattcagaggacccaatgtctacttgcagaaagattgtgaactggagaagtcacttgaaattccctgaagaggcaaagcttcctcctgaagctaaggctctcatcagcaagcttttgtgtaatgttgagcatcgacttggtacaaaaggagcccatgaaataaaagcgcatccatggttcggaggtgttcagtgggagaagttgtatcagatgaaagctgctttcataccagaagttaatggagagttggatactcagaattttgagaatttcgaggagattggaactcaaattcaaagttcatccaagtcaggcccttggagaaagatgcttccatccaaagatgcaaactttgttgggtatacgtacaagaactttgaaattgtgaatgatgatgaagtggcaggaattgcagagttgaagaaaaagagttccaaaccaaagcgaccaaccatcaagacaatgtttgagaggatggacgaagaggagcctgttcaagggagtttcttaagtatgttgcccccggagggccaaccttcgtcccactccagcgttccacaggaaaaataccaacctcgccgtaaataggatatggaggtttggaaagtaaagcataggaaagtaaaacaagaaaaaaaatcgtctgctgccttttgatctgttccctgtctaggttttgtaaatcctaaccaatgcgttctttagtcaaatgcttaaaaaaatctctccggcaaaatagtgtattgcatttgatgtgaacatcagtgttcggctgtatattgtgtcaccgttctaacttcgaagtgatgcttctcagccatattggcaaaaacttgccataccaggagcaggcaagttgtgctgctgtgggcctgtggcaagcatgggctatgtgtatgacctttagatgtttctttggggtcatggttcataggagcttgatcaacttgcacttgtagcatactccctctatacccaaaagctcctatgaattgagggactgcattcttttcggacagattttgacttacctgggattaaaacccactcaatccctctcaattcatatggattggagttgaatcgaac

SEQ ID NO: 59937 - DNA, 5164 bp, Zea Mays
cttgcatccaaacagaccccaagtgctggacctgatgactactcacaaggccggagttctggaccctgatgcatactcggtagtcggtacgcacgagtattgcacgtgacaaggcctgtcactgtcagccatctgacgagggaaaaaaaacaagcaactgatgacggccgctgccgttcgatttgagagccaccgattaacccatccatccacctcgccgccgccggagagtatggttgagcggcggtacaccgaggaggaggaggccctcgagatcaagtccctccgccgcatcatcgccgcctacgccaactatcaagatgctgcagaaagggatgtcgagagatatgagcggtcattcaaaatgcttcctacagcgcacaagaaacttcttttccacctcggtctgaagtaccaaagtctgagatggtgtatatccatgaatgcatcttttatcatgaaaatgcttgaggcgtttgaacctccttttgacatgagtcagtatgtagatgatgatgttcatgctcatccatcaatcttgcatgaccatagtcatatggattgcactcattccagcgagaggggtgattgctctataattgctatctccagaagcaatttatcattggatgagcagcatgatagtcccaaagaatataccaagagacatgaaccttcaagagaaactgataataataagggaggggaagatcacatggcaggctgctcccagcctgttggcaacatggggatgtctcaaggtgcaggcattgcatgtaatggtgataaaaatacgggtgcagcagcttatttccaggataaagatgtctctgcatcttctgctattgaaaatgtagcactgcggcactgcacagcttcatcgctcaagttaaatgttcctccaattgatgttgacaaggtaagatgcatagtaagaaatatcgtgagagattggggtgatgagggtcaaaaggaacgtgatgagtgctataagcccattcttgaggagcttaatcgcctttttcctaaccggagcgatcagaggcctccttcatgtcttgtccctggtgctgggcttgggagattggctcttgatatatcttctctgggttttgtaagccaagggaatgaattctcatattacatgctgatctgttcaaatttcatcctgaaccacactcaagaagctaatgagtggtccatatatccttggatacatagcaactgcaattctctttctgacaacgatcaacttcgtcctgtttcatttcctgacattcatccctcaagtgcaggtatcacagagggattttcaatgtgcgctggggactttgtagaggtctacagcgaggaaagccaagaatctgcatgggatgctgttgtaacttgctttttcctggatacggcacacaatatcgttgaatacatcgagatcatatcaaaagttctcaaggatggtggggtctggattaacttgggtccccttctgtatcactttgctgattcatatgggccagatgatgatatgtctattgaattaagtttggaagatgtgaaaaaggttgcttaccattatggatttacaatggaggtggagaaaatgatcgagactacttacactgcaaacatgaaagcaatgatgcagttattggatattcggcccgactggttgtatatgggttgggttagtgcaacttttgaaagttcagttcagaaaaagctacggcgagaagccgagaagactagttgcggccgttggcccgccgaagcccaatcattcgcaggagacctcgtcgctggtttgcctccaaatgtgctcgccacgatcgcagccgtagaggaagacgcgggccttttttttgtctctttctctttctctacctgccgcgcgccggcgccggcggtcaaggtgaagttcttctctttatgtatcgtcatgaacaaagttatgtggtctttattagtaggtcaagagctctggctatcttttcaagaccatgctgagtgtacagaacttggacaatctttggcggacttcggaaaggcgattaagcttttgggctcttgtgaaggagatttgatggaaaaggtgttttctgaagttggttcaaagtcagagatgttgtcaataaagctgcaaagagaggcaatcagagcagatggacagacacaattgagccatgaaatagctttggagctaagtcagaggagtgctgctgctggactaaggccgattggagcagtggtcttcatgcaacggggtgtcctgaaggtttgcttgaggactactgacagtacagttaatacatcagagattgcaaaggcatatggcggaggtggaaaacgaagttcgagttcattcactctaagaatggatgagttcaacatctggacttcagtgaactcatgaattgaactggagaggtcacatagtgttcatactgtgggaactcgcaaccagctcatctgggcatggattccctcagtggtgaacatgtgaagatggggtggtctttttgtgctccggtatgagaggaaggaaaacaaaatcttagtctaacctaccatgttgatatgagcttacaggagaataatctcttcgatatgaatgactggagagcaatttggaggcataatgcttaagccgttcaagagaagatttgatgcctttaaatgaaaggtttgctggtacatcaaaagacgtattttatgctctttctaatctttctccagtagacctatgtgcttaattttagagatgataagggtggtgcgggccgaagatctgtcatactcctaggggccaattatagcttacacttatgttgttattagttttgaatgctgaacatacatggagatgggtagctcagctcagcttggatataacttggtttctatccaaactaatactttgctccatagggaatgcatctggcaacggaaattgttgtcaagctccagtagcagaaaggatcatcttcaattattgtaatcctgctccttaataatacattcttggatcttgctctgggcttaaaaaatctgcatcaccaaattgttcctcgttgcgaacatttatgtaatacagaaccttagaaactggaaatgtttattccattccggtaatttgggaatgatctgtgttaaaatcctttttaagtgtcataccacgcactatttttctgttcctcaactctatcgatcccataacctatttctgttaactggttactaaggacatgtacaatcccataaccaaattggtgggtatgcaatgcgtcaatgaaaaaaccatttcttcagtcctgtaatgttgttccgattgcgtcaatgaaaaaactgtaatttttgaccggggagatggtagcactagcatgtggggattaaagttcctaaatgttcagtactgtcctaaacacttgttttatcttttttgagtggaagtccgacgtccgagaggggctcgccattgggcttggcatgggcacagtcatgctgctcctcttctgcggctactcgctggtgatttgatatggctctaagctgatcctggagatggtgtacaccggagccaaggtcacaacatgatctttgtagtcctcactggttctcttttctcaaattgaccatggtgttgtaaatttgatcaatgaagaagattcaagaattaccgttttactggattgccatgggatttcgccattcagatttccaatgcaaatgatgaggtcgtttatcactgtggttcaagaaaactacccgaatcgtcttggggtattgtttgtcatccgccttcctccagttgtcagagttattgcacagacatttcttcaaattgcaatatcacatggtatccgtggagatgaggacgacattgcctccaagtctgctccaccggcatccatcgacggtgcaagatccagcagatagattgatggcaaagaggacgactccatgtccaggcgtactccccgccttgcatcgagattgctaggtcataatcgaagggtttacagggaggagatctgaacatagctcttcaatcccaaagttaacatcgttggttaccataattcttactgcttgcaagcccttttagaatattactgctgcgaggttcttgcaaagtccttgatgaagaagtcgaaggtgacgaacgccgaggccgtcatccttgatcgacgccaagaacctcacagcgcacctccttgtgatgctcttttctccaatgtcttctcttatctacatgcaggaaaaaatctacatgtttgatggcgtggatcagaaaaatgtggaaggacaagatttaagatgcactgccatggttggcggtctatttactgcatctcgaagcggcttgcattcaaaggactatattgtacatgaccttgaaggagctgaccatgtgacagaccttgatcataaccatgttgcagagttgaagatattaggactatattaaacattgctgcatatagcatcaggatatgatgacatcagacttagaagtcaaacaacatcaaacttatcatcagcaacaacttggtttccgtcgctgcccaaacttcagcagaggcgatctaagaagaagcaagcgtatcggctcatgttctgacggccgtgttcacgtggtgtaagatctgcattgtggaatccttcgcccggacaagagagattggatcctcccgtccagacaacctgatagaacgacagtgtataagaacagggctcttaggacgccttttgtcaagttgggtcataactctaccctgagaattgagatagatgatcatgtggtgcaagatattgagtccctaatctttgatgacacacataacaaatggtaagcgtctccgtggatggagcctgaagtatattcaaattcaaggcatgccacaaagcatctcgcgtgtgggatgctccggcgtgtggaaagtagaaaagccaaataaatgggtacatgtacagcaggcgtgagttcttaaatactcagattccttgtccataggcaaatgcatagttcatacgaatcagagtacacgatgcacacaacttgatgtctctatcgttgttttcaacatgatgaacatgcgaatttcgtggtattaattgggaccgtctgatttctcaaagaaaataacaaaaagaaaagaaaagaaca

SEQ ID NO: 59938 - DNA, 6829 bp, Zea Mays
ctggacctgatgactactcacaaggccggagttctggaccctgatgcatactcggtagtcggtacgcacgagtattgcacgtgacaaggcctgtcactgtcagccatctgacgagggaaaaaaaacaagcaactgatgacggccgctgccgttcgatttgagagccaccgattaacccatccatccacctcgccgccgccggagagtatggttgagcggcggtacaccgaggaggaggaggccctcgagatcaagtccctccgccgcatcatcgccgcctacgccaactatcaagatgctgcagaaagggatgtcgagagatatgagcggtcattcaaaatgcttcctacagcgcacaagaaacttcttttccacctcggtctgaagtaccaaagtctgagatggtgtatatccatgaatgcatcttttatcatgaaaatgcttgaggcgtttgaacctccttttgacatgagtcagtatgtagatgatgatgttcatgctcatccatcaatcttgcatgaccatagtcatatggattgcactcattccagcgagaggggtgattgctctataattgctatctccagaagcaatttatcattggatgagcagcatgatagtcccaaagaatataccaagagacatgaaccttcaagagaaactgataataataagggaggggaagatcacatggcaggctgctcccagcctgttggcaacatggggatgtctcaaggtgcaggcattgcatgtaatggtgataaaaatacgggtgcagcagcttatttccaggataaagatgtctctgcatcttctgctattgaaaatgtagcactgcggcactgcacagcttcatcgctcaagttaaatgttcctccaattgatgttgacaaggtaagatgcatagtaagaaatatcgtgagagattggggtgatgagggtcaaaaggaacgtgatgagtgctataagcccattcttgaggagcttaatcgcctttttcctaaccggagcgatcagaggcctccttcatgtcttgtccctggtgctgggcttgggagattggctcttgatatatcttctctgggttttgtaagccaagggaatgaattctcatattacatgctgatctgttcaaatttcatcctgaaccacactcaagaagctaatgagtggtccatatatccttggatacatagcaactgcaattctctttctgacaacgatcaacttcgtcctgtttcatttcctgacattcatccctcaagtgcaggtatcacagagggattttcaatgtgcgctggggactttgtagaggtctacagcgaggaaagccaagaatctgcatgggatgctgttgtaacttgctttttcctggatacggcacacaatatcgttgaatacatcgagatcatatcaaaagttctcaaggatggtggggtctggattaacttgggtccccttctgtatcactttgctgattcatatgggccagatgatgatatgtctattgaattaagtttggaagatgtgaaaaaggttgcttaccattatggatttacaatggaggtggagaaaatgatcgagactacttacactgcaaacatgaaagcaatgatgcagttattggatattcggcccgactggttgtatatgggttgggttagtgcaacttttgaaagttcagttcagaaaaagctacggcgagaagccgagaagactagttgcggccgttggcccgccgaagcccaatcattcgcaggagacctcgtcgctggtttgcctccaaatgtgctcgccacgatcgcagccgtagaggaagacgcgggccttttttttgtctctttctctttctctacctgccgcgcgccggcgccggcggtcaaggtgaagttcttctctttatgtatcgtcatgaacaaagttatgtggtctttattagtaggtcaaggtgaagttcttctctttatgtatctatatcagcttagctgtgatatgcgtgtgagtcgtaaatttcgatatatgaaagtctgttcttgcatccgatcaggaattgtgaacatctctttcttcatatgcctctctttcgtgaaattggggatatgtctttcgtctagatttacttctgttcggctgctccgctggcggctgctgctgttcatgctcatgcacttggatgtcatgaattataaaccaaagatttgggaattatttaactatggaagccatgaattctatcctcattagggacacatgtttatattagaattcatggatcaaaagaataactaactagctgatagatagctgatagatatatggattaaatgatagatttaataaaaccatcagattggatgtgaggtatggatttatttaattcagtgttttccttaaccgagcaaggcctaacactttgcgtggatttaacttgaatcggcgaactctgtgccgcggttatcgctaaggctgaagtattctttcttggggcagttgaacgtgcgtactctaggatcattctttggattactctgaccgccggtgttgttgaccgctgaagctcccgtgcattgctgagtcaatttgactccgtatgccggccagagacttcaggaagactgaaacattagcattggtggtaagaggaaaagatggccatgccaagagttccagggcagcagctcctgacgccaaggagtatgacgaatacgaggaggagcacaccgagccttttgcggaagctgcgacgacctttacattggcagcaactaaataatggactgagttagctgacaataggccatttgattctatcccatgtttggtgcatgtagtgtatcatgtttcgtttaccatctctattgtcatgatcagagctctggctatcttttcaagaccatgctgagtgtacagaacttggacaatctttggcggacttcggaaaggcgattaagcttttgggctcttgtgaaggagatttgatggaaaaggtgttttctgaagttggttcaaagtcagagatgttgtcaataaagctgcaaagagaggcaatcagagcagatggacagacacaattgagccatgaaatagctttggagctaagtcagaggagtgctgctgctggactaaggccgattggagcagtggtcttcatgcaacggggtgtcctgaaggtttgcttgaggactactgacagtacagttaatacatcagagattgcaaaggcatatggcggaggtggaaaacgaagttcgagttcattcactctaagaatggatgagttcaacatctggacttcagtgaactcatgaattgaactggagaggtcacatagtgttcatactgtgggaactcgcaaccagctcatctgggcatggattccctcagtggtgaacatgtgaagatggggtggtctttttgtgctccggtatgagaggaaggaaaacaaaatcttagtctaacctaccatgttgatatgagcttacaggagaataatctcttcgatatgaatgactggagagcaatttggaggcataatgcttaagccgttcaagagaagatttgatgcctttaaatgaaaggtttgctggtacatcaaaagacgtattttatgctctttctaatctttctccagtagacctatgtgcttaattttagagatgataagggtggtgcgggccgaagatctgtcatactcctaggggccaattatagcttacacttatgttgttattagttttgaatgctgaacatacatggagatgggtagctcagctcagcttggatataacttggtttctatccaaactaatactttgctccatagggaatgcatctggcaacggaaattgttgtcaagctccagtagcagaaaggatcatcttcaattattgtaatcctgctccttaataatacattcttggatcttgctctgggcttaaaaaatctgcatcaccaaattgttcctcgttgcgaacatttatgtaatacagaaccttagaaactggaaatgtttattccattccggtaatttgggaatgatctgtgttaaaatcctttttaagtgtcataccacgcactatttttctgttcctcaactctatcgatcccataacctatttctgttaactggttactaaggacatgtacaatcccataaccaaattggtgggtatgcaatgcgtcaatgaaaaaaccatttcttcagtcctgtaatgttgttccgattgcgtcaatgaaaaaactgtaatttttgaccggggagatggtagcactagcatgtggggattaaagttcctaaatgttcagtactgtcctaaacacttgttttatcttttttgagtggaagtccgacgtccgagaggggctcgccattgggcttggcatgggcacagtcatgctgctcctcttctgcggctactcgctggtgatttgatatggctctaagctgatcctggagatggtgtacaccggagccaaggtcacaacatgatctttgtagtcctcactggttctcttttctcaaattgaccatggtgttgtaaatttgatcaatgaagaagattcaagaattaccgttttactggattgccatgggatttcgccattcagatttccaatgcaaatgatgaggtcgtttatcactgtggttcaagaaaactacccgaatcgtcttggggtattgtttgtcatccgccttcctccagttgtcagagttattgcacagacatttcttcaaattgcaatatcacatggtatccgtggagatgaggacgacattgcctccaagtctgctccaccggcatccatcgacggtgcaaggtacggattcgagcctccggtccttcaatctagccaccaggtagattcgtctcagtggtggtcggattcatctcgacggtggtcagatccagcagatagattgatggcaaagaggacgactccatgtccaggcgtactccccgccttgcatcgagattgctaggtcataatcgaagggtttacagggaggagatctgaacatagctcttcaatcccaaagttaacatcgttggttaccataattcttactgcttgcaagcccttttagaatattactgctgcgaggttcttgcaaagtccttgatgaagaagtcgaaggtgacgaacgccgaggccgtcatccttgatcgacgccaagaacctcacagcgcacctccttgtgatgctcttttctccaatgtcttctcttatctacatgcaggaaaaaatctacatgtttgatggcgtggatcagaaaaatgtggaaggacaagatttaagatgcactgccatggttggcggtctatttactgcatctcgaagcggcttgcattcaaaggttctgcacctctaaatatttctggtcgtgaagctgtctatgaaaggaagatgaaaattcagcaagttggattgatttatctttcccccctatggctgattcagcaacctgtattaattagtctatttgacatttgatatttcaatgctgttataggactatattgtacatgaccttgaaggagctgaccatgtgacagaccttgatcataaccatgttgcagagttgaagatattaggactatattaaacattgctgcatatagcatcaggtacacaattttgctatcatttttataaaataaatatgtaccaaaggtctcaaacaacaatactcaatttgaatggcacatactttggaggatatgatgacatcagacttagaagtcaaacaacatcaaacttatcatcaggtatgttttgaattatcttacgttttttagattgaaaataactatttctgaaaccttattttcactctgagcctgtgaggacagtttatccttagttaatcagcactttatatctgttatttgcctattagaagttatatctgtgatccagcaacaacttggtttccgtcgctgcccaaacttcagcagaggcgatctaagaagaagcaagcgtatcggctcatgttctgacggccgtgttcacgtggtgtaagatctgcattgtggaatccttcgcccggacaagagagattggatcctcccgtccagacaacctgatagaacgacagtgtataagaacagggctcttaggacgccttttgtcaaggtaagcgtctccgtggatggagcctgaagtatattcaaattcaaggcatgccacaaagcatctcgcgtgtgggatgctccggcgtgtggaaagtagaaaagccaaataaatgggtacatgtacagcaggcgtgagttcttaaatactcagattccttgtccataggcaaatgcatagttcatacgaatcagagtacacgatgcacacaacttgatgtctctatcgttgttttcaacatgatgaacatgcgaatttcgtggtattaattgggaccgtctgatttctcatggatccatagttctattctacaagcatttgagataaagggatcatgcaaactgaaaaatgggagatgacattactgtacaacttagtataattcataaacgggatgtttggctgacataactccggtgttgactctggattttttgagagccgtagtatatttttgtttttgttttggaatacctcatatactgcttcggcagtcttggtattcaatcttgaaatacctcatatattctggagaaatggtttcggttcgccgtgcgtacgtttggggttgtttctccctcgcttcttcctggcggcggaagatagagaagggcgagtggccgcgcggaacatcgacgaccgagagaccccctcgtcagcaactccatctgctattctccctgacggtgttcctagc

SEQ ID NO: 59939 - DNA, 1785 bp, Zea Mays
gactactcacaaggccggagttctggaccctgatgcatactcggtagtcggtacgcacgagtattgcacgtgacaaggcctgtcactgtcagccatctgacgagggaaaaaaaacaagcaactgatgacggccgctgccgttcgatttgagagccaccgattaacccatccatccacctcgccgccgccggagagtatggttgagcggcggtacaccgaggaggaggaggccctcgagatcaagtccctccgccgcatcatcgccgcctacgccaactatcaagatgctgcagaaagggatgtcgagagatatgagcggtcattcaaaatgcttcctacagcgcacaagaaacttcttttccacctcggtctgaagtaccaaagtctgagatggtgtatatccatgaatgcatcttttatcatgaaaatgcttgaggcgtttgaacctccttttgacatgagtcaaagcaatttatcattggatgagcagcatgatagtcccaaagaatataccaagagacatgaaccttcaagagaaactgataataataagggaggggaagatcacatggcaggctgctcccagcctgttggcaacatggggatgtctcaaggtgcaggcattgcatgtaatggtgataaaaatacgggtgcagcagcttatttccaggataaagatgtctctgcatcttctgctattgaaaatgtagcactgcggcactgcacagcttcatcgctcaagttaaatgttcctccaattgatgttgacaaggtaagatgcatagtaagaaatatcgtgagagattggggtgatgagggtcaaaaggaacgtgatgagtgctataagcccattcttgaggagcttaatcgcctttttcctaaccggagcgatcagaggcctccttcatgtcttgtccctggtgctgggcttgggagattggctcttgatatatcttctctggcactcaagaagctaatgagtggtccatatatccttggatacatagcaactgcaattctctttctgacaacgatcaacttcgtcctgtttcatttcctgacattcatccctcaaggtatcacagagggattttcaatgtgcgctggggactttgtagaggtctacagcgaggaaagccaagaatctgcatgggatgctgttgtaacttgctttttcctggatacggcacacaatatcgttgaatacatcgagatcatatcaaaagttctcaaggatggtggggtctggattaacttgggtccccttctgtatcactttgctgattcatatgggccagatgatgatatgtctattgaattaagtttggaagatgtgaaaaaggttgcttaccattatggatttacaatggaggtggagaaaatgatcgagactacttacactgcaaacatgaaagcaatgatgcagaatcggtaccgtgcagcattctggacaatgaggaaagatgcgtctcggtcaaaagcttgtaagcctcgttgaagtgaagatcatccatggcggacgatcagttcgtgccatcattattcactgttgtattcaaactccacacaggccgtgccagaccaagttagatagatatatcagatgagctgcctgattcacagaatataattggcttaacataggaaaggaggtgctgagccacgctagctagctcatccttttctcctatatcacagatattcaaactgtactatgaactctgtaagaatgagcaataaactaagcagacagaagttaaaaatagaagtaacagaaatttagaa

SEQ ID NO: 59940 - DNA, 4726 bp, Zea Mays
gactactcacaaggccggagttctggaccctgatgcatactcggtagtcggtacgcacgagtattgcacgtgacaaggcctgtcactgtcagccatctgacgagggaaaaaaaacaagcaactgatgacggccgctgccgttcgatttgagagccaccgattaacccatccatccacctcgccgccgccggagagtatggttgagcggcggtacaccgaggaggaggaggccctcgagatcaagtccctccgccgcatcatcgccgcctacgccaactatcaagatgctgcagaaagggatgtcgagagatatgagcggtcattcaaaatgcttcctacagcgcacaagaaacttcttttccacctcggtctgaagtaccaaagtctgagatggtgtatatccatgaatgcatcttttatcatgaaaatgcttgaggcgtttgaacctccttttgacatgagtcagtatgtagatgatgatgttcatgctcatccatcaatcttgcatgaccatagtcatatggattgcactcattccagcgagaggggtgattgctctataattgctatctccagaagcaatttatcattggatgagcagcatgatagtcccaaagaatataccaagagacatgaaccttcaagagaaactgataataataagggaggggaagatcacatggcaggctgctcccagcctgttggcaacatggggatgtctcaaggtgcaggcattgcatgtaatggtgataaaaatacgggtgcagcagcttatttccaggataaagatgtctctgcatcttctgctattgaaaatgtagcactgcggcactgcacagcttcatcgctcaagttaaatgttcctccaattgatgttgacaaggtaagatgcatagtaagaaatatcgtgagagattggggtgatgagggtcaaaaggaacgtgatgagtgctataagcccattcttgaggagcttaatcgcctttttcctaaccggagcgatcagaggcctccttcatgtcttgtccctggtgctgggcttgggagattggctcttgatatatcttctctgggttttgtaagccaagggaatgaattctcatattacatgctgatctgttcaaatttcatcctgaaccacactcaagaagctaatgagtggtccatatatccttggatacatagcaactgcaattctctttctgacaacgatcaacttcgtcctgtttcatttcctgacattcatccctcaagtgcaggtatcacagagggattttcaatgtgcgctggggactttgtagaggtctacagcgaggaaagccaagaatctgcatgggatgctgttgtaacttgctttttcctggatacggcacacaatatcgttgaatacatcgagatcatatcaaaagttctcaaggatggtggggtctggattaacttgggtccccttctgtatcactttgctgattcatatgggccagatgatgatatgtctattgaattaagtttggaagatgtgaaaaaggttgcttaccattatggatttacaatggaggtggagaaaatgatcgagactacttacactgcaaacatgaaagcaatgatgcagttattggatattcggcccgactggttgtatatgggttgggttagtgcaacttttgaaagttcagttcagaaaaagctacggcgagaagccgagaagactagttgcggccgttggcccgccgaagcccaatcattcgcaggagacctcgtcgctggtttgcctccaaatgtgctcgccacgatcgcagccgtagaggaagacgcgggccttttttttgtctctttctctttctctacctgccgcgcgccggcgccggcggtcaaggtgaagttcttctctttatgtatcgtcatgaacaaagttatgtggtctttattagtaggtcaagagctctggctatcttttcaagaccatgctgagtgtacagaacttggacaatctttggcggacttcggaaaggcgattaagcttttgggctcttgtgaaggagatttgatggaaaaggtgttttctgaagttggttcaaagtcagagatgttgtcaataaagctgcaaagagaggcaatcagagcagatggacagacacaattgagccatgaaatagctttggagctaagtcagaggagtgctgctgctggactaaggccgattggagcagtggtcttcatgcaacggggtgtcctgaaggtttgcttgaggactactgacagtacagttaatacatcagagattgcaaaggcatatggcggaggtggaaaacgaagttcgagttcattcactctaagaatggatgagttcaacatctggacttcagtgaactcatgaattgaactggagaggtcacatagtgttcatactgtgggaactcgcaaccagctcatctgggcatggattccctcagtggtgaacatgtgaagatggggtggtctttttgtgctccggtatgagaggaaggaaaacaaaatcttagtctaacctaccatgttgatatgagcttacaggagaataatctcttcgatatgaatgactggagagcaatttggaggcataatgcttaagccgttcaagagaagatttgatgcctttaaatgaaaggtttgctggtacatcaaaagacgtattttatgctctttctaatctttctccagtagacctatgtgcttaattttagagatgataagggtggtgcgggccgaagatctgtcatactcctaggggccaattatagcttacacttatgttgttattagttttgaatgctgaacatacatggagatgggtagctcagctcagcttggatataacttggtttctatccaaactaatactttgctccatagggaatgcatctggcaacggaaattgttgtcaagctccagtagcagaaaggatcatcttcaattattgtaatcctgctccttaataatacattcttggatcttgctctgggcttaaaaaatctgcatcaccaaattgttcctcgttgcgaacatttatgtaatacagaaccttagaaactggaaatgtttattccattccggtaatttgggaatgatctgtgttaaaatcctttttaagtgtcataccacgcactatttttctgttcctcaactctatcgatcccataacctatttctgttaactggttactaaggacatgtacaatcccataaccaaattggtgggtatgcaatgcgtcaatgaaaaaaccatttcttcagtcctgtaatgttgttccgattgcgtcaatgaaaaaactgtaatttttgaccggggagatggtagcactagcatgtggggattaaagttcctaaatgttcagtactgtcctaaacacttgttttatcttttttgagtggaagtccgacgtccgagaggggctcgccattgggcttggcatgggcacagtcatgctgctcctcttctgcggctactcgctggtgatttgatatggctctaagctgatcctggagatggtgtacaccggagccaaggtcacaacatgatctttgtagtcctcactggttctcttttctcaaattgaccatggtgttgtaaatttgatcaatgaagaagattcaagaattaccgttttactggattgccatgggatttcgccattcagatttccaatgcaaatgatgaggtcgtttatcactgtggttcaagaaaactacccgaatcgtcttggggtattgtttgtcatccgccttcctccagttgtcagagttattgcacagacatttcttcaagatacaaaccaaccaaggctgactacaagttaaagatgctctgtaaaaaggaaggatcagtttgactatatctttttgctggtagattgcaatatcacatggtatccgtggagatgaggacgacattgcctccaagtctgctccaccggcatccatcgacggtgcaagatccagcagatagattgatggcaaagaggacgactccatgtccaggcgtactccccgccttgcatcgagattgctaggtcataatcgaagggtttacagggaggagatctgaacatagctcttcaatcccaaagttaacatcgttggttaccataattcttactgcttgcaagcccttttagaatattactgctgcgaggttcttgcaaagtccttgatgaagaagtcgaaggtgacgaacgccgaggccgtcatccttgatcgacgccaagaacctcacagcgcacctccttgtgatgctcttttctccaatgtcttctcttatctacatgcaggaaaaaatctacatgtttgatggcgtggatcagaaaaatgtggaaggacaagatttaagatgcactgccatggttggcggtctatttactgcatctcgaagcggcttgcattcaaaggactatattgtacatgaccttgaaggagctgaccatgtgacagaccttgatcataaccatgttgcagagttgaagatattaggactatattaaacattgctgcatatagcatcagacttagaagtcaaacaacatcaaacttatcatcagcaacaacttggtttccgtcgctgcccaaacttcagcagaggcgatctaagaagaagcaagcgtatcggctcatgttctgacggccgtgttcacgtggtgtaagatctgcattgtggaatccttcgcccggacaagagattgaatttgacatactt

SEQ ID NO: 59941 - DNA, 6293 bp, Zea Mays
gactactcacaaggccggagttctggaccctgatgcatactcggtagtcggtacgcacgagtattgcacgtgacaaggcctgtcactgtcagccatctgacgagggaaaaaaaacaagcaactgatgacggccgctgccgttcgatttgagagccaccgattaacccatccatccacctcgccgccgccggagagtatggttgagcggcggtacaccgaggaggaggaggccctcgagatcaagtccctccgccgcatcatcgccgcctacgccaactatcaagatgctgcagaaagggatgtcgagagatatgagcggtcattcaaaatgcttcctacagcgcacaagaaacttcttttccacctcggtctgaagtaccaaagtctgagatggtgtatatccatgaatgcatcttttatcatgaaaatgcttgaggcgtttgaacctccttttgacatgagtcagtatgtagatgatgatgttcatgctcatccatcaatcttgcatgaccatagtcatatggattgcactcattccagcgagaggggtgattgctctataattgctatctccagaagcaatttatcattggatgagcagcatgatagtcccaaagaatataccaagagacatgaaccttcaagagaaactgataataataagggaggggaagatcacatggcaggctgctcccagcctgttggcaacatggggatgtctcaaggtgcaggcattgcatgtaatggtgataaaaatacgggtgcagcagcttatttccaggataaagatgtctctgcatcttctgctattgaaaatgtagcactgcggcactgcacagcttcatcgctcaagttaaatgttcctccaattgatgttgacaaggtaagatgcatagtaagaaatatcgtgagagattggggtgatgagggtcaaaaggaacgtgatgagtgctataagcccattcttgaggagcttaatcgcctttttcctaaccggagcgatcagaggcctccttcatgtcttgtccctggtgctgggcttgggagattggctcttgatatatcttctctgggttttgtaagccaagggaatgaattctcatattacatgctgatctgttcaaatttcatcctgaaccacactcaagaagctaatgagtggtccatatatccttggatacatagcaactgcaattctctttctgacaacgatcaacttcgtcctgtttcatttcctgacattcatccctcaagtgcaggtatcacagagggattttcaatgtgcgctggggactttgtagaggtctacagcgaggaaagccaagaatctgcatgggatgctgttgtaacttgctttttcctggatacggcacacaatatcgttgaatacatcgagatcatatcaaaagttctcaaggatggtggggtctggattaacttgggtccccttctgtatcactttgctgattcatatgggccagatgatgatatgtctattgaattaagtttggaagatgtgaaaaaggttgcttaccattatggatttacaatggaggtggagaaaatgatcgagactacttacactgcaaacatgaaagcaatgatgcagttattggatattcggcccgactggttgtatatgggttgggttagtgcaacttttgaaagttcagttcagaaaaagctacggcgagaagccgagaagactagttgcggccgttggcccgccgaagcccaatcattcgcaggagacctcgtcgctggtttgcctccaaatgtgctcgccacgatcgcagccgtagaggaagacgcgggccttttttttgtctctttctctttctctacctgccgcgcgccggcgccggcggtcaaggtgaagttcttctctttatgtatcgtcatgaacaaagttatgtggtctttattagtaggtcaaggtgaagttcttctctttatgtatctatatcagcttagctgtgatatgcgtgtgagtcgtaaatttcgatatatgaaagtctgttcttgcatccgatcaggaattgtgaacatctctttcttcatatgcctctctttcgtgaaattggggatatgtctttcgtctagatttacttctgttcggctgctccgctggcggctgctgctgttcatgctcatgcacttggatgtcatgaattataaaccaaagatttgggaattatttaactatggaagccatgaattctatcctcattagggacacatgtttatattagaattcatggatcaaaagaataactaactagctgatagatagctgatagatatatggattaaatgatagatttaataaaaccatcagattggatgtgaggtatggatttatttaattcagtgttttccttaaccgagcaaggcctaacactttgcgtggatttaacttgaatcggcgaactctgtgccgcggttatcgctaaggctgaagtattctttcttggggcagttgaacgtgcgtactctaggatcattctttggattactctgaccgccggtgttgttgaccgctgaagctcccgtgcattgctgagtcaatttgactccgtatgccggccagagacttcaggaagactgaaacattagcattggtggtaagaggaaaagatggccatgccaagagttccagggcagcagctcctgacgccaaggagtatgacgaatacgaggaggagcacaccgagccttttgcggaagctgcgacgacctttacattggcagcaactaaataatggactgagttagctgacaataggccatttgattctatcccatgtttggtgcatgtagtgtatcatgtttcgtttaccatctctattgtcatgatcagagctctggctatcttttcaagaccatgctgagtgtacagaacttggacaatctttggcggacttcggaaaggcgattaagcttttgggctcttgtgaaggagatttgatggaaaaggtgttttctgaagttggttcaaagtcagagatgttgtcaataaagctgcaaagagaggcaatcagagcagatggacagacacaattgagccatgaaatagctttggagctaagtcagaggagtgctgctgctggactaaggccgattggagcagtggtcttcatgcaacggggtgtcctgaaggtttgcttgaggactactgacagtacagttaatacatcagagattgcaaaggcatatggcggaggtggaaaacgaagttcgagttcattcactctaagaatggatgagttcaacatctggacttcagtgaactcatgaattgaactggagaggtcacatagtgttcatactgtgggaactcgcaaccagctcatctgggcatggattccctcagtggtgaacatgtgaagatggggtggtctttttgtgctccggtatgagaggaaggaaaacaaaatcttagtctaacctaccatgttgatatgagcttacaggagaataatctcttcgatatgaatgactggagagcaatttggaggcataatgcttaagccgttcaagagaagatttgatgcctttaaatgaaaggtttgctggtacatcaaaagacgtattttatgctctttctaatctttctccagtagacctatgtgcttaattttagagatgataagggtggtgcgggccgaagatctgtcatactcctaggggccaattatagcttacacttatgttgttattagttttgaatgctgaacatacatggagatgggtagctcagctcagcttggatataacttggtttctatccaaactaatactttgctccatagggaatgcatctggcaacggaaattgttgtcaagctccagtagcagaaaggatcatcttcaattattgtaatcctgctccttaataatacattcttggatcttgctctgggcttaaaaaatctgcatcaccaaattgttcctcgttgcgaacatttatgtaatacagaaccttagaaactggaaatgtttattccattccggtaatttgggaatgatctgtgttaaaatcctttttaagtgtcataccacgcactatttttctgttcctcaactctatcgatcccataacctatttctgttaactggttactaaggacatgtacaatcccataaccaaattggtgggtatgcaatgcgtcaatgaaaaaaccatttcttcagtcctgtaatgttgttccgattgcgtcaatgaaaaaactgtaatttttgaccggggagatggtagcactagcatgtggggattaaagttcctaaatgttcagtactgtcctaaacacttgttttatcttttttgagtggaagtccgacgtccgagaggggctcgccattgggcttggcatgggcacagtcatgctgctcctcttctgcggctactcgctggtgatttgatatggctctaagctgatcctggagatggtgtacaccggagccaaggtcacaacatgatctttgtagtcctcactggttctcttttctcaaattgaccatggtgttgtaaatttgatcaatgaagaagattcaagaattaccgttttactggattgccatgggatttcgccattcagatttccaatgcaaatgatgaggtcgtttatcactgtggttcaagaaaactacccgaatcgtcttggggtattgtttgtcatccgccttcctccagttgtcagagttattgcacagacatttcttcaaattgcaatatcacatggtatccgtggagatgaggacgacattgcctccaagtctgctccaccggcatccatcgacggtgcaaggtacggattcgagcctccggtccttcaatctagccaccaggtagattcgtctcagtggtggtcggattcatctcgacggtggtcagatccagcagatagattgatggcaaagaggacgactccatgtccaggcgtactccccgccttgcatcgagattgctaggtcataatcgaagggtttacagggaggagatctgaacatagctcttcaatcccaaagttaacatcgttggttaccataattcttactgcttgcaagcccttttagaatattactgctgcgaggttcttgcaaagtccttgatgaagaagtcgaaggtgacgaacgccgaggccgtcatccttgatcgacgccaagaacctcacagcgcacctccttgtgatgctcttttctccaatgtcttctcttatctacatgcaggaaaaaatctacatgtttgatggcgtggatcagaaaaatgtggaaggacaagatttaagatgcactgccatggttggcggtctatttactgcatctcgaagcggcttgcattcaaaggttctgcacctctaaatatttctggtcgtgaagctgtctatgaaaggaagatgaaaattcagcaagttggattgatttatctttcccccctatggctgattcagcaacctgtattaattagtctatttgacatttgatatttcaatgctgttataggactatattgtacatgaccttgaaggagctgaccatgtgacagaccttgatcataaccatgttgcagagttgaagatattaggactatattaaacattgctgcatatagcatcaggatatgatgacatcagacttagaagtcaaacaacatcaaacttatcatcagcaacaacttggtttccgtcgctgcccaaacttcagcagaggcgatctaagaagaagcaagcgtatcggctcatgttctgacggccgtgttcacgtggtgtaagatctgcattgtggaatccttcgcccggacaagagagattggatcctcccgtccagacaacctgatagaacgacagtgtataagaacagggctcttaggacgccttttgtcaagttgggtcataactctaccctgagaattgagatagatgatcatgtggtgcaagatattgagtccctaatctttgatgacacacataacaaatggtaagcgtctccgtggatggagcctgaagtatattcaaattcaaggcatgccacaaagcatctcgcgtgtgggatgctccggcgtgtggaaagtagaaaagccaaataaatgggtacatgtacagcaggcgtgagttcttaaatactcagattccttgtccataggcaaatgcatagttcatacgaatcagagtacacgatgcacacaacttgatgtctctatcgttgttttcaacatgatgaacatgcgaatttcgtggtattaattgggaccgtctgatttctcaaagaaaataacaaaaagaaaagaaaagaaca

SEQ ID NO: 59942 - DNA, 1833 bp, Zea Mays
ggggatttttgtttttattttttagttttagtcgacggcgacggtggtgggagacgggacgggaggcacagccgcggataaataaagcgggggaggcgagctcccctgctagaccgacgacgtggtgtaccagcaatccatcggtgcggtttgcagcctggactggccaaggtcaaatttcctggtccaggtgttggatgactctgatgatgctaccacttcggcacttatcaaggaggaggtggagaaatggcagcgagagggtgtgcgcatagtataccggcaccgggtgatccgggatggctacaaggctggaaacctgaaatcagccatgaactgcagttacgtgaaagactatgagttcgttgtcatcttcgatgctgatttccaaccacaggcggacttcctgaagcgcaccgtgccccatttcaagggaaaggatgacgtcgggttggttcaggcgagatggtcgttcgtaaacaaggatgagaacttgctgaccaggcttcagaacataaatctttgcttccacttcgaggtggagcagcaggtgaacggggcgtttctcaacttcttcgggttcaatggcaccgcgggagtctggagaatcaaggcgcttgaggagtctggaggatggatggagaggacgacggtggaggacatggacatagctgttcgagcgcacctcaaagggtggaagtttctctttctaaacgatgtcgagtgtcagtgtgaattgccagaatcgtatgaagcgtacagaaagcagcagcaccggtggcactcaggtcccatgcaattgtttaggctctgctttgtggatataatcaaatctaagatcggtttctggaagaagttcaacctcatattcctcttcttcctgctccggaagctgatactacccttctactccttcaccctcttctgcgtgatcctccccatgacgatgttcgtccccgaagccgagctccccgcgtgggtggtgtgctacatcccggcgacgatgtccatcctcaacatcctcccgtccccgaaatcgttcccgttcatcgtcccgtacctgctgttcgagaacaccatgtcggtgaccaagttcaacgccatggtctccggcctgttccagctggggagcgcctacgagtgggtcgtcaccaagaagtcggggcgctcctccgagggcgacctcgtggccctcgtggagaagcactccaagcagcagagggtaggctcggcgcccaacctcgacgcgctgaccaaggagtcgaagggcaccgaggaggagaagaataagaagaagaggaagaagaagcacaacaggatctacaggaaggagctcgcgctgtccttcctcctgctgaccgcggccgcccgcagcttgctgtccgcccagggcgtccacttctacttcctcctgttccagggggtttcgttcttggtcgtcgggctcgacctgatcggcgagcaggtggattgatagcagttgaataatgggttatatatatatatatatatatatattttcgcttgaagaaatcctcgcaggcatcatcaaattcaaagggctctttgtgaagggaagagcgtcgccttcttggatgcggaaaccttgggtccctgttcctgttccaggaggggtcggaaacgtggggagctgtgtagataggtatagcttggggtttagcctgcgagatgcttttgttcttccaggtttcgattcttttgtaagaatatttgtgcccctacatgcaagggctcttttgtttttttctttttttgacagactttaccttcaaatgaagataatacttgtgttccattccatctcgctactac

SEQ ID NO: 59943 - DNA, 473 bp, Zea Mays
tggccattcaggtgacgccggtggattggatgtgcatgggtttttatatgaagggacagttgctgcagtgcgtgcttgaagcgtgggtacactgtcaaattttaatgtggttattagtggaggaaattactgtaggccctccctacagtacattcacttcaaaaaaaaaatagtgggggaaatggtacattaggctaaaatctaggagagcccatatgtcttgctgccttcaatagaaagccagatttttacagcatatggaatttaccagcttggagcataccggagtaggtatattctgtcgtgtttgaggctagtctggaagccacaaaactggagatgattgatgattgtaggggctaaaatctctgtcttattaaaaaattggataagaaagagattttagcacctccagtcccctccggttttgtggctatcaaactagcctataacgtgtgtcccctccggttttg

SEQ ID NO: 59944 - DNA, 1269 bp, Zea Mays
atctgttccgttgcgtgctcctctctcactccacggtccacgactgccaccagcgcttcccgctttcccagccacccgtcgcctccgcgtgtcgccccatccagccatcagttccaccccagctgcgaatccggcgcgctactaaccgccgggggaccgaaatttccccagccgcaagtttcgggaccggaacaacaatggcagcagcagccgtcgcctccagttccaccccgcggccgctccggttggcgcagcgcggggcggtctctgcgcacgcgtcccaccacgtcagcgccccgccccaccgctcccgcaggccgcggctctccgtctcggcctcagccggggtggaggggaccagcgggtcggagcggttctacttcaacttcaccgggttccccttcccgctcggcccgttcctcaaccgccgcaccatccgcaccgagtgtttctcgcgttggtgcgcgccggccgttggatcaggcggtgaagggcagcatatggctgttcgagcaggagcaggcgctgggcttcagcagcgtctccaccaacatccgcatgacggtcatcaagctcaagtccggtgggctctgggtgcacgcgcccatcgcgcccacgaaggagtgcatccagatgctcaaggagctggacgcgccggtggagcacatcgtgctgccgaccttcgcatacgagcacaaaatcttcgtcgggcccttctccaggaagttccccaaggctcagatatgggtggcgcccaggcagtggagctggccaatcaacctgccgctcgagttcttcgggatcttccgggccaagccgctcaaagatgaggatgacgccacgccctgggtcgccgaaatcgagcagaaggtgctcagctctccggaagttgggattgggccatatgtggaggtggcgttctaccataagccttcacggacactactggtgaccgatgctgtcatatttgttcctcaacagccaccggagtgtatcagcaaagaatctctgttggcatctgcgaagaatggactggcagtgaagctattgagcaaagggaaggaggttcccgatgaaccagttgttgacaataagctaaaccgtcagaaagggtgggagagaatggtacttcaaatactatttcttggtccgtcaaatctacttgagccaaatgcaagttttgctcaaatgtcgcaaaaattgatcgtctcacctattgtcaagacgctcgttttcagcaaagttccagagaagcagcaacaacaataa

SEQ ID NO: 59945 - DNA, 1474 bp, Zea Mays
atctgttccgttgcgtgctcctctctcactccacggtccacgactgccaccagcgcttcccgctttcccagccacccgtcgcctccgcgtgtcgccccatccagccatcagttccaccccagctgcgaatccggcgcgctactaaccgccgggggaccgaaatttccccagccgcaagtttcgggaccggaacaacaatggcagcagcagccgtcgcctccagttccaccccgcggccgctccggttggcgcagcgcggggcggtctctgcgcacgcgtcccaccacgtcagcgccccgccccaccgctcccgcaggccgcggctctccgtctcggcctcagccggggtggaggggaccagcgggtcggagcggttctacttcaacttcaccgggttccccttcccgctcggcccgttcctcaaccgccgcaccatccgcaccgaggcggtgaagggcagcatatggctgttcgagcaggagcaggcgctgggcttcagcagcgtctccaccaacatccgcatgacggtcatcaagctcaagtccggtgggctctgggtgcacgcgcccatcgcgcccacgaaggagtgcatccagatgctcaaggagctggacgcgccggtggagcacatcgtgctgccgaccttcgcatacgagcacaaaatcttcgtcgggcccttctccaggaagttccccaaggctcagatatgggtggcgcccaggcagtggagctggccaatcaacctgccgctcgagttcttcgggatcttccgggccaagccgctcaaagatgaggatgacgccacgccctgggtcgccgaaatcgagcagaaggtgctcagctctccggaagttgggattgggccatatgtggaggtggcgttctaccataagccttcacggacactactggtgaccgatgctgtcatatttgttcctcaacagccaccggagtgtatcagcaaagaatctctgttggcatctgcgaagaatggactggcagtgaagctattgagcaaagggaaggaggttcccgatgaaccagttgttgacaataagctaaaccgtcagaaagggtgggagagaatggtacttcaaatactatttcttggtccgtcaaatctacttgagccaaatgcaagttttgctcaaatgtcgcaaaaattgatcgtctcacctattgtcaagacgctcgttttcagcaaagttccagagaaggttggttggatactgcagtaacttcagcagcaaattcacctcctgataacagaacgttggagctagagcatgtgaaccatgctaacagcgttttatatactaattacagtcaaaacacatgattctctagtacatgtgttttaagacattggccactgatgtataaaaaaattatattggctcctccctttcttgtcaattaaggtcttagcattaggcagttctccagccctggtatagttcgcacaagggacaat

SEQ ID NO: 59946 - DNA, 1975 bp, Zea Mays
atctgttccgttgcgtgctcctctctcactccacggtccacgactgccaccagcgcttcccgctttcccagccacccgtcgcctccgcgtgtcgccccatccagccatcagttccaccccagctgcgaatccggcgcgctactaaccgccgggggaccgaaatttccccagccgcaagtttcgggaccggaacaacaatggcagcagcagccgtcgcctccagttccaccccgcggccgctccggttggcgcagcgcggggcggtctctgcgcacgcgtcccaccacgtcagcgccccgccccaccgctcccgcaggccgcggctctccgtctcggcctcagccggggtggaggggaccagcgggtcggagcggttctacttcaacttcaccgggttccccttcccgctcggcccgttcctcaaccgccgcaccatccgcaccgaggcggtgaagggcagcatatggctgttcgagcaggagcaggcgctgggcttcagcagcgtctccaccaacatccgcatgacggtcatcaagctcaagtccggtgggctctgggtgcacgcgcccatcgcgcccacgaaggagtgcatccagatgctcaaggagctggacgcgccggtggagcacatcgtgctgccgaccttcgcatacgagcacaaaatcttcgtcgggcccttctccaggaagttccccaaggctcagatatgggtggcgcccaggcagtggagctggccaatcaacctgccgctcgagttcttcgggatcttccgggccaagccgctcaaagatgaggatgacgccacgccctgggtcgccgaaatcgagcagaaggtgctcagctctccggaagttgggattgggccatatgtggaggtggcgttctaccataagccttcacggacactactggtgaccgatgctgtcatatttgttcctcaacagccaccggagtgtatcagcaaagaatctctgttggcatctgcgaagaatggactggcagtgaagctattgagcaaagggaaggaggttcccgatgaaccagttgttgacaataagctaaaccgtcagaaagggtgggagagaatggtacttcaaatactatttcttggtccgtcaaatctacttgagccaaatgcaagttttgctcaaatgtcgcaaaaattgatcgtctcacctattgtcaagacgctcgttttcagcaaagttccagagaaggtgagggactgggttgacaggatcgctgccgactggcgattccgacggataatcccttgccacttcgcagccccaataaacgcgagccggtcagactttctggctgcctttgccttcctcgacgagttcctccccgaacgcgccgccgcggctcccggcctctcgctgctcctcgcctccttcatggggaaggcggccagctacttccctccggatgacatgaagacgctctcgtctctggacgagttcctggtctccgttggcgctgtcaagaaaaccgtctctgggaggaagaggtgacgccggtggattggatgtgcatgggtttttatatgaagggacagttgctgcagtgcgtgcttgaagcgtgggtacactgtcaaattttaatgtggttattagtggaggaaattactgtaggccctccctacagtacattcacttcaaaaaaaaaatagtgggggaaatggtacattaggctaaaatctaggagagcccatatgtcttgctgccttcaatagaaagccagatttttacagcatatggaatttaccagcttggagcataccggagtaggtatattctgtcgtgtttgaggctagtctggaagccacaaaactggagatgattgatgattgtaggggctaaaatctctgtcttattaaaaaattggataagaaagagattttagcacctccagtcccctccggttttgtggctatcaaactagcctataacgtgtgtcccctccggttttg

SEQ ID NO: 59947 - DNA, 1520 bp, Zea Mays
atctgttccgttgcgtgctcctctctcactccacggtccacgactgccaccagcgcttcccgctttcccagccacccgtcgcctccgcgtgtcgccccatccagccatcagttccaccccagctgcgaatccggcgcgctactaaccgccgggggaccgaaatttccccagccgcaagtttcgggaccggaacaacaatggcagcagcagccgtcgcctccagttccaccccgcggccgctccggttggcgcagcgcggggcggtctctgcgcacgcgtcccaccacgtcagcgccccgccccaccgctcccgcaggccgcggctctccgtctcggcctcagccggggtggaggggaccagcgggtcggagcggttctacttcaacttcaccgggttccccttcccgctcggcccgttcctcaaccgccgcaccatccgcaccgaggcggtgaagggcagcatatggctgttcgagcaggagcaggcgctgggcttcagcagcgtctccaccaacatccgcatgacggtcatcaagctcaagtccggtgggctctgggtgcacgcgcccatcgcgcccacgaaggagtgcatccagatgctcaaggagctggacgcgccggtggagcacatcgtgctgccgaccttcgcatacgagcacaaaatcttcgtcgggcccttctccaggaagttccccaaggctcagatatgggtggcgcccaggcagtggagctggccaatcaacctgccgctcgagttcttcgggatcttccgggccaagccgctcaaagatgaggatgacgccacgccctgggtcgccgaaatcgagcagaaggtgctcagctctccggaagttgggattgggccatatgtggaggtggcgttctaccataagccttcacggacactactggtgaccgatgctgtcatatttgttcctcaacagccaccggagtgtatcagcaaagaatctctgttggcatctgcgaagaatggactggcagtgaagctattgagcaaagggaaggaggttcccgatgaaccagttgttgacaataagctaaaccgtcagaaagggtgggagagaatggtacttcaaatactatttcttggtccgtcaaatctacttgagccaaatgcaagttttgctcaaatgtcgcaaaaattgatcgtctcacctattgtcaagacgctcgttttcagcaaagttccagagaagttattgctgtagggctgcctccacgagcaggcgcacgccaaggtttgcttcacgcggcagggcgtcgaacagcaagctcattatgaccacaggcatcgcagttcaacacttcacaggccgaaacgcctgctgcgtcgcttactattgtctgacactgacagaagttccatattgcacgggcggacgtctcgaaaccagccgagcctcgtggatttcgttgaggcccgacccccgctggcgcacgttcacccgacccgattcaccttggccgttgcgcggagggcggcggggaacgggggtgat

SEQ ID NO: 59948 - DNA, 1206 bp, Zea Mays
cgatacaatagtttgattgattagctgttttcaacctaataatgtcctccgcgtgcaggtacaatgtgtttggttaacagggagcctgagcgatgagatacaaacgcacgtgcagagagacgcaggcagaatacggctgtggtacaaggttcagaatctcagttcttgaagcaaggaaactggagtagaagacttgcactcttgctctactaatgagaaaatcgagcaaaagatctgccccattcttgactgagagtaatgttgagcaagaaaacagttgttgcgacaggaacattttgctcaaatttccttcagatgaagcatggcagaaataaaaagttggtccgctgatgacagaaacgagcaagatatctgtcccttccaaaattgacatcaatgttgagcaagaaacggttgtggtggcagaaacttttttgaactaatttccttaatggcagtgcggtaaaaagcaaacggaaaatctgcggcaaaaccatagcagttggcagtaataatacttgggcaccttcaaatgcagcacagcagaaggggaaaaaaaagagcctgagtcaggcaggcctgacaggaacgatcctctacaggacaaaggaatcagcattaaaccaaatcctgactgttaatcacgctctggcccacaggtcattgacacatcaaccaggcttaaagtgcttgcctccttaggctgtctccagcagcgtcctctaaattccatcccctaaaggaatattctctgtcctttacagcacactctaaaagattctgtcctctatatattctcagtctccagcagtgtcccctaaattcggtctcctaaagctacagtgttaacagattccttttttccatttgtttttctgttttctttggtttgttcccatttcacgctatacaaatgatacgcaaaaaagtgtatttatcaattttcgaattgtcaaatttaattaacattgttattttgtgtgtaattgttattttgtgtgtaatttaattaacattgttatttcgtccagccccccttttttccatttgtttttctgttttctttggtttgttcccatttcacgctatacaaatgatacgcaaaaaagtgtatttatcaattttcgaattgtcaaatttaattaacattgttattttgtgtgtaattgttattttgtgtgtaatttaattaacattgttatttcg

SEQ ID NO: 59949 - DNA, 763 bp, Zea Mays
tttacccccacaggccacagcgacgccagagagcgaaatcgagccgttggcgtccggacacgggcgggctcttctcccaaagggccaacggtgcgcccactccggtcagtcactgcacggccacgcgacggtgttcgttcgcagtcgcggcaaagaaaatcggggaaaatcaagcgccgcttcagcgtgcggtcgctgtttcgtccataaaaggagggaggacggcgcggagggcttgacgacactgcagaccactccccagttcagtccccacaccgagctctgcccatcgcgcgcacacacacactctctctcccaccgttcacggtccagtccagagagctcaagagctcctgcagccatggcggttcccctgcttctcctcctcctgctgtccgtgttcacagcctcagatgcggcgttctgcgtgtgcaagccgggcatgtccgaccagatgatgcagtcggccatcgactacgcctgcagcaagggggccgactgcgcctccaccaccaagggcgcgccgtgctacggcaacggcaacaaggtggccgtctgctcctacatctgcaacagctactaccagagccgcagcggcatgggcgccacctgcgacttcaacggcgtcgccaccctcaccggcaccgaccccagctccgggacctgcaagttcgcctccggccccaggttggttgatctgtggggcgctcgtcccaggcccccacggggatcgggcaacgtgtccggcggaacaggccgacac

SEQ ID NO: 59950 - DNA, 2146 bp, Zea Mays
cagcttgcttccccaccttcagagcaagggattggaagaggcacaaggcagcccagggacccatttcaatctgatttttcaaggcgactcttaattttatttgttcctcatccccattattctccctccgccggtttctaacttatttctccagcatttgttgttaatgagctttggataggattatatataggtgctagctgtaggacttttaatatttttcttgatgaacatcgtatatttaattagcatgtttctataacacacaccttcgaattacactggctgctgtttttttttcttttttggaagaggattctagtttactgctgcttgtggagtaaggaaaatttaagcataagaggaagtataataataacaggctacaagagagcataataatggtgagctggagcaaagataaaaagagggaaggaaactggccgggttgtaagtctactgtcagtttctacacaggaattaagaaactttatgaaataaaaaaaatcgatcagtattagtattgaagagctaaccactctatagatataggctgcgaggacaagctgtatcattagttttgctataaataaagagagctacagtccactatccacccaagttcatgtttcagtgccatatatatgcccatatctttccgtgattcgatcgatctgaccagtgccttagtagcaaataaggctgctcgtttaccagtggacagcagtgggcagatcgatccatatccacatgttgctcaccagcaccagcagcagcacgcactgtcatctggatgcgccagcgatctcatttcatgtgtcatcatgatcggtggctagcagaataagagatgataagcggcaacctcaacaatgaagagctggggggcggcgggtgcaccaaggccgaggggccgggcgcggccggcggcgccggcgccgtcgtcgcaaagagtcccgtgctgtcgagctcccggcactggccgccgtcgacggagtcgaggatcgtgcgcgtgtcgcgggtcttcggcggcaaggaccggcacagcaaggtgaggacggtcaaggggctgcgcgaccggcgcgtgcggctgtccgtgccgacggcgatccagctctacgacctccaggaccggctgggcctcagccagccgagcaaggtggtggactggctgctcgacgccgcgcaggacgagatcgacaagctgcctccgctccagttcccgccgcaagggcaggacctcgtcgcccatctcccgccgtccatggtggcgcccttcgccaacgttgcagccgaccgggccgccgccgccgctgccgccgcgaacgcgtcggccgcgatggccgaaggcggcaaacgccactgccacggaggcatcaaagggctcatgggcatgggcctcaacaattctatcggcctcgccaacgccaccatgccgctggctcacggcttgtactacacgcccggtgagtcttggaccaatggaggcaatgccgccgtccatgatcatcaggtgagccacggcggcacctcgcctcagacggtggctcaccactcgccgttctcgtctctgctgtctcttgctgctccggggccccagctcgtcttctactcgccggaaggcggcggcttcgccatgaaagaagccaccgatcatcagttcgctgtagatagcctcgatcactcgcaaggccagctctcactgagctcagctagaagcttccttcaccccggcaaccagggatgatattaggtcactgatctctactgctccaagaaggtacgtagaacaataaagcttggtgtagtagtaatcaagtactcgtttgaaggctccgtaaagcttgcaactgcagttttgagatgttattgtttggtatgatcgagtagaggggctctagcgtagagagctgctagcatgcatagtaattaaggttaattttgcaggacatgcaatgcaattcgttgcttcttttttatacaaggaagtaaccggtcatggggtgtgtggtgtgtgtgtgtgttggcaatgtaataacaattttataattcgttcttgaatttgtgcttagctagattgcgttcctttttagactttgttttcatatatactcgatcaatccataccaatatttcgaggtgtttt

SEQ ID NO: 59951 - DNA, 1668 bp, Zea Mays
cgtgaatacaaacgtgatagcctcatgctcgcagctcgacaaacgacagcggcctagccccgcctccccgttatccgacctatccccagcgtcgttgggtcatctccggcagctcccccgctaacacctccatggcgtcgaagcaggcggcggctggcgaagcccttgcggcccaaatcaacggcatgtcccgccctgagatgtacgacatgatgtccaagatgaagaccatgatcgaccacgaccaggagacggtgcgccgcatgctcgtcgacaacccggacgtcacccgtgcgctctttcgggtttgaattttctatacaacttcctttttgcaggcacaagtggtccttggaatggtgaaaacacccaaaactacacaagctttggacatggtccaacccacagcagtgccaacagcaccttcctcagtcaaaactactgcaccagatcatgtcagcttgcccccgcccccattacctgctaaccagcagagtgttgctcaactttctgccccgttttcatctggcttgtctaatgtgggatcgaccatggaccctcctactatttcagcaaatccaccacaatcagcacaagcaaaaggataccttatccatcagatgccttcatcagctcctcagccatctcaacatccaaatatggccctacctcatgctcctccacagtattccaatgttccatcacatatacctatagttcatagtcagccacagcaacctttgcaaagtcctgcaatatataatcaacagttgcaaccacctttgccccaattgtcaaggccgccttttcctcatcagatgcattcacaagtaccaaattcatttgggttgactcatgcaaatgctccgcagcacatgttacaacaaccaatgtttcatccggttgcgaatcctcaaactaatttcctccctggccaaccaccattgcctagccagccaccaccacagcagctgtaccaggctagttcacactacaatacacaaaatacgactccaatgcaagttgataggggcgctccctgggggcgggcccctgatgctcccactcctggctctcatttccctggacaattacccgggttgcccggacaaatgacccaaggaattggtggtatccaggcaggccaagcaccactgacacctgagatggaaaagatgctagtccaacaagtcctgggcatgtccgctgagcagattaacatgttgcctccagaacaacggcaacaggttcttcaactacgagacatgctacggcaatgatagatcgtcagttgactgggtggagaagtttcagttcactgcagcagggatcccgagtgtgggtgcctgttcgttttagccttttgtatcacctgattgacatcccgactagtctgcagcctaccttggatatgcgattgtagaatggtagtcgttgtcgtcatttatagaaatgcttgggcaatatgttttccgaaggactcacaaatgaactgcatgttttggtccagttcagccgcttcaatttcaagtcgtgttaaacatttaccatagggcccctgtggctccgtaccaagtaccaaccactcctacggtgcattcatacgaaccttcataaaaagaatgaggatacaattctaggttctatttgaaccatcttaaatttgac

SEQ ID NO: 59952 - DNA, 1448 bp, Zea Mays
gtgatagcctcatgctcgcagctcgacaaacgacagcggcctagccccgcctccccgttatccgacctatccccagcgtcgttgggtcatctccggcagctcccccgctaacacctccatggcgtcgaagcaggcggcggctggcgaagcccttgcggcccaaatcaacggcatgtcccgccctgagatgtacgacatgatgtccaagatgaagaccatgatcgaccacgaccaggagacggtgcgccgcatgctcgtcgacaacccggacgtcacccgtgcgctctttcgggcacaagtggtccttggaatggtgaaaacacccaaaactacacaagctttggacatggtccaacccacagcagtgccaacagcaccttcctcagtcaaaactactgcaccagatcatgtcagcttgcccccgcccccattacctgctaaccagcagagtgttgctcaactttctgccccgttttcatctggcttgtctaatgtgggatcgaccatggaccctcctactatttcagcaaatccaccacaatcagcacaagcaaaaggataccttatccatcagatgccttcatcagctcctcagccatctcaacatccaaatatggccctacctcatgctcctccacagtattccaatgttccatcacatatacctatagttcatagtcagccacagcaacctttgcaaagtcctgcaatatataatcaacagttgcaaccacctttgccccaattgtcaaggccgccttttcctcatcagatgcattcacaagtaccaaattcatttgggttgactcatgcaaatgctccgcagcacatgttacaacaaccaatgtttcatccggttgcgaatcctcaaactaatttcctccctggccaaccaccattgcctagccagccaccaccacagcagctgtaccagctgacacctgagatggaaaagatgctagtccaacaagtcctgggcatgtccgctgagcagattaacatgttgcctccagaacaacggcaacaggttcttcaactacgagacatgctacggcaatgatagatcgtcagttgactgggtggagaagtttcagttcactgcagcagggatcccgagtgtgggtgcctgttcgttttagccttttgtatcacctgattgacatcccgactagtctgcagcctaccttggatatgcgattgtagaatggtagtcgttgtcgtcatttatagaaatgcttgggcaatatgttttccgaaggactcacaaatgaactgcatgttttggtccagttcagccgcttcaatttcaagtcgtgttaaacatttaccatagggcccctgtggctccgtaccaagtaccaaccactcctacggtgcattcatacgaaccttcataaaaagaatgaggatacaattctaggttctatttgaaccatcttaaatttgac

SEQ ID NO: 59953 - DNA, 1728 bp, Zea Mays
ctaatcagcgtgttttgttttgtttcgtctcgtcgaccgagccgtccgtcgtcctccctggcggtctggccgcctccgccttcctccccgtgcgtctcacccttttcctctacagcttcctctgcccaatcagctcgtcctctcccctcctctccctcccgtgaactgctaaaatccctcgccaagcatttccgtcgggttaggtggtagataagccgaaaatcgagtggaaaagcatcaatcgagtgctgcgctagttgcctggttcgtcccaacaaattccaccgggaatcagggtcgtccggcagcggctgaggcgtctgggttctggaggagcggccgtcggtgaggggggatggggggcggcggcggatcctccgggccggagctgtcgacggacaacatgaaggggatagtcctggcgctgctctccagcggcttcatcggcgccagcttcatcatcaagaagaagggtctccgccgggccgctgtcgcctccggcgtccgtgcagtgcagtgctggctcatttcattctgaacgagaggctgcatgccctcggggtgctcggctgcgtgatgtgcattgcagggtctgtggtcattgttatccacgctccacaggagcaggagattacttcagttaaggaaatatggaacatggcgacacaacctgctttcttgttatatgttgcgtcagttattgtgattgtttttgtcctggtgttctatttctcccctctctatgggcagtccaatgtgttgatctacactgccatttgctctttgatgggctctctttcggttatgagtgttaaagctcttggtacatcactaaagcttacttttgagggaacaaaccaattaatatatccagagacttggttctttatgcttgttgtggctacttgtgtgttgactcagatgaattatctgaacaaggcacttgacacgttcaacacggcaattgtatctccaatatattatgtaatgttcacaactcttacaatacttgccagcgtcataatgttcaaggattggtctggtcaaagccctggaagcgtcatttctgaaatttgtggcttggttgtggtgttgtctggtaccattttgttgcatgtgacgaaggattatgaaaggatcccacaatcaagaagtgtttatgcaccattatctccctctttgacaactagattaaatggagaattgttgaagcatgtcgtggatgagaggacttcggacgaagaaaaggccttgagaagacaggagatgtattagcgtgcgtcagaatatcaaaggaaatataggttactctgatggattctccggcaggggcttgtacatggcgtagtgataaccttcccatagcgattgttgattcctccattacagtttgttggtttgtgtatataactgcagcaatttgtggctaccgagtgattgcaaatctgccgaggtggtggaaggctgcagagttccaccaaaaagaatctaagtcgggtgcatagattcttatcgaattcccttcttcctttcgtaacttcctcagttttgtccacggcatttgttccatgtgagttttagagtgaatcacggaccctatgcaactgatgtacattattattgtcatagtgaagttcgtgcaactgtgaatgatgtacattattattgtcattgatgcttctgcgaaattctggtaccatggcatctctgccatttatctagtatggc

SEQ ID NO: 59954 - DNA, 1814 bp, Zea Mays
ctaatcagcgtgttttgttttgtttcgtctcgtcgaccgagccgtccgtcgtcctccctggcggtctggccgcctccgccttcctccccgtgcgtctcacccttttcctctacagcttcctctgcccaatcagctcgtcctctcccctcctctccctcccgtgaactgctaaaatccctcgccaagcatttccgtcgggttaggtggtagataagccgaaaatcgagtggaaaagcatcaatcgagtgctgcgctagttgcctggttcgtcccaacaaattccaccgggaatcagggtcgtccggcagcggctgaggcgtctgggttctggaggagcggccgtcggtgaggggggatggggggcggcggcggatcctccgggccggagctgtcgacggacaacatgaaggggatagtcctggcgctgctctccagcggcttcatcggcgccagcttcatcatcaagaagaagggtctccgccgggccgctgtcgcctccggcgtccgtgcagtgattgtaggtgagattgccaatttcgtggcatatgctttcgcccccgctgttctggttactccccttggagcactcagcataattgttagtgctggctcatttcattctgaacgagaggctgcatgccctcggggtgctcggctgcgtgatgtgcattgcagggtctgtggtcattgttatccacgctccacaggagcaggagattacttcagttaaggaaatatggaacatggcgacacaacctgctttcttgttatatgttgcgtcagttattgtgattgtttttgtcctggtgttctatttctcccctctctatgggcagtccaatgtgttgatctacactgccatttgctctttgatgggctctctttcggttatgagtgttaaagctcttggtacatcactaaagcttacttttgagggaacaaaccaattaatatatccagagacttggttctttatgcttgttgtggctacttgtgtgttgactcagatgaattatctgaacaaggcacttgacacgttcaacacggcaattgtatctccaatatattatgtaatgttcacaactcttacaatacttgccagcgtcataatgttcaaggattggtctggtcaaagccctggaagcgtcatttctgaaatttgtggcttggttgtggtgttgtctggtaccattttgttgcatgtgacgaaggattatgaaaggatcccacaatcaagaagtgtttatgcaccattatctccctctttgacaactagattaaatggagaattgttgaagcatgtcgtggatgagaggacttcggacgaagaaaaggccttgagaagacaggagatgtattagcgtgcgtcagaatatcaaaggaaatataggttactctgatggattctccggcaggggcttgtacatggcgtagtgataaccttcccatagcgattgttgattcctccattacagtttgttggtttgtgtatataactgcagcaatttgtggctaccgagtgattgcaaatctgccgaggtggtggaaggctgcagagttccaccaaaaagaatctaagtcgggtgcatagattcttatcgaattcccttcttcctttcgtaacttcctcagttttgtccacggcatttgttccatgtgagttttagagtgaatcacggaccctatgcaactgatgtacattattattgtcatagtgaagttcgtgcaactgtgaatgatgtacattattattgtcattgatgcttctgcgaaattctggtaccatggcatctctgccatttatctagtatggc

SEQ ID NO: 59955 - DNA, 1834 bp, Zea Mays
ctaatcagcgtgttttgttttgtttcgtctcgtcgaccgagccgtccgtcgtcctccctggcggtctggccgcctccgccttcctccccgtgcgtctcacccttttcctctacagcttcctctgcccaatcagctcgtcctctcccctcctctccctcccgtgaactgctaaaatccctcgccaagcatttccgtcgggttaggtggtagataagccgaaaatcgagtggaaaagcatcaatcgagtgctgcgctagttgcctggttcgtcccaacaaattccaccgggaatcagggtcgtccggcagcggctgaggcgtctgggttctggaggagcggccgtcggtgaggggggatggggggcggcggcggatcctccgggccggagctgtcgacggacaacatgaaggggatagtcctggcgctgctctccagcggcttcatcggcgccagcttcatcatcaagaagaagggtctccgccgggccgctgtcgcctccggcgtccgtgcaggtgtaggcgggtactcatacctcatggagcccctgtggtgggttggcatgatcattatgattgtaggtgagattgccaatttcgtggcatatgctttcgcccccgctgttctggttactccccttggagcactcagcataattgttagtgctggctcatttcattctgaacgagaggctgcatgccctcggggtgctcggctgcgtgatgtgcattgcagggtctgtggtcattgttatccacgctccacaggagcaggagattacttcagttaaggaaatatggaacatggcgacacaacctgctttcttgttatatgttgcgtcagttattgtgattgtttttgtcctggtgttctatttctcccctctctatgggcagtccaatgtgttgatctacactgccatttgctctttgatgggctctctttcggttatgagtgttaaagctcttggtacatcactaaagcttacttttgagggaacaaaccaattaatatatccagagacttggttctttatgcttgttgtggctacttgtgtgttgactcagatgaattatctgaacaaggcacttgacacgttcaacacggcaattgtatctccaatatattatgtaatgttcacaactcttacaatacttgccagcgtcataatgttcaaggattggtctggtcaaagccctggaagcgtcatttctgaaatttgtggcttggttgtggtgttgtctggtaccattttgttgcatgtgacgaaggattatgaaaggatcccacaatcaagaaattaaatggagaattgttgaagcatgtcgtggatgagaggacttcggacgaagaaaaggccttgagaagacaggagatgtattagcgtgcgtcagaatatcaaaggaaatataggttactctgatggattctccggcaggggcttgtacatggcgtagtgataaccttcccatagcgattgttgattcctccattacagtttgttggtttgtgtatataactgcagcaatttgtggctaccgagtgattgcaaatctgccgaggtggtggaaggctgcagagttccaccaaaaagaatctaagtcgggtgcatagattcttatcgaattcccttcttcctttcgtaacttcctcagttttgtccacggcatttgttccatgtgagttttagagtgaatcacggaccctatgcaactgatgtacattattattgtcatagtgaagttcgtgcaactgtgaatgatgtacattattattgtcattgatgcttctgcgaaattctggtaccatggcatctctgccatttatctagtatggc

SEQ ID NO: 59956 - DNA, 1012 bp, Zea Mays
gccttgtttgtttagtccctgattttgtttctaccccatggctcatgtcctaatttttttaattcaatttgattaacctcttatccttgaatccagaatattgtctagtgccatgtaattttgtagatttctttggtagaataattatgatatttgcaaaacaacgcactgaagtgtgttactagagttaccacaaatattaagctactggttcctgttctgctttatggagtaagtagtggtttttttttttgctgtaggcacttgacacgttcaacacggcaattgtatctccaatatattatgtaatgttcacaactcttacaatacttgccagcgtcataatgttcaaggattggtctggtcaaagccctggaagcgtcatttctgaaatttgtggcttggttgtggtgttgtctggtaccattttgttgcatgtgacgaaggattatgaaaggatcccacaatcaagaaattaaatggagaattgttgaagcatgtcgtggatgagaggacttcggacgaagaaaaggccttgagaagacaggagatgtattagcgtgcgtcagaatatcaaaggaaatataggttactctgatggattctccggcaggggcttgtacatggcgtagtgataaccttcccatagcgattgttgattcctccattacagtttgttggtttgtgtatataactgcagcaatttgtggctaccgagtgattgcaaatctgccgaggtggtggaaggctgcagagttccaccaaaaagaatctaagtcgggtgcatagattcttatcgaattcccttcttcctttcgtaacttcctcagttttgtccacggcatttgttccatgtgagttttagagtgaatcacggaccctatgcaactgatgtacattattattgtcatagtgaagttcgtgcaactgtgaatgatgtacattattattgtcattgatgcttctgcgaaattctggtaccatggcatctctgccatttatctagtatggc

SEQ ID NO: 59957 - DNA, 554 bp, Zea Mays
gcctttgttcttgcagggtgaggaactgaggaagcagatcggcgctgcggcctacatcgagtgcagttccaaaacccagcagaacgtcaagtctgtcttcgatacggccatcaaagtggtccttcagcccccacggaggagggaggcagtgcctgccaggaagaagaacaggcgtggctccggatgctctataatgaaccttgtgtgtggcagcacatgtgctgcttagggagtctactagaacactgaaccggaagggaggtgaaggcgtgattcatggtgtgtaatgtgctgtggcaactggcaagttagtttgctatagatgaggatgactgctgcttttgttttccttggcccatctgctgtagttcgtcaggctcttcaagggctgactttttaccagactgcagtgttgtgtaagaagtttgctagacgctgtaactgtaatgttctccgctgatgtggtataactaagatacgagtaagcttgagcgtgttctgggccctgaatgttcgttgtcgtcgatctgctatgattctgggagtgatttgct

SEQ ID NO: 59958 - DNA, 1614 bp, Zea Mays
ccgctttttcaattttcgggggccgtttcttggtttttcctctttctcctccctcctcctcctcctccttcctccttcctctcgctcgctcgctcccctcccttcccccgctccctctcctcctcctcccttcattcctacctccgctcgcgccactctcctccgaccgaggggcagggaacggtgcccacccgcccgcccgtccgaccgccatggtctcctggcggcgcagcgcgtcctggctgtcgtcggcgtcgcgctcctcgctcggcaccgccgtcggcggggaggccaaggtcacgccggaggcggatccggcggcgcagcacgacgaggccgacgaggagcgctggtcgcgcctgctgccggagctgctcacggagatcatgcgccgcgtcgacgccggcgccgagcgctggccgccgcgccgggacgtcgtggtctgcgcctgcgtgtgccgccggtggcgcgacgccgcggtctcggtcgtccgcccgccgctcgagtgcggcaggatcaccttcccgtcgtcgctcaagcagcctggaccaagggatgcgccgatgcactgttttatccggagggacaaaaaaaattcaaccttttctctctatctcagcttaacgcaggcctaacggataaagggaagtttcttttggctgctcgaaggttcagacaaggagcacatacagaatatatcatctcttatgactatgatgatctgcacccaagaagcagttcatatgttggaaagttgagatctgacttcttggggacaaagttcatcatctatgatagccaggcgccatatgacggtgccaaaccttcgaggacccgatccactcgccgctttgcaagcaagcagataagcccacaggtttcaggcggcaatttcgaagttggacaagtgacctacaggttcaacttcatgaaatcaagagggccgagacggatgcagtgcaatatccagtgccctgtaggccagggcagcgcttcggatccgtccaaggagaaaacaccctcgccgagttccttggacctgaagaacaaggctccaagatggcacgaccatcttcagtgttggtgcttaaatttccacggtcgggtgaccgtcgcctccgtgaagaacttccagctcgtcgccacagctggctccggcggtccatggggcgtcggagacgaggagacggtgatcctgcagttcgggaagatcgaggacgatgcgtttacgatggactaccggcagcctctgtccgccttccaggcgttcgccatctgcctgaccagctttggcacgaagctggcctgtgaataaatggttgccggtttaccaactatgttggggatcagattgtagggggtagtctgaactagttgccctgagcacctcagatgggagaaaactggcgataagaaacagggcggacgttgtccctataagctttgactccttgtaatcgcctaaatgattgatttatatatatatgatgtgcgcctatgttgttgaagagatgacgatgacttatagttgtaaatggcactccctttcgtttggtgacattcactcatcactcataatgcctcattccgttgtaatgtgctgttgaacttccc

SEQ ID NO: 59959 - DNA, 2428 bp, Zea Mays
aattttcgggggccgtttcttggtttttcctctttctcctccctcctcctcctcctccttcctccttcctctcgctcgctcgctcccctcccttcccccgctccctctcctcctcctcccttcattcctacctccgctcgcgccactctcctccgaccgaggggcagggaacggtgcccacccgcccgcccgtccgaccgccatggtctcctggcggcgcagcgcgtcctggctgtcgtcggcgtcgcgctcctcgctcggcaccgccgtcggcggggaggccaaggtcacgccggaggcggatccggcggcgcagcacgacgaggccgacgaggagcgctggtcgcgcctgctgccggagctgctcacggagatcatgcgccgcgtcgacgccggcgccgagcgctggccgccgcgccgggacgtcgtggtctgcgcctgcgtgtgccgccggtggcgcgacgccgcggtctcggtcgtccgcccgccgctcgagtgcggcaggatcaccttcccgtcgtcgctcaagcaggtcagtgagacagaaatcaccttcccgtcgtcgtcgctcatggtaaaaaaataaaataaaaaataccggctctttcgatctgtttcgtctaaatcgcctgaaatctacgtggctccaaattgctgaggtttttgggggcacatggttactatgtggctgtgcgttttcttattatccatttctatgcttgattgcttctgacaaacaaaaccagtagctacacatcctatcggtatctttgatttgaagctctaggaatgcaagagatgtcttgtgcgcccttttcttatgcggtttgactccatctcaggtgatctctcgatcaattgctggatttcatcttcttcgaattcattttccgtttctgaataggcttctacgcctattcaattttatttgcacgcagaaatgcgaaaaaaatgtatatctaattcttatgtcttatccttataacgatcagcagatccatgtatgtactctaaccatttgtatatttaaattctgattattgttcgtctggcgctgctgtaatgttccttgtgcgttaggatttagaacgaagccgcatatattcaacttaatctctatcctctctctttttggctacatagcactatatttttggtggctagtgctaataaagtatgacagtagtggagaagttggcaccacacggactttctttatttatgtttacatgtgatagcttgattttgtttggtatgtcaatagcgatatgataaatacctataaaagcctgcttctccgtttgggtttattaaatattgatttaatggactcttatattgtttcttttgcacagcctggaccaagggatgcgccgatgcactgttttatccggagggacaaaaaaaattcaaccttttctctctatctcagcttaacgcaggccctaacggataaagggaagtttcttttggctgctcgaaggttcagacaaggagcacatacagaatatatcatctcttatgactatgatgatctgcacccaagaagcagttcatatgttggaaagttgagatctgacttcttggggacaaagttcatcatctatgatagccaggcgccatatgacggtgccaaaccttcgaggacccgatccactcgccgctttgcaagcaagcagataagcccacaggtttcaggcggcaatttcgaagttggacaagtgacctacaggttcaacttcatgaaatcaagagggccgagacggatgcagtgcaatatccagtgccctgtaggccagggcagcgcttcggatccgtccaaggagaaaacaccctcgccgagttccttggacctgaagaacaaggctccaagatggcacgaccatcttcagtgttggtgcttaaatttccacggtcgggtgaccgtcgcctccgtgaagaacttccagctcgtcgccacagctggctccggcggtccatggggcgtcggagacgaggagacggtgatcctgcagttcgggaagatcgaggacgatgcgtttacgatggactaccggcagcctctgtccgccttccaggcgttcgccatctgcctgaccagctttggcacgaagctggcctgtgaataaatggttgccggtttaccaactatgttggggatcagattgtagggggtagtctgaactagttgccctgagcacctcagatgggagaaaactggcgataagaaacagggcggacgttgtccctataagctttgactccttgtaatcgcctaaatgattgatttatatatatatgatgtgcgcctatgttgttgaagagatgacgatgacttatagttgtaaatggcactccctttcgtttggtgacattcactcatcactcataatgcctcattccgttgtaatgtgctgttgaacttccc

SEQ ID NO: 59960 - DNA, 1099 bp, Zea Mays
tcaccttcccgtcgtcgtcgctcatgcctggaccaagggatgcgccgatgcactgttttatccggagggacaaaaaaaattcaaccttttctctctatctcagcttaacgcaggccctaacggataaagggaagtttcttttggctgctcgaaggttcagacaaggagcacatacagaatatatcatctcttatgactatgatgatctgcacccaagaagcagttcatatgttggaaagttgagatctgacttcttggggacaaagttcatcatctatgatagccaggcgccatatgacggtgccaaaccttcgaggacccgatccactcgccgctttgcaagcaagcagataagcccacaggtttcaggcggcaatttcgaagttggacaagtgacctacaggttcaacttcatgaaatcaagagggccgagacggatgcagtgcaatatccagtgccctgtaggccagggcagcgcttcggatccgtccaaggagaaaacaccctcgccgagttccttggacctgaagaacaaggctccaagatggcacgaccatcttcagtgttggtgcttaaatttccacggtcgggtgaccgtcgcctccgtgaagaacttccagctcgtcgccacagctggctccggcggtccatggggcgtcggagacgaggagacggtgatcctgcagttcgggaagatcgaggacgatgcgtttacgatggactaccggcagcctctgtccgccttccaggcgttcgccatctgcctgaccagctttggcacgaagctggcctgtgaataaatggttgccggtttaccaactatgttggggatcagattgtagggggtagtctgaactagttgccctgagcacctcagatgggagaaaactggcgataagaaacagggcggacgttgtccctataagctttgactccttgtaatcgcctaaatgattgatttatatatatatgatgtgcgcctatgttgttgaagagatgacgatgacttatagttgtaaatggcactccctttcgtttggtgacattcactcatcactcataatgcctcattccgttgtaatgtgctgttgaacttccc

SEQ ID NO: 59961 - DNA, 1302 bp, Zea Mays
gtttcgtctaaatcgcctgaaatctacgtggctccaaattgctgaggtttttgggggcacatggttactatgtggctgtgcgttttcttattatccatttctatgcttgattgcttctgacaaacaaaaccagtagctacacatcctatcggtatctttgatttgaagctctaggaatgcaagagatgtcttgtgcgcccttttcttatgcggtttgactccatctcagcctggaccaagggatgcgccgatgcactgttttatccggagggacaaaaaaaattcaaccttttctctctatctcagcttaacgcaggccctaacggataaagggaagtttcttttggctgctcgaaggttcagacaaggagcacatacagaatatatcatctcttatgactatgatgatctgcacccaagaagcagttcatatgttggaaagttgagatctgacttcttggggacaaagttcatcatctatgatagccaggcgccatatgacggtgccaaaccttcgaggacccgatccactcgccgctttgcaagcaagcagataagcccacaggtttcaggcggcaatttcgaagttggacaagtgacctacaggttcaacttcatgaaatcaagagggccgagacggatgcagtgcaatatccagtgccctgtaggccagggcagcgcttcggatccgtccaaggagaaaacaccctcgccgagttccttggacctgaagaacaaggctccaagatggcacgaccatcttcagtgttggtgcttaaatttccacggtcgggtgaccgtcgcctccgtgaagaacttccagctcgtcgccacagctggctccggcggtccatggggcgtcggagacgaggagacggtgatcctgcagttcgggaagatcgaggacgatgcgtttacgatggactaccggcagcctctgtccgccttccaggcgttcgccatctgcctgaccagctttggcacgaagctggcctgtgaataaatggttgccggtttaccaactatgttggggatcagattgtagggggtagtctgaactagttgccctgagcacctcagatgggagaaaactggcgataagaaacagggcggacgttgtccctataagctttgactccttgtaatcgcctaaatgattgatttatatatatatgatgtgcgcctatgttgttgaagagatgacgatgacttatagttgtaaatggcactccctttcgtttggtgacattcactcatcactcataatgcctcattccgttgtaatgtgctgttgaacttccc

SEQ ID NO: 59962 - DNA, 1024 bp, Zea Mays
gtctcacctacaacatttagggggttcttctgcctaaatccctaacggataaagggaagtttcttttggctgctcgaaggttcagacaaggagcacatacagaatatatcatctcttatgactatgatgatctgcacccaagaagcagttcatatgttggaaagttgagatctgacttcttggggacaaagttcatcatctatgatagccaggcgccatatgacggtgccaaaccttcgaggacccgatccactcgccgctttgcaagcaagcagataagcccacaggtttcaggcggcaatttcgaagttggacaagtgacctacaggttcaacttcatgaaatcaagagggccgagacggatgcagtgcaatatccagtgccctgtaggccagggcagcgcttcggatccgtccaaggagaaaacaccctcgccgagttccttggacctgaagaacaaggctccaagatggcacgaccatcttcagtgttggtgcttaaatttccacggtcgggtgaccgtcgcctccgtgaagaacttccagctcgtcgccacagctggctccggcggtccatggggcgtcggagacgaggagacggtgatcctgcagttcgggaagatcgaggacgatgcgtttacgatggactaccggcagcctctgtccgccttccaggcgttcgccatctgcctgaccagctttggcacgaagctggcctgtgaataaatggttgccggtttaccaactatgttggggatcagattgtagggggtagtctgaactagttgccctgagcacctcagatgggagaaaactggcgataagaaacagggcggacgttgtccctataagctttgactccttgtaatcgcctaaatgattgatttatatatatatgatgtgcgcctatgttgttgaagagatgacgatgacttatagttgtaaatggcactccctttcgtttggtgacattcactcatcactcataatgcctcattccgttgtaatgtgctgttgaacttccc

SEQ ID NO: 59963 - DNA, 1104 bp, Zea Mays
gattttgcaaacttaatggaattctggaaactctgtgtgatccatttccactcacataatcggttcaacttataatctgtgaaagcaagaaaatgttgaaagatcgggtcctgtcaagtccctaacggataaagggaagtttcttttggctgctcgaaggttcagacaaggagcacatacagaatatatcatctcttatgactatgatgatctgcacccaagaagcagttcatatgttggaaagttgagatctgacttcttggggacaaagttcatcatctatgatagccaggcgccatatgacggtgccaaaccttcgaggacccgatccactcgccgctttgcaagcaagcagataagcccacaggtttcaggcggcaatttcgaagttggacaagtgacctacaggttcaacttcatgaaatcaagagggccgagacggatgcagtgcaatatccagtgccctgtaggccagggcagcgcttcggatccgtccaaggagaaaacaccctcgccgagttccttggacctgaagaacaaggctccaagatggcacgaccatcttcagtgttggtgcttaaatttccacggtcgggtgaccgtcgcctccgtgaagaacttccagctcgtcgccacagctggctccggcggtccatggggcgtcggagacgaggagacggtgatcctgcagttcgggaagatcgaggacgatgcgtttacgatggactaccggcagcctctgtccgccttccaggcgttcgccatctgcctgaccagctttggcacgaagctggcctgtgaataaatggttgccggtttaccaactatgttggggatcagattgtagggggtagtctgaactagttgccctgagcacctcagatgggagaaaactggcgataagaaacagggcggacgttgtccctataagctttgactccttgtaatcgcctaaatgattgatttatatatatatgatgtgcgcctatgttgttgaagagatgacgatgacttatagttgtaaatggcactccctttcgtttggtgacattcactcatcactcataatgcctcattccgttgtaatgtgctgttgaacttccc

SEQ ID NO: 59964 - DNA, 2283 bp, Zea Mays
ccgcacgcatcgaagccgctgcggtctgcgctctgcggtggtgggctctggctctgcctctggctctggcgcaggggcgtgggggacgggactggcattgccactgcccagccgcgggagcggcccctccggggggacaagcgcattaatgccactgccgcctccgccgatttaactccccgcctctatcgccctcaccttcacctgtacgccgtcccgcttcgcttcggagaggtcgctgcctgtgcctgccatcaacgttccctcgctggttgagatgtttggccgaaacatcaatgatggtgaaactgaagagaagaatggcgaggaagaggatggcgacggagaaaagaagcacgcatcacacatgttctgcaagacactcacagcttctgataccagcacacatgggggattctctgttccacggcgagctgcagaggactgctttccaccattggactatgagcagcttaggccttcccaagagcttattgccaaggatttgcatggcatgaaatggaggttccgtcatatctatagaggtcaacctcgaaggcatcttctgacaactggatggagttcatttatcaataagaagaaactagtctcaggggatgcagtcttgtttcttagaggtaatgatggtgagctaagattgggtgtgaggagagcagttcaactgaaaaatgaagctctacttgaagctgtcaactgtactgattcgaagctacttatgctgtctgctgtggccaattctttggacaacagaagtatatttcacatctgtttcaacccaagggttggtgcatcagaatttattgtgccgtattgcaagttcttgaagagcttgaactatcacttttcagttggaaccagatttaaagttggctgcgagaatgaagatgctaacgagaggtcctttggattgatcataggtattagtgaagttgatcccatacactggcctggatcaaaatggaaatctctcctgataaagtgggatggtgctactaagtacagccaccagaatagagtatctccatgggacatcgagggagttggcagctcagtttcagttactcaccgactttcctcttctgtttcgaagcgaacaaaactgtgcttccctccaagcgatttggacacgccaattctagatggaaacggtcgtccagactcagtggaaactgaacgtttccacagggtcttgcaaggtcaagaattggtgcactctagtattcatggtactgcatgctctcattcatcagatagccccagatgtcaaggctcttatggcaggagattctctgctgatgcgtggaactgcaagatgaatgatgtaatgagtgggcctcgacacctaaatgccactgggtttgcttaccagcccctaggcttcagtgaatctgtcaaattctcagaggtcttgcaaggtcaagaaatgtctcaggcggttccttccttcatgagatctgctttcaactctggcacgcagaatggcagggttcgaccatttgattatgtgcagagatcagatgcaactcaaggatacgctctccagcagtttaatctgccagcaacagaagtgcattcgccctcttctgttcttatgtttaaccaaaccatggtaccacatgctgagctagatggtgcgaccaaccgtgaagaagtacatggcagcaggtacttgtcatccaatgcaatagggagagaagctgaaccatggccatccatgcagcagcaaagagcgagtgtaaatggaagcgagcctctcgacacaactgaagcctcagctcctgcaaggaacgctgaatctggatcggtcggcaggggcgcggggcgaagcaactgtaagctttttggtttctccctgactgagaagatccttggaacggatggtggtggtgtgaaagaagggaactacgaagtggaccgtcaaactccccgggtgctagacttgtttgggcacggttctacgcctggagctctgcatgctctctgtgctgctcccttgggaatatgatgctgttctgcctagttttacaacagttagatttatgtaatccttcagccattttcatcgcgttgtacttgaccaatatgtccagcgtatgatttccagttttaattgtatgctgatgctacatatcctctcttgagatccatgcatgagaattctggcagaatgaacagaggtaaattgatgtccagctgttttctttatgaacaaataggtaaattgatgtttaatttcagaataaaaaccatggcgaatttgat

SEQ ID NO: 59965 - DNA, 2273 bp, Zea Mays
cgcaggggcgtgggggacgggactggcattgccactgcccagccgcgggagcggcccctccggggggacaagcgcattaatgccactgccgcctccgccgatttaactccccgcctctatcgccctcaccttcacctgtacgccgtcccgcttcgcttcggagaggtcgctgcctgtgcctgccatcaacgttccctcgctggttgagatgtttggccgaaacatcaatgatggtgaaactgaagagaagaatggcgaggaagaggatggcgacggagaaaagaagcacgcatcacacatgttctgcaagacactcacagcttctgataccagcacacatgggggattctctgttccacggcgagctgcagaggactgctttccaccattggactatgagcagcttaggccttcccaagagcttattgccaaggatttgcatggcatgaaatggaggttccgtcatatctatagaggtcaacctcgaaggcatcttctgacaactggatggagttcatttatcaataagaagaaactagtctcaggggatgcagtcttgtttcttagaggtaatgatggtgagctaagattgggtgtgaggagagcagttcaactgaaaaatgaagctctacttgaagctgtcaactgtactgattcgaagctacttatgctgtctgctgtggccaattctttggacaacagaagtatatttcacatctgtttcaacccaagaaatttattgtgaagcacagttaagtggccttcaaaatttggatctctgcacctccaagggttggtgcatcagaatttattgtgccgtattgcaagttcttgaagagcttgaactatcacttttcagttggaaccagatttaaagttggctgcgagaatgaagatgctaacgagaggtcctttggattgatcataggtattagtgaagttgatcccatacactggcctggatcaaaatggaaatctctcctgataaagtgggatggtgctactaagtacagccaccagaatagagtatctccatgggacatcgagggagttggcagctcagtttcagttactcaccgactttcctcttctgtttcgaagcgaacaaaactgtgcttccctccaagcgatttggacacgccaattctagatggaaacggtcgtccagactcagtggaaactgaacgtttccacagggtcttgcaaggtcaagaattggtgcactctagtattcatggtactgcatgctctcattcatcagatagccccagatgtcaaggctcttatggcaggagattctctgctgatgcgtggaactgcaagatgaatgatgtaatgagtgggcctcgacacctaaatgccactgggtttgcttaccagcccctaggcttcagtgaatctgtcaaattctcagaggtcttgcaaggtcaagaaatgtctcaggcggttccttccttcatgagatctgctttcaactctggcacgcagaatggcagggttcgaccatttgattatgtgcagagatcagatgcaactcaaggatacgctctccagcagtttaatctgccagcaacagaagtgcattcgccctcttctgttcttatgtttaaccaaaccatggtaccacatgctgagctagatggtgcgaccaaccgtgaagaagtacatggcagcaggtacttgtcatccaatgcaatagggagagaagctgaaccatggccatccatgcagcagcaaagagcgagtgtaaatggaagcgagcctctcgacacaactgaagcctcagctcctgcaaggaacgctgaatctggatcggtcggcaggggcgcggggcgaagcaactgtaagctttttggtttctccctgactgagaagatccttggaacggatggtggtggtgtgaaagaagggaactacgaagtggaccgtcaaactccccgggtgctagacttgtttgggcacggttctacgcctggagctctgcatgctctctgtgctgctcccttgggaatatgatgctgttctgcctagttttacaacagttagatttatgtaatccttcagccattttcatcgcgttgtacttgaccaatatgtccagcgtatgatttccagttttaattgtatgctgatgctacatatcctctcttgagatccatgcatgagaattctggcagaatgaacagaggtaaattgatgtccagctgttttctttatgaacaaataggtaaattgatgtttaatttcagaataaaaaccatggcgaatttgat

SEQ ID NO: 59966 - DNA, 2469 bp, Zea Mays
cgcaggggcgtgggggacgggactggcattgccactgcccagccgcgggagcggcccctccggggggacaagcgcattaatgccactgccgcctccgccgatttaactccccgcctctatcgccctcaccttcacctgtacgccgtcccgcttcgcttcggagaggtcgctgcctgtgcctgccatcaacgttccctcgctggttgaggtagacccaccgacccccagtactagtcgggacagagatggggattgatctcaacgccgtgggggaggacgacccggcgggcgcggtgtgcgcggagctgtggcacgcgtgcgcgggggctggagtggcgctgccgcggcggggcagcgccgtggtgtacctgcctcaggcgcacctcgcggcgggcggctgcgacggtggtggggtgtcggcgccggccccgccgcgcgtgccgccgcacgtggtgtgtcgcgtcgtcgacgtcgagctacgcgcggatgcggccacggacgaggtgtacgcgcggcttgcgctggtggcgatggatacgatgtttggccgaaacatcaatgatggtgaaactgaagagaagaatggcgaggaagaggatggcgacggagaaaagaagcacgcatcacacatgttctgcaagacactcacagcttctgataccagcacacatgggggattctctgttccacggcgagctgcagaggactgctttccaccattggactatgagcagcttaggccttcccaagagcttattgccaaggatttgcatggcatgaaatggaggttccgtcatatctatagaggtcaacctcgaaggcatcttctgacaactggatggagttcatttatcaataagaagaaactagtctcaggggatgcagtcttgtttcttagaggtaatgatggtgagctaagattgggtgtgaggagagcagttcaactgaaaaatgaagctctacttgaagctgtcaactgtactgattcgaagctacttatgctgtctgctgtggccaattctttggacaacagaagtatatttcacatctgtttcaacccaagggttggtgcatcagaatttattgtgccgtattgcaagttcttgaagagcttgaactatcacttttcagttggaaccagatttaaagttggctgcgagaatgaagatgctaacgagagataaagtgggatggtgctactaagtacagccaccagaatagagtatctccatgggacatcgagggagttggcagctcagtttcagttactcaccgactttcctcttctgtttcgaagcgaacaaaactgtgcttccctccaagcgatttggacacgccaattctagatggaaacggtcgtccagactcagtggaaactgaacgtttccacagggtcttgcaaggtcaagaattggtgcactctagtattcatggtactgcatgctctcattcatcagatagccccagatgtcaaggctcttatggcaggagattctctgctgatgcgtggaactgcaagatgaatgatgtaatgagtgggcctcgacacctaaatgccactgggtttgcttaccagcccctaggcttcagtgaatctgtcaaattctcagaggtcttgcaaggtcaagaaatgtctcaggcggttccttccttcatgagatctgctttcaactctggcacgcagaatggcagggttcgaccatttgattatgtgcagagatcagatgcaactcaaggatacgctctccagcagtttaatctgccagcaacagaagtgcattcgccctcttctgttcttatgtttaaccaaaccatggtaccacatgctgagctagatggtgcgaccaaccgtgaagaagtacatggcagcaggtacttgtcatccaatgcaatagggagagaagctgaaccatggccatccatgcagcagcaaagagcgagtgtaaatggaagcgagcctctcgacacaactgaagcctcagctcctgcaaggaacgctgaatctggatcggtcggcaggggcgcggggcgaagcaactgtaagctttttggtttctccctgactgagaagatccttggaacggatggtggtggtgtgaaagaagggaactacgaagtggaccgtcaaactccccgggtgctagacttgtttgggcacggttctacgcctggagctctgcatgctctctgtgctgctcccttgggaatatgatgctgttctgcctagttttacaacagttagatttatgtaatccttcagccattttcatcgcgttgtacttgaccaatatgtccagcgtatgatttccagttttaattgtatgctgatgctacatatcctctcttgagatccatgcatgagaattctggcagaatgaacagaggtaaattgatgtccagctgttttctttatgaacaaataggtaaattgatgtttaatttcagaataaaaaccatggcgaatttgat

SEQ ID NO: 59967 - DNA, 2064 bp, Zea Mays
gggcgctgtgatttcagccaaatcgtttcactgatttctaccgcggatgttggatatgatgtttggccgaaacatcaatgatggtgaaactgaagagaagaatggcgaggaagaggatggcgacggagaaaagaagcacgcatcacacatgttctgcaagacactcacagcttctgataccagcacacatgggggattctctgttccacggcgagctgcagaggactgctttccaccattggactatgagcagcttaggccttcccaagagcttattgccaaggatttgcatggcatgaaatggaggttccgtcatatctatagaggtcaacctcgaaggcatcttctgacaactggatggagttcatttatcaataagaagaaactagtctcaggggatgcagtcttgtttcttagaggtaatgatggtgagctaagattgggtgtgaggagagcagttcaactgaaaaatgaagctctacttgaagctgtcaactgtactgattcgaagctacttatgctgtctgctgtggccaattctttggacaacagaagtatatttcacatctgtttcaacccaagggttggtgcatcagaatttattgtgccgtattgcaagttcttgaagagcttgaactatcacttttcagttggaaccagatttaaagttggctgcgagaatgaagatgctaacgagaggtcctttggattgatcataggtattagtgaagttgatcccatacactggcctggatcaaaatggaaatctctcctgataaagtgggatggtgctactaagtacagccaccagaatagagtatctccatgggacatcgagggagttggcagctcagtttcagttactcaccgactttcctcttctgtttcgaagcgaacaaaactgtgcttccctccaagcgatttggacacgccaattctagatggaaacggtcgtccagactcagtggaaactgaacgtttccacagggtcttgcaaggtcaagaattggtgcactctagtattcatggtactgcatgctctcattcatcagatagccccagatgtcaaggctcttatggcaggagattctctgctgatgcgtggaactgcaagatgaatgatgtaatgagtgggcctcgacacctaaatgccactgggtttgcttaccagcccctaggcttcagtgaatctgtcaaattctcagaggtcttgcaaggtcaagaaatgtctcaggcggttccttccttcatgagatctgctttcaactctggcacgcagaatggcagggttcgaccatttgattatgtgcagagatcagatgcaactcaaggatacgctctccagcagtttaatctgccagcaacagaagtgcattcgccctcttctgttcttatgtttaaccaaaccatggtaccacatgctgagctagatggtgcgaccaaccgtgaagaagtacatggcagcaggtacttgtcatccaatgcaatagggagagaagctgaaccatggccatccatgcagcagcaaagagcgagtgtaaatggaagcgagcctctcgacacaactgaagcctcagctcctgcaaggaacgctgaatctggatcggtcggcaggggcgcggggcgaagcaactgtaagctttttggtttctccctgactgagaagatccttggaacggatggtggtggtgtgaaagaagggaactacgaagtggaccgtcaaactccccgggtgctagacttgtttgggcacggttctacgcctggagctctgcatgctctctgtgctgctcccttgggaatatgatgctgttctgcctagttttacaacagttagatttatgtaatccttcagccattttcatcgcgttgtacttgaccaatatgtccagcgtatgatttccagttttaattgtatgctgatgctacatatcctctcttgagatccatgcatgagaattctggcagaatgaacagaggtaaattgatgtccagctgttttctttatgaacaaataggtaaattgatgtttaatttcagaataaaaaccatggcgaatttgat

SEQ ID NO: 59968 - DNA, 1729 bp, Zea Mays
cctgttctgcctccgtcgtgttctgcctcccctctcgttctgcctcccgcgcctccgataaggctctccctgttcggccatacgcacaaccgctctctctccctctcgaagcgacgcagaaccgctcgccagtgtcgcagtcgcctcctgtccctctcctctctctttgccgctgccctcctctaagcatctccctctcctactccctcctctcaaagcacttgttggccccccaccgccgcatctgcatcccataatcgcctacgccatcgccgccgccttcgggtccttctcgctcagcctcgactgctcgctcatcttcaccgaggcgctcctcacccccgccatcccctccgtgtcggcgtgcgccggcggcatcttgcccagtctcagccgatttatccttcggtctgttagggccttatcaaaccgccgccacggcgaactcgcgccgctgccatgttcgcctcgcgcacccaccatctcctcaacaacgttcaaaccgccaaccacgacatcctcctccacaacccgacctctcacgcatcccaacttggtgcggcgtaaacgcgcagcagcacttcgcctcggtcgaccacggcctgcccccaggcgttgacatccagatccatctcgctccgatctacattcgagaagtttgtctctggcatcgattccccaatccgaatcattgccgacgtcttctttgggtggacggtcgaagtcacgcgcacgcacatcccacacttgttcctccccggcggtgcattcagcaacaccgtcttcttctccgtgtcggagcacctcgggccataggggcagacccgtgaacgacattcttttggcgtgtcacgacctcctgtcgcaagctcgatgctctccccatcgacacgtgagccccttggagggagccccgacctagattttactgagagtttctcctcatcaacctagatctcagtttctctggactttactgagcactcaacattgtgttttttggttgctggtaaattgctcatttactgctatagttgattagtaaatataccggtattagtatttatatagttactggttacttgtaatacaaacatttttcattgaagcgcgtatatggtttgtaaaataccagaacaaggtcagtacttttatcattggcgagtatcttttatgtgagtaatatttttatttccatgtttatctacttagttctcgtggcatgctgccttttcagtattggacaatgctaatggagttacaactccaaggacaggaaggtatagtgcagatggagcaggtggtgatgcttctgtagagcttacacggccgtgcaggcacgcagctgccgcgcttggtgatttgatatttgtgtatgacggtttacgtggaggtgccgatccatagatttagcttgaagagaaaatagcagcagaagaaaaagttggcgctcgacaattttttcgaaatcatcttaaaaggctgaccatcaaataaaaaccaggctaaaaacacaaaatgtcaaggaattccatccttgtgtttgcatggacctagaaaatgcagatttaagaatgatgcgagtgatggaggcctatcaggacctactttattccttcaatcaccccatgtgtgggggatagatatcccccgggtcctcttgaacactaaaacgtatcatgggccgtctgatgggcctcccactgggtcatcctatgggatgggcggg

SEQ ID NO: 59969 - DNA, 2487 bp, Zea Mays
  misc_feature (2487)..(2487): n is a, c, g, or t
cctgttctgcctccgtcgtgttctgcctcccctctcgttctgcctcccgcgcctccgataaggctctccctgttcggccatacgcacaaccgctctctctccctctcgaagcgacgcagaaccgctcgccagtgtcgcagtcgcctcctgtccctctcctctctctttgccgctgccctcctctaagcatctccctctcctactccctcctctcaaagcacttgttggccccccaccgccgcatctgcatcccataatcgcctacgccatcgccgccgccttcgggtccttctcgctcagcctcgactgctcgctcatcttcaccgaggcgctcctcacccccgccatcccctccgtgtcggcgtgcgccggcggcatcttgcccagtctcagccgatttatccttcggtctgttagggccttatcaaaccgccgccacggcgaactcgcgccgctgccatgttcgcctcgcgcacccaccatctcctcaacaacgttcaaaccgccaaccacgacatcctcctccacaacccgacctctcacgcatcccaacttggtgcggcgtaaacgcgcagcagcacttcgcctcggtcgaccacggcctgcccccaggcgttgacatccagatccatctcgctccgatctacattcgagaagtttgtctctggcatcgattccccaatccgaatcattgccgacgtcttctttgggtggacggtcgaagtcacgcgcacgcacatcccacacttgttcctccccggcggtgcattcagcaacaccgtcttcttctccgtgtcggagcacctcgggccataggggcagacccgtgaacgacattcttttggcgtgtcacgacctcctgtcgcaagctcgatgctctccccatcgacacgtgagccccttggagggagccccgacctagattttactgagagtttctcctcatcaacctagatctcagtttctctggactttactgagcactcaacattgtgttttttggttgctggtaaattgctcatttactgctatagttgattagtaaatataccggtattagtatttatatagttactggttacttgtaatacaaacatttttcattgaagcgcgtatatggtttgtaaaataccagaacaagtattggacaatgctaatggagttacaactccaaggacaggaaggtatagtgcagatggagcaggtggtgatgcttctgtagagcttacacggccgtgcaggcacgcagctgccgcgcttggtgatttgatatttgtgtatgacggtttacgtggaggtcaaggaattccatccttgtgtttgcatggacctagaaaatgcagatttaagaatgatgcgagtgatggaggcctatcaggtcaaggaatttcatcctgatgtttgcaaggacccagaaattgcagatttaagaatgagcgagcgatggaggtctatcagggagtgttcttcgttgctatccattgtgaaacatgtcctacagtatcccttgccaaccagctcctgtatctgttgcctgctcgattcgttgaagcacagagtatggagaaaacacaacatatatcgcatggattatgatttgttagtgcatgtgttacatattgacttatcgttttgagttgtcaataggtccaaggtactaaattgttgatgcacggatttctaattttatcaatttgttttgtgggctgcgatttattttaagtcgctctaagatctcaattattcctcttttttgttattttttatgccttagctgtaatgtttgttttgaatatttattattggaaaatttgatattttataggtgagacattaattaagccattttcataaaagaacactcctgtggtgacaattagacaagaatactaataatcagattaacatacttaaccttgactgcacatatagagactacagtgttgtgttgtgttggttcactgtaccacaaacaatattgaagaggactgatgaagagcgcaaagtttatagcatagtcgaagattttgaattgcaattcaaggagaaagaggattgctaaaggatgaccttcaaaacaaaaaaaagctcattaaagaacatgggcattatgaaagcacaataggatccaaagaggtaggtccctttttgtcacttatttaatattcctgaataacctgtgttcggtctgaaagagcacataattgcactcctatttttaatccttacatgattactgcataactgtttatcagtttgtggtctacaggtatcaggctcgctcgcaccacagatatctttgagttattttttactgcattgcgactaattttaggcctccaatttgacaaacagaattaagtagcttatgtatcccttgtttcttgtttcctcagtatatatacacactttccaatatgacgcaggtagcattgttgtagaattgcggttcacggaaacacaaggctagcgcttttgtgcaacaan

SEQ ID NO: 59970 - DNA, 2903 bp, Zea Mays
  misc_feature (2903)..(2903): n is a, c, g, or t
gttctgcctccgtcgtgttctgcctcccctctcgttctgcctcccgcgcctccgataaggctctccctgttcggccatacgcacaaccgctctctctccctctcgaagcgacgcagaaccgctcgccagtgtcgcagtcgcctcctgtccctctcctctctctttgccgctgccctcctctaagcatctccctctcctactccctcctctcaaagcacttgttggccccccaccgccgcatctgcatcccataatcgcctacgccatcgccgccgccttcgggtccttctcgctcagcctcgactgctcgctcatcttcaccgaggcgctcctcacccccgccatcccctccgtgtcggcgtgcgccggcggcatcttgcccagtctcagccgatttatccttcggtctgttagggccttatcaaaccgccgccacggcgaactcgcgccgctgccatgttcgcctcgcgcacccaccatctcctcaacaacgttcaaaccgccaaccacgacatcctcctccacaacccgacctctcacgcatcccaacttggtgcggcgtaaacgcgcagcagcacttcgcctcggtcgaccacggcctgcccccaggcgttgacatccagatccatctcgctccgatctacattcgagaagtttgtctctggcatcgattccccaatccgaatcattgccgacgtcttctttgggtggacggtcgaagtcacgcgcacgcacatcccacacttgttcctccccggcggtgcattcagcaacaccgtcttcttctccgtgtcggagcacctcgggccataggggcagacccgtgaacgacattcttttggcgtgtcacgacctcctgtcgcaagctcgatgctctccccatcgacacgtgagccccttggagggagccccgacctagattttactgagagtttctcctcatcaacctagatctcagtttctctggactttactgagcactcaacattgtgttttttggttgctggtaaattgctcatttactgctatagttgattagtaaatataccggtattagtatttatatagttactggttacttgtaatacaaacatttttcattgaagcgcgtatatggtttgtaaaataccagaacaaggtcagtacttttatcattggcgagtatcttttatgtgagtaatatttttatttccatgtttatctacttagttctcgtggcatgctgccttttcagtattggacaatgctaatggagttacaactccaaggacaggaaggtatagtgcagatggagcaggtggtgatgcttctgtagagcttacacggccgtgcaggcacgcagctgccgcgcttggtgatttgatatttgtgtatgacggtttacgtggaggtgccgatccatagatttagcttgaagagaaaatagcagcagaagaaaaagttggcgctcgacaattttttcgaaatcatcttaaaaggctgaccatcaaataaaaaccaggctaaaaacacaaaatgtaatatatatggcctaattttttccttcaatcaccacatgcctatttttttcttcaatttttcttcataagaataagtaagatttttttgtgttataaactgggagtgtaggttgagcttttgctaggccaaaccagtttgttattttcttgtctaacaatactgccacgacataacattgggagctctgtacaggtcaaggaattccatccttgtgtttgcatggacctagaaaatgcagatttaagaatgatgcgagtgatggaggcctatcaggtcaaggaatttcatcctgatgtttgcaaggacccagaaattgcagatttaagaatgagcgagcgatggaggtctatcagggagtgttcttcgttgctatccattgtgaaacatgtcctacagtatcccttgccaaccagctcctgtatctgttgcctgctcgattcgttgaagcacagagtatggagaaaacacaacatatatcgcatggattatgatttgttagtgcatgtgttacatattgacttatcgttttgagttgtcaataggtccaaggtactaaattgttgatgcacggatttctaattttatcaatttgttttgtgggctgcgatttattttaagtcgctctaagatctcaattattcctcttttttgttattttttatgccttagctgtaatgtttgttttgaatatttattattggaaaatttgatattttataggtgagacattaattaagccattttcataaaagaacactcctgtggtgacaattagacaagaatactaataatcagattaacatacttaaccttgactgcacatatagagactacagtgttgtgttgtgttggttcactgtaccacaaacaatattgaagaggactgatgaagagcgcaaagtttatagcatagtcgaagattttgaattgcaattcaaggagaaagaggattgctaaaggatgaccttcaaaacaaaaaaaagctcattaaagaacatgggcattatgaaagcacaataggatccaaagaggtaggtccctttttgtcacttatttaatattcctgaataacctgtgttcggtctgaaagagcacataattgcactcctatttttaatccttacatgattactgcataactgtttatcagtttgtggtctacaggtatcaggctcgctcgcaccacagatatctttgagttattttttactgcattgcgactaattttaggcctccaatttgacaaacagaattaagtagcttatgtatcccttgtttcttgtttcctcagtatatatacacactttccaatatgacgcaggtagcattgttgtagaattgcggttcacggaaacacaaggctagcgcttttgtgcaacaan

SEQ ID NO: 59971 - DNA, 2142 bp, Zea Mays
  misc_feature (2142)..(2142): n is a, c, g, or t
cctccgtcgtgttctgcctcccctctcgttctgcctcccgcgcctccgataaggctctccctgttcggccatacgcacaaccgctctctctccctctcgaagcgacgcagaaccgctcgccagtgtcgcagtcgcctcctgtccctctcctctctctttgccgctgccctcctctaagcatctccctctcctactccctcctctcaaagcacttgttggccccccaccgccgcatctgcatcccataatcgcctacgccatcgccgccgccttcgggtccttctcgctcagcctcgactgctcgctcatcttcaccgaggcgctcctcacccccgccatcccctccgtgtcggcgtgcgccggcggcatcttgcccagtctcagccgatttatccttcggtctgttagggccttatcaaaccgccgccacggcgaactcgcgccgctgccatgttcgcctcgcgcacccaccatctcctcaacaacgttcaaaccgccaaccacgacatcctcctccacaacccgacctctcacgcatcccaacttggtgcggcgtaaacgcgcagcagcacttcgcctcggtcgaccacggcctgcccccaggcgttgacatccagatccatctcgctccgatctacattcgagaagtttgtctctggcatcgattccccaatccgaatcattgccgacgtcttctttgggtggacggtcgaagtcacgcgcacgcacatcccacacttgttcctccccggcggtgcattcagcaacaccgtcttcttctccgtgtcggagcacctcgggccataggggcagacccgtgaacgacattcttttggcgtgtcacgacctcctgtcgcaagctcgatgctctccccatcgacacgtgagccccttggagggagccccgacctagattttactgagagtttctcctcatcaacctagatctcagtttctctggactttactgagcactcaacattgtgttttttggttgctggtaaattgctcatttactgctatagttgattagtaaatataccggtattagtatttatatagttactggttacttgtaatacaaacatttttcattgaagcgcgtatatggtttgtaaaataccagaacaaggtcagtacttttatcattggcgagtatcttttatgtgagtaatatttttatttccatgtttatctacttagttctcgtggcatgctgccttttcagtattggacaatgctaatggagttacaactccaaggacaggaaggtatagtgcagatggagcaggtggtgatgcttctgtagagcttacacggccgtgcaggcacgcagctgccgcgcttggtgatttgatatttgtgtatgacggtttacgtggaggtcaaggaattccatccttgtgtttgcatggacctagaaaatgcagatttaagaatgatgcgagtgatggaggcctatcaggtcaaggaatttcatcctgatgtttgcaaggacccagaaattgcagatttaagaatgagcgagcgatggaggtctatcagggagtgttcttcgttgctatccattgtgaaacatgtcctacaagactacagtgttgtgttgtgttggttcactgtaccacaaacaatattgaagaggactgatgaagagcgcaaagtttatagcatagtcgaagattttgaattgcaattcaaggagaaagaggattgctaaaggatgaccttcaaaacaaaaaaaagctcattaaagaacatgggcattatgaaagcacaataggatccaaagaggtaggtccctttttgtcacttatttaatattcctgaataacctgtgttcggtctgaaagagcacataattgcactcctatttttaatccttacatgattactgcataactgtttatcagtttgtggtctacaggtatcaggctcgctcgcaccacagatatctttgagttattttttactgcattgcgactaattttaggcctccaatttgacaaacagaattaagtagcttatgtatcccttgtttcttgtttcctcagtatatatacacactttccaatatgacgcaggtagcattgttgtagaattgcggttcacggaaacacaaggctagcgcttttgtgcaacaan

SEQ ID NO: 59972 - DNA, 1797 bp, Zea Mays
ctccgtcgtgttctgcctcccctctcgttctgcctcccgcgcctccgataaggctctccctgttcggccatacgcacaaccgctctctctccctctcgaagcgacgcagaaccgctcgccagtgtcgcagtcgcctcctgtccctctcctctctctttgccgctgccctcctctaagcatctccctctcctactccctcctctcaaagcacttgttggccccccaccgccgcatctgcatcccataatcgcctacgccatcgccgccgccttcgggtccttctcgctcagcctcgactgctcgctcatcttcaccgaggcgctcctcacccccgccatcccctccgtgtcggcgtgcgccggcggcatcttgcccagtctcagccgatttatccttcggtctgttagggccttatcaaaccgccgccacggcgaactcgcgccgctgccatgttcgcctcgcgcacccaccatctcctcaacaacgttcaaaccgccaaccacgacatcctcctccacaacccgacctctcacgcatcccaacttggtgcggcgtaaacgcgcagcagcacttcgcctcggtcgaccacggcctgcccccaggcgttgacatccagatccatctcgctccgatctacattcgagaagtttgtctctggcatcgattccccaatccgaatcattgccgacgtcttctttgggtggacggtcgaagtcacgcgcacgcacatcccacacttgttcctccccggcggtgcattcagcaacaccgtcttcttctccgtgtcggagcacctcgggccataggggcagacccgtgaacgacattcttttggcgtgtcacgacctcctgtcgcaagctcgatgctctccccatcgacacgtgagccccttggagggagccccgacctagattttactgagagtttctcctcatcaacctagatctcagtttctctggactttactgagcactcaacattgtgttttttggttgctggtaaattgctcatttactgctatagttgattagtaaatataccggtattagtatttatatagttactggttacttgtaatacaaacatttttcattgaagcgcgtatatggtttgtaaaataccagaacaaggtcagtacttttatcattggcgagtatcttttatgtgagtaatatttttatttccatgtttatctacttagttctcgtggcatgctgccttttcagtattggacaatgctaatggagttacaactccaaggacaggaaggtatagtgcagatggagcaggtggtgatgcttctgtagagcttacacggccgtgcaggcacgcagctgccgcgcttggtgatttgatatttgtgtatgacggtttacgtggaggtgccgatccatagatttagcttgaagagaaaatagcagcagaagaaaaagttggcgctcgacaattttttcgaaatcatcttaaaaggctgaccatcaaataaaaaccaggctaaaaacacaaaatgtaatatatatggcctaattttttccttcaatcaccacatgcctatttttttcttcaatttttcttcataagaataaggtcaaggaattccatccttgtgtttgcatggacctagaaaatgcagatttaagaatgatgcgagtgatggaggcctatcaggacctactttattccttcaatcaccccatgtgtgggggatagatatcccccgggtcctcttgaacactaaaacgtatcatgggccgtctgatgggcctcccactgggtcatcctatgggatgggcggg

SEQ ID NO: 59973 - DNA, 2439 bp, Zea Mays
  misc_feature (2439)..(2439): n is a, c, g, or t
ctccgtcgtgttctgcctcccctctcgttctgcctcccgcgcctccgataaggctctccctgttcggccatacgcacaaccgctctctctccctctcgaagcgacgcagaaccgctcgccagtgtcgcagtcgcctcctgtccctctcctctctctttgccgctgccctcctctaagcatctccctctcctactccctcctctcaaagcacttgttggccccccaccgccgcatctgcatcccataatcgcctacgccatcgccgccgccttcgggtccttctcgctcagcctcgactgctcgctcatcttcaccgaggcgctcctcacccccgccatcccctccgtgtcggcgtgcgccggcggcatcttgcccagtctcagccgatttatccttcggtctgttagggccttatcaaaccgccgccacggcgaactcgcgccgctgccatgttcgcctcgcgcacccaccatctcctcaacaacgttcaaaccgccaaccacgacatcctcctccacaacccgacctctcacgcatcccaacttggtgcggcgtaaacgcgcagcagcacttcgcctcggtcgaccacggcctgcccccaggcgttgacatccagatccatctcgctccgatctacattcgagaagtttgtctctggcatcgattccccaatccgaatcattgccgacgtcttctttgggtggacggtcgaagtcacgcgcacgcacatcccacacttgttcctccccggcggtgcattcagcaacaccgtcttcttctccgtgtcggagcacctcgggccataggggcagacccgtgaacgacattcttttggcgtgtcacgacctcctgtcgcaagctcgatgctctccccatcgacacgtgagccccttggagggagccccgacctagattttactgagagtttctcctcatcaacctagatctcagtttctctggactttactgagcactcaacattgtgttttttggttgctggtaaattgctcatttactgctatagttgattagtaaatataccggtattagtatttatatagttactggttacttgtaatacaaacatttttcattgaagcgcgtatatggtttgtaaaataccagaacaaggtcagtacttttatcattggcgagtatcttttatgtgagtaatatttttatttccatgtttatctacttagttctcgtggcatgctgccttttcagtattggacaatgctaatggagttacaactccaaggacaggaaggtatagtgcagatggagcaggtggtgatgcttctgtagagcttacacggccgtgcaggcacgcagctgccgcgcttggtgatttgatatttgtgtatgacggtttacgtggaggtgccgatccatagatttagcttgaagagaaaatagcagcagaagaaaaagttggcgctcgacaattttttcgaaatcatcttaaaaggctgaccatcaaataaaaaccaggctaaaaacacaaaatgtaatatatatggcctaattttttccttcaatcaccacatgcctatttttttcttcaatttttcttcataagaataagtaagatttttttgtgttataaactgggagtgtaggttgagcttttgctaggccaaaccagtttgttattttcttgtctaacaatactgccacgacataacattgggagctctgtacaggtcaaggaattccatccttgtgtttgcatggacctagaaaatgcagatttaagaatgatgcgagtgatggaggcctatcaggtcaaggaatttcatcctgatgtttgcaaggacccagaaattgcagatttaagaatgagcgagcgatggaggtctatcagagactacagtgttgtgttgtgttggttcactgtaccacaaacaatattgaagaggactgatgaagagcgcaaagtttatagcatagtcgaagattttgaattgcaattcaaggagaaagaggattgctaaagctttcttttcaatttaggatgaccttcaaaacaaaaaaaagctcattaaagaacatgggcattatgaaagcacaataggatccaaagaggtaggtccctttttgtcacttatttaatattcctgaataacctgtgttcggtctgaaagagcacataattgcactcctatttttaatccttacatgattactgcataactgtttatcagtttgtggtctacaggtatcaggctcgctcgcaccacagatatctttgagttattttttactgcattgcgactaattttaggcctccaatttgacaaacagaattaagtagcttatgtatcccttgtttcttgtttcctcagtatatatacacactttccaatatgacgcaggtagcattgttgtagaattgcggttcacggaaacacaaggctagcgcttttgtgcaacaan

SEQ ID NO: 59974 - DNA, 2277 bp, Zea Mays
  misc_feature (2277)..(2277): n is a, c, g, or t
ctccgtcgtgttctgcctcccctctcgttctgcctcccgcgcctccgataaggctctccctgttcggccatacgcacaaccgctctctctccctctcgaagcgacgcagaaccgctcgccagtgtcgcagtcgcctcctgtccctctcctctctctttgccgctgccctcctctaagcatctccctctcctactccctcctctcaaagcacttgttggccccccaccgccgcatctgcatcccataatcgcctacgccatcgccgccgccttcgggtccttctcgctcagcctcgactgctcgctcatcttcaccgaggcgctcctcacccccgccatcccctccgtgtcggcgtgcgccggcggcatcttgcccagtctcagccgatttatccttcggtctgttagggccttatcaaaccgccgccacggcgaactcgcgccgctgccatgttcgcctcgcgcacccaccatctcctcaacaacgttcaaaccgccaaccacgacatcctcctccacaacccgacctctcacgcatcccaacttggtgcggcgtaaacgcgcagcagcacttcgcctcggtcgaccacggcctgcccccaggcgttgacatccagatccatctcgctccgatctacattcgagaagtttgtctctggcatcgattccccaatccgaatcattgccgacgtcttctttgggtggacggtcgaagtcacgcgcacgcacatcccacacttgttcctccccggcggtgcattcagcaacaccgtcttcttctccgtgtcggagcacctcgggccataggggcagacccgtgaacgacattcttttggcgtgtcacgacctcctgtcgcaagctcgatgctctccccatcgacacgtgagccccttggagggagccccgacctagattttactgagagtttctcctcatcaacctagatctcagtttctctggactttactgagcactcaacattgtgttttttggttgctggtaaattgctcatttactgctatagttgattagtaaatataccggtattagtatttatatagttactggttacttgtaatacaaacatttttcattgaagcgcgtatatggtttgtaaaataccagaacaaggtcagtacttttatcattggcgagtatcttttatgtgagtaatatttttatttccatgtttatctacttagttctcgtggcatgctgccttttcagtattggacaatgctaatggagttacaactccaaggacaggaaggtatagtgcagatggagcaggtggtgatgcttctgtagagcttacacggccgtgcaggcacgcagctgccgcgcttggtgatttgatatttgtgtatgacggtttacgtggaggtgccgatccatagatttagcttgaagagaaaatagcagcagaagaaaaagttggcgctcgacaattttttcgaaatcatcttaaaaggctgaccatcaaataaaaaccaggctaaaaacacaaaatgtaatatatatgtcaaggaattccatccttgtgtttgcatggacctagaaaatgcagatttaagaatgatgcgagtgatggaggcctatcaggtcaaggaatttcatcctgatgtttgcaaggacccagaaattgcagatttaagaatgagcgagcgatggaggtctatcagggagtgttcttcgttgctatccattgtgaaacatgtcctacaactacagtgttgtgttgtgttggttcactgtaccacaaacaatattgaagaggactgatgaagagcgcaaagtttatagcatagtcgaagattttgaattgcaattcaaggagaaagaggattgctaaaggatgaccttcaaaacaaaaaaaagctcattaaagaacatgggcattatgaaagcacaataggatccaaagaggtaggtccctttttgtcacttatttaatattcctgaataacctgtgttcggtctgaaagagcacataattgcactcctatttttaatccttacatgattactgcataactgtttatcagtttgtggtctacaggtatcaggctcgctcgcaccacagatatctttgagttattttttactgcattgcgactaattttaggcctccaatttgacaaacagaattaagtagcttatgtatcccttgtttcttgtttcctcagtatatatacacactttccaatatgacgcaggtagcattgttgtagaattgcggttcacggaaacacaaggctagcgcttttgtgcaacaan

SEQ ID NO: 59975 - DNA, 2546 bp, Zea Mays
  misc_feature (2546)..(2546): n is a, c, g, or t
ctccgtcgtgttctgcctcccctctcgttctgcctcccgcgcctccgataaggctctccctgttcggccatacgcacaaccgctctctctccctctcgaagcgacgcagaaccgctcgccagtgtcgcagtcgcctcctgtccctctcctctctctttgccgctgccctcctctaagcatctccctctcctactccctcctctcaaagcacttgttggccccccaccgccgcatctgcatcccataatcgcctacgccatcgccgccgccttcgggtccttctcgctcagcctcgactgctcgctcatcttcaccgaggcgctcctcacccccgccatcccctccgtgtcggcgtgcgccggcggcatcttgcccagtctcagccgatttatccttcggtctgttagggccttatcaaaccgccgccacggcgaactcgcgccgctgccatgttcgcctcgcgcacccaccatctcctcaacaacgttcaaaccgccaaccacgacatcctcctccacaacccgacctctcacgcatcccaacttggtgcggcgtaaacgcgcagcagcacttcgcctcggtcgaccacggcctgcccccaggcgttgacatccagatccatctcgctccgatctacattcgagaagtttgtctctggcatcgattccccaatccgaatcattgccgacgtcttctttgggtggacggtcgaagtcacgcgcacgcacatcccacacttgttcctccccggcggtgcattcagcaacaccgtcttcttctccgtgtcggagcacctcgggccataggggcagacccgtgaacgacattcttttggcgtgtcacgacctcctgtcgcaagctcgatgctctccccatcgacacgtgagccccttggagggagccccgacctagattttactgagagtttctcctcatcaacctagatctcagtttctctggactttactgagcactcaacattgtgttttttggttgctggtaaattgctcatttactgctatagttgattagtaaatataccggtattagtatttatatagttactggttacttgtaatacaaacatttttcattgaagcgcgtatatggtttgtaaaataccagaacaagtattggacaatgctaatggagttacaactccaaggacaggaaggtatagtgcagatggagcaggtggtgatgcttctgtagagcttacacggccgtgcaggcacgcagctgccgcgcttggtgatttgatatttgtgtatgacggtttacgtggaggtgccgatccatagatttagcttgaagagaaaatagcagcagaagaaaaagttggcgctcgacaattttttcgaaatcatcttaaaaggctgaccatcaaataaaaaccaggctaaaaacacaaaatgtaatatatatgtaagtgaaaattggtttgatgatattctcttttagacaaatagagaattatttattttcccatttttagtagcatgcctaatttttttattcaactgagtttttattttatcatgaactgattggagttcttactctgtcacaagcagggcctaattttttccttcaatcaccacatgcctatttttttcttcaatttttcttcataagaataagtaagatttttttgtgttataaactgggagtgtaggttgagcttttgctaggccaaaccagtttgttattttcttgtctaacaatactgccacgacataacattgggagctctgtacaggtcaaggaattccatccttgtgtttgcatggacctagaaaatgcagatttaagaatgatgcgagtgatggaggcctatcaggtcaaggaatttcatcctgatgtttgcaaggacccagaaattgcagatttaagaatgagcgagcgatggaggtctatcagggagtgttcttcgttgctatccattgtgaaacatgtcctacagtatcccttgccaaccagctcctgtatctagactacagtgttgtgttgtgttggttcactgtaccacaaacaatattgaagaggactgatgaagagcgcaaagtttatagcatagtcgaagattttgaattgcaattcaaggagaaagaggattgctaaaggatgaccttcaaaacaaaaaaaagctcattaaagaacatgggcattatgaaagcacaataggatccaaagaggtaggtccctttttgtcacttatttaatattcctgaataacctgtgttcggtctgaaagagcacataattgcactcctatttttaatccttacatgattactgcataactgtttatcagtttgtggtctacaggtatcaggctcgctcgcaccacagatatctttgagttattttttactgcattgcgactaattttaggcctccaatttgacaaacagaattaagtagcttatgtatcccttgtttcttgtttcctcagtatatatacacactttccaatatgacgcaggtagcattgttgtagaattgcggttcacggaaacacaaggctagcgcttttgtgcaacaan

SEQ ID NO: 59976 - DNA, 2481 bp, Zea Mays
  misc_feature (2481)..(2481): n is a, c, g, or t
ctccgtcgtgttctgcctcccctctcgttctgcctcccgcgcctccgataaggctctccctgttcggccatacgcacaaccgctctctctccctctcgaagcgacgcagaaccgctcgccagtgtcgcagtcgcctcctgtccctctcctctctctttgccgctgccctcctctaagcatctccctctcctactccctcctctcaaagcacttgttggccccccaccgccgcatctgcatcccataatcgcctacgccatcgccgccgccttcgggtccttctcgctcagcctcgactgctcgctcatcttcaccgaggcgctcctcacccccgccatcccctccgtgtcggcgtgcgccggcggcatcttgcccagtctcagccgatttatccttcggtctgttagggccttatcaaaccgccgccacggcgaactcgcgccgctgccatgttcgcctcgcgcacccaccatctcctcaacaacgttcaaaccgccaaccacgacatcctcctccacaacccgacctctcacgcatcccaacttggtgcggcgtaaacgcgcagcagcacttcgcctcggtcgaccacggcctgcccccaggcgttgacatccagatccatctcgctccgatctacattcgagaagtttgtctctggcatcgattccccaatccgaatcattgccgacgtcttctttgggtggacggtcgaagtcacgcgcacgcacatcccacacttgttcctccccggcggtgcattcagcaacaccgtcttcttctccgtgtcggagcacctcgggccataggggcagacccgtgaacgacattcttttggcgtgtcacgacctcctgtcgcaagctcgatgctctccccatcgacacgtgagccccttggagggagccccgacctagattttactgagagtttctcctcatcaacctagatctcagtttctctggactttactgagcactcaacattgtgttttttggttgctggtaaattgctcatttactgctatagttgattagtaaatataccggtattagtatttatatagttactggttacttgtaatacaaacatttttcattgaagcgcgtatatggtttgtaaaataccagaacaaggtcagtacttttatcattggcgagtatcttttatgtgagtaatatttttatttccatgtttatctacttagttctcgtggcatgctgccttttcagtattggacaatgctaatggagttacaactccaaggacaggaaggtatagtgcagatggagcaggtggtgatgcttctgtagagcttacacggccgtgcaggcacgcagctgccgcgcttggtgatttgatatttgtgtatgacggtttacgtggaggtgccgatccatagatttagcttgaagagaaaatagcagcagaagaaaaagttggcgctcgacaattttttcgaaatcatcttaaaaggctgaccatcaaataaaaaccaggctaaaaacacaaaatgtaatatatatggcctaattttttccttcaatcaccacatgcctatttttttcttcaatttttcttcataagaataagtaagatttttttgtgttataaactgggagtgtaggttgagcttttgctaggccaaaccagtttgttattttcttgtctaacaatactgccacgacataacattgggagctctgtacaggtcaaggaattccatccttgtgtttgcatggacctagaaaatgcagatttaagaatgatgcgagtgatggaggcctatcaggtcaaggaatttcatcctgatgtttgcaaggacccagaaattgcagatttaagaatgagcgagcgatggaggtctatcagggagtgttcttcgttgctatccattgtgaaacatgtcctacaagactacagtgttgtgttgtgttggttcactgtaccacaaacaatattgaagaggactgatgaagagcgcaaagtttatagcatagtcgaagattttgaattgcaattcaaggagaaagaggattgctaaagctttcttttcaatttaggatgaccttcaaaacaaaaaaaagctcattaaagaacatgggcattatgaaagcacaataggatccaaagaggtaggtccctttttgtcacttatttaatattcctgaataacctgtgttcggtctgaaagagcacataattgcactcctatttttaatccttacatgattactgcataactgtttatcagtttgtggtctacaggtatcaggctcgctcgcaccacagatatctttgagttattttttactgcattgcgactaattttaggcctccaatttgacaaacagaattaagtagcttatgtatcccttgtttcttgtttcctcagtatatatacacactttccaatatgacgcaggtagcattgttgtagaattgcggttcacggaaacacaaggctagcgcttttgtgcaacaan

SEQ ID NO: 59977 - DNA, 2717 bp, Zea Mays
  misc_feature (2717)..(2717): n is a, c, g, or t
ctccgtcgtgttctgcctcccctctcgttctgcctcccgcgcctccgataaggctctccctgttcggccatacgcacaaccgctctctctccctctcgaagcgacgcagaaccgctcgccagtgtcgcagtcgcctcctgtccctctcctctctctttgccgctgccctcctctaagcatctccctctcctactccctcctctcaaagcacttgttggccccccaccgccgcatctgcatcccataatcgcctacgccatcgccgccgccttcgggtccttctcgctcagcctcgactgctcgctcatcttcaccgaggcgctcctcacccccgccatcccctccgtgtcggcgtgcgccggcggcatcttgcccagtctcagccgatttatccttcggtctgttagggccttatcaaaccgccgccacggcgaactcgcgccgctgccatgttcgcctcgcgcacccaccatctcctcaacaacgttcaaaccgccaaccacgacatcctcctccacaacccgacctctcacgcatcccaacttggtgcggcgtaaacgcgcagcagcacttcgcctcggtcgaccacggcctgcccccaggcgttgacatccagatccatctcgctccgatctacattcgagaagtttgtctctggcatcgattccccaatccgaatcattgccgacgtcttctttgggtggacggtcgaagtcacgcgcacgcacatcccacacttgttcctccccggcggtgcattcagcaacaccgtcttcttctccgtgtcggagcacctcgggccataggggcagacccgtgaacgacattcttttggcgtgtcacgacctcctgtcgcaagctcgatgctctccccatcgacacgtgagccccttggagggagccccgacctagattttactgagagtttctcctcatcaacctagatctcagtttctctggactttactgagcactcaacattgtgttttttggttgctggtaaattgctcatttactgctatagttgattagtaaatataccggtattagtatttatatagttactggttacttgtaatacaaacatttttcattgaagcgcgtatatggtttgtaaaataccagaacaaggtcagtacttttatcattggcgagtatcttttatgtgagtaatatttttatttccatgtttatctacttagttctcgtggcatgctgccttttcagtattggacaatgctaatggagttacaactccaaggacaggaaggtatagtgcagatggagcaggtggtgatgcttctgtagagcttacacggccgtgcaggcacgcagctgccgcgcttggtgatttgatatttgtgtatgacggtttacgtggaggtgccgatccatagatttagcttgaagagaaaatagcagcagaagaaaaagttggcgctcgacaattttttcgaaatcatcttaaaaggctgaccatcaaataaaaaccaggctaaaaacacaaaatgtcaaggaattccatccttgtgtttgcatggacctagaaaatgcagatttaagaatgatgcgagtgatggaggcctatcaggtcaaggaatttcatcctgatgtttgcaaggacccagaaattgcagatttaagaatgagcgagcgatggaggtctatcagggagtgttcttcgttgctatccattgtgaaacatgtcctacagtatcccttgccaaccagctcctgtatctgttgcctgctcgattcgttgaagcacagagtatggagaaaacacaacatatatcgcatggattatgatttgttagtgcatgtgttacatattgacttatcgttttgagttgtcaataggtccaaggtactaaattgttgatgcacggatttctaattttatcaatttgttttgtgggctgcgatttattttaagtcgctctaagatctcaattattcctcttttttgttattttttatgccttagctgtaatgtttgttttgaatatttattattggaaaatttgatattttataggtgagacattaattaagccattttcataaaagaacactcctgtggtgacaattagacaagaatactaataatcagattaacatacttaaccttgactgcacatatagagactacagtgttgtgttgtgttggttcactgtaccacaaacaatattgaagaggactgatgaagagcgcaaagtttatagcatagtcgaagattttgaattgcaattcaaggagaaagaggattgctaaagctttcttttcaatttaggatgaccttcaaaacaaaaaaaagctcattaaagaacatgggcattatgaaagcacaataggatccaaagaggtaggtccctttttgtcacttatttaatattcctgaataacctgtgttcggtctgaaagagcacataattgcactcctatttttaatccttacatgattactgcataactgtttatcagtttgtggtctacaggtatcaggctcgctcgcaccacagatatctttgagttattttttactgcattgcgactaattttaggcctccaatttgacaaacagaattaagtagcttatgtatcccttgtttcttgtttcctcagtatatatacacactttccaatatgacgcaggtagcattgttgtagaattgcggttcacggaaacacaaggctagcgcttttgtgcaacaan

SEQ ID NO: 59978 - DNA, 2422 bp, Zea Mays
  misc_feature (2422)..(2422): n is a, c, g, or t
ctccgtcgtgttctgcctcccctctcgttctgcctcccgcgcctccgataaggctctccctgttcggccatacgcacaaccgctctctctccctctcgaagcgacgcagaaccgctcgccagtgtcgcagtcgcctcctgtccctctcctctctctttgccgctgccctcctctaagcatctccctctcctactccctcctctcaaagcacttgttggccccccaccgccgcatctgcatcccataatcgcctacgccatcgccgccgccttcgggtccttctcgctcagcctcgactgctcgctcatcttcaccgaggcgctcctcacccccgccatcccctccgtgtcggcgtgcgccggcggcatcttgcccagtctcagccgatttatccttcggtctgttagggccttatcaaaccgccgccacggcgaactcgcgccgctgccatgttcgcctcgcgcacccaccatctcctcaacaacgttcaaaccgccaaccacgacatcctcctccacaacccgacctctcacgcatcccaacttggtgcggcgtaaacgcgcagcagcacttcgcctcggtcgaccacggcctgcccccaggcgttgacatccagatccatctcgctccgatctacattcgagaagtttgtctctggcatcgattccccaatccgaatcattgccgacgtcttctttgggtggacggtcgaagtcacgcgcacgcacatcccacacttgttcctccccggcggtgcattcagcaacaccgtcttcttctccgtgtcggagcacctcgggccataggggcagacccgtgaacgacattcttttggcgtgtcacgacctcctgtcgcaagctcgatgctctccccatcgacacgtgagccccttggagggagccccgacctagattttactgagagtttctcctcatcaacctagatctcagtttctctggactttactgagcactcaacattgtgttttttggttgctggtaaattgctcatttactgctatagttgattagtaaatataccggtattagtatttatatagttactggttacttgtaatacaaacatttttcattgaagcgcgtatatggtttgtaaaataccagaacaaggtcagtacttttatcattggcgagtatcttttatgtgagtaatatttttatttccatgtttatctacttagttctcgtggcatgctgccttttcagtattggacaatgctaatggagttacaactccaaggacaggaaggtatagtgcagatggagcaggtggtgatgcttctgtagagcttacacggccgtgcaggcacgcagctgccgcgcttggtgatttgatatttgtgtatgacggtttacgtggaggtgccgatccatagatttagcttgaagagaaaatagcagcagaagaaaaagttggcgctcgacaattttttcgaaatcatcttaaaaggctgaccatcaaataaaaaccaggctaaaaacacaaaatgtaatatatatggcctaattttttccttcaatcaccacatgcctatttttttcttcaatttttcttcataagaataagtaagatttttttgtgttataaactgggagtgtaggttgagcttttgctaggccaaaccagtttgttattttcttgtctaacaatactgccacgacataacattgggagctctgtacaggtcaaggaattccatccttgtgtttgcatggacctagaaaatgcagatttaagaatgatgcgagtgatggaggcctatcaggtcaaggaatttcatcctgatgtttgcaaggacccagaaattgcagatttaagaatgagcgagcgatggaggtctatcagagactacagtgttgtgttgtgttggttcactgtaccacaaacaatattgaagaggactgatgaagagcgcaaagtttatagcatagtcgaagattttgaattgcaattcaaggagaaagaggattgctaaaggatgaccttcaaaacaaaaaaaagctcattaaagaacatgggcattatgaaagcacaataggatccaaagaggtaggtccctttttgtcacttatttaatattcctgaataacctgtgttcggtctgaaagagcacataattgcactcctatttttaatccttacatgattactgcataactgtttatcagtttgtggtctacaggtatcaggctcgctcgcaccacagatatctttgagttattttttactgcattgcgactaattttaggcctccaatttgacaaacagaattaagtagcttatgtatcccttgtttcttgtttcctcagtatatatacacactttccaatatgacgcaggtagcattgttgtagaattgcggttcacggaaacacaaggctagcgcttttgtgcaacaan

SEQ ID NO: 59979 - DNA, 2728 bp, Zea Mays
  misc_feature (2728)..(2728): n is a, c, g, or t
ctccgtcgtgttctgcctcccctctcgttctgcctcccgcgcctccgataaggctctccctgttcggccatacgcacaaccgctctctctccctctcgaagcgacgcagaaccgctcgccagtgtcgcagtcgcctcctgtccctctcctctctctttgccgctgccctcctctaagcatctccctctcctactccctcctctcaaagcacttgttggccccccaccgccgcatctgcatcccataatcgcctacgccatcgccgccgccttcgggtccttctcgctcagcctcgactgctcgctcatcttcaccgaggcgctcctcacccccgccatcccctccgtgtcggcgtgcgccggcggcatcttgcccagtctcagccgatttatccttcggtctgttagggccttatcaaaccgccgccacggcgaactcgcgccgctgccatgttcgcctcgcgcacccaccatctcctcaacaacgttcaaaccgccaaccacgacatcctcctccacaacccgacctctcacgcatcccaacttggtgcggcgtaaacgcgcagcagcacttcgcctcggtcgaccacggcctgcccccaggcgttgacatccagatccatctcgctccgatctacattcgagaagtttgtctctggcatcgattccccaatccgaatcattgccgacgtcttctttgggtggacggtcgaagtcacgcgcacgcacatcccacacttgttcctccccggcggtgcattcagcaacaccgtcttcttctccgtgtcggagcacctcgggccataggggcagacccgtgaacgacattcttttggcgtgtcacgacctcctgtcgcaagctcgatgctctccccatcgacacgtgagccccttggagggagccccgacctagattttactgagagtttctcctcatcaacctagatctcagtttctctggactttactgagcactcaacattgtgttttttggttgctggtaaattgctcatttactgctatagttgattagtaaatataccggtattagtatttatatagttactggttacttgtaatacaaacatttttcattgaagcgcgtatatggtttgtaaaataccagaacaaggtcagtacttttatcattggcgagtatcttttatgtgagtaatatttttatttccatgtttatctacttagttctcgtggcatgctgccttttcagtattggacaatgctaatggagttacaactccaaggacaggaaggtatagtgcagatggagcaggtggtgatgcttctgtagagcttacacggccgtgcaggcacgcagctgccgcgcttggtgatttgatatttgtgtatgacggtttacgtggaggtgccgatccatagatttagcttgaagagaaaatagcagcagaagaaaaagttggcgctcgacaattttttcgaaatcatcttaaaaggctgaccatcaaataaaaaccaggctaaaaacacaaaatgtaatatatatgtcaaggaattccatccttgtgtttgcatggacctagaaaatgcagatttaagaatgatgcgagtgatggaggcctatcaggtcaaggaatttcatcctgatgtttgcaaggacccagaaattgcagatttaagaatgagcgagcgatggaggtctatcagggagtgttcttcgttgctatccattgtgaaacatgtcctacagtatcccttgccaaccagctcctgtatctgttgcctgctcgattcgttgaagcacagagtatggagaaaacacaacatatatcgcatggattatgatttgttagtgcatgtgttacatattgacttatcgttttgagttgtcaataggtccaaggtactaaattgttgatgcacggatttctaattttatcaatttgttttgtgggctgcgatttattttaagtcgctctaagatctcaattattcctcttttttgttattttttatgccttagctgtaatgtttgttttgaatatttattattggaaaatttgatattttataggtgagacattaattaagccattttcataaaagaacactcctgtggtgacaattagacaagaatactaataatcagattaacatacttaaccttgactgcacatatagagactacagtgttgtgttgtgttggttcactgtaccacaaacaatattgaagaggactgatgaagagcgcaaagtttatagcatagtcgaagattttgaattgcaattcaaggagaaagaggattgctaaagctttcttttcaatttaggatgaccttcaaaacaaaaaaaagctcattaaagaacatgggcattatgaaagcacaataggatccaaagaggtaggtccctttttgtcacttatttaatattcctgaataacctgtgttcggtctgaaagagcacataattgcactcctatttttaatccttacatgattactgcataactgtttatcagtttgtggtctacaggtatcaggctcgctcgcaccacagatatctttgagttattttttactgcattgcgactaattttaggcctccaatttgacaaacagaattaagtagcttatgtatcccttgtttcttgtttcctcagtatatatacacactttccaatatgacgcaggtagcattgttgtagaattgcggttcacggaaacacaaggctagcgcttttgtgcaacaan

SEQ ID NO: 59980 - DNA, 2345 bp, Zea Mays
  misc_feature (2345)..(2345): n is a, c, g, or t
ctccgtcgtgttctgcctcccctctcgttctgcctcccgcgcctccgataaggctctccctgttcggccatacgcacaaccgctctctctccctctcgaagcgacgcagaaccgctcgccagtgtcgcagtcgcctcctgtccctctcctctctctttgccgctgccctcctctaagcatctccctctcctactccctcctctcaaagcacttgttggccccccaccgccgcatctgcatcccataatcgcctacgccatcgccgccgccttcgggtccttctcgctcagcctcgactgctcgctcatcttcaccgaggcgctcctcacccccgccatcccctccgtgtcggcgtgcgccggcggcatcttgcccagtctcagccgatttatccttcggtctgttagggccttatcaaaccgccgccacggcgaactcgcgccgctgccatgttcgcctcgcgcacccaccatctcctcaacaacgttcaaaccgccaaccacgacatcctcctccacaacccgacctctcacgcatcccaacttggtgcggcgtaaacgcgcagcagcacttcgcctcggtcgaccacggcctgcccccaggcgttgacatccagatccatctcgctccgatctacattcgagaagtttgtctctggcatcgattccccaatccgaatcattgccgacgtcttctttgggtggacggtcgaagtcacgcgcacgcacatcccacacttgttcctccccggcggtgcattcagcaacaccgtcttcttctccgtgtcggagcacctcgggccataggggcagacccgtgaacgacattcttttggcgtgtcacgacctcctgtcgcaagctcgatgctctccccatcgacacgtgagccccttggagggagccccgacctagattttactgagagtttctcctcatcaacctagatctcagtttctctggactttactgagcactcaacattgtgttttttggttgctggtaaattgctcatttactgctatagttgattagtaaatataccggtattagtatttatatagttactggttacttgtaatacaaacatttttcattgaagcgcgtatatggtttgtaaaataccagaacaaggtcagtacttttatcattggcgagtatcttttatgtgagtaatatttttatttccatgtttatctacttagttctcgtggcatgctgccttttcagtattggacaatgctaatggagttacaactccaaggacaggaaggtatagtgcagatggagcaggtggtgatgcttctgtagagcttacacggccgtgcaggcacgcagctgccgcgcttggtgatttgatatttgtgtatgacggtttacgtggaggtgccgatccatagatttagcttgaagagaaaatagcagcagaagaaaaagttggcgctcgacaattttttcgaaatcatcttaaaaggctgaccatcaaataaaaaccaggctaaaaacacaaaatgtaatatatatggcctaattttttccttcaatcaccacatgcctatttttttcttcaatttttcttcataagaataagtcaaggaattccatccttgtgtttgcatggacctagaaaatgcagatttaagaatgatgcgagtgatggaggcctatcaggtcaaggaatttcatcctgatgtttgcaaggacccagaaattgcagatttaagaatgagcgagcgatggaggtctatcagggagtgttcttcgttgctatccattgtgaaacatgtcctacaagactacagtgttgtgttgtgttggttcactgtaccacaaacaatattgaagaggactgatgaagagcgcaaagtttatagcatagtcgaagattttgaattgcaattcaaggagaaagaggattgctaaaggatgaccttcaaaacaaaaaaaagctcattaaagaacatgggcattatgaaagcacaataggatccaaagaggtaggtccctttttgtcacttatttaatattcctgaataacctgtgttcggtctgaaagagcacataattgcactcctatttttaatccttacatgattactgcataactgtttatcagtttgtggtctacaggtatcaggctcgctcgcaccacagatatctttgagttattttttactgcattgcgactaattttaggcctccaatttgacaaacagaattaagtagcttatgtatcccttgtttcttgtttcctcagtatatatacacactttccaatatgacgcaggtagcattgttgtagaattgcggttcacggaaacacaaggctagcgcttttgtgcaacaan

SEQ ID NO: 59981 - DNA, 2700 bp, Zea Mays
  misc_feature (2700)..(2700): n is a, c, g, or t
ctccgtcgtgttctgcctcccctctcgttctgcctcccgcgcctccgataaggctctccctgttcggccatacgcacaaccgctctctctccctctcgaagcgacgcagaaccgctcgccagtgtcgcagtcgcctcctgtccctctcctctctctttgccgctgccctcctctaagcatctccctctcctactccctcctctcaaagcacttgttggccccccaccgccgcatctgcatcccataatcgcctacgccatcgccgccgccttcgggtccttctcgctcagcctcgactgctcgctcatcttcaccgaggcgctcctcacccccgccatcccctccgtgtcggcgtgcgccggcggcatcttgcccagtctcagccgatttatccttcggtctgttagggccttatcaaaccgccgccacggcgaactcgcgccgctgccatgttcgcctcgcgcacccaccatctcctcaacaacgttcaaaccgccaaccacgacatcctcctccacaacccgacctctcacgcatcccaacttggtgcggcgtaaacgcgcagcagcacttcgcctcggtcgaccacggcctgcccccaggcgttgacatccagatccatctcgctccgatctacattcgagaagtttgtctctggcatcgattccccaatccgaatcattgccgacgtcttctttgggtggacggtcgaagtcacgcgcacgcacatcccacacttgttcctccccggcggtgcattcagcaacaccgtcttcttctccgtgtcggagcacctcgggccataggggcagacccgtgaacgacattcttttggcgtgtcacgacctcctgtcgcaagctcgatgctctccccatcgacacgtgagccccttggagggagccccgacctagattttactgagagtttctcctcatcaacctagatctcagtttctctggactttactgagcactcaacattgtgttttttggttgctggtaaattgctcatttactgctatagttgattagtaaatataccggtattagtatttatatagttactggttacttgtaatacaaacatttttcattgaagcgcgtatatggtttgtaaaataccagaacaaggtcagtacttttatcattggcgagtatcttttatgtgagtaatatttttatttccatgtttatctacttagttctcgtggcatgctgccttttcagtattggacaatgctaatggagttacaactccaaggacaggaaggtatagtgcagatggagcaggtggtgatgcttctgtagagcttacacggccgtgcaggcacgcagctgccgcgcttggtgatttgatatttgtgtatgacggtttacgtggaggtgccgatccatagatttagcttgaagagaaaatagcagcagaagaaaaagttggcgctcgacaattttttcgaaatcatcttaaaaggctgaccatcaaataaaaaccaggctaaaaacacaaaatgtcaaggaattccatccttgtgtttgcatggacctagaaaatgcagatttaagaatgatgcgagtgatggaggcctatcaggtcaaggaatttcatcctgatgtttgcaaggacccagaaattgcagatttaagaatgagcgagcgatggaggtctatcagggagtgttcttcgttgctatccattgtgaaacatgtcctacagtatcccttgccaaccagctcctgtatctgttgcctgctcgattcgttgaagcacagagtatggagaaaacacaacatatatcgcatggattatgatttgttagtgcatgtgttacatattgacttatcgttttgagttgtcaataggtccaaggtactaaattgttgatgcacggatttctaattttatcaatttgttttgtgggctgcgatttattttaagtcgctctaagatctcaattattcctcttttttgttattttttatgccttagctgtaatgtttgttttgaatatttattattggaaaatttgatattttataggtgagacattaattaagccattttcataaaagaacactcctgtggtgacaattagacaagaatactaataatcagattaacatacttaaccttgactgcacatatagagactacagtgttgtgttgtgttggttcactgtaccacaaacaatattgaagaggactgatgaagagcgcaaagtttatagcatagtcgaagattttgaattgcaattcaaggagaaagaggattgctaaaggatgaccttcaaaacaaaaaaaagctcattaaagaacatgggcattatgaaagcacaataggatccaaagaggtaggtccctttttgtcacttatttaatattcctgaataacctgtgttcggtctgaaagagcacataattgcactcctatttttaatccttacatgattactgcataactgtttatcagtttgtggtctacaggtatcaggctcgctcgcaccacagatatctttgagttattttttactgcattgcgactaattttaggcctccaatttgacaaacagaattaagtagcttatgtatcccttgtttcttgtttcctcagtatatatacacactttccaatatgacgcaggtagcattgttgtagaattgcggttcacggaaacacaaggctagcgcttttgtgcaacaan

SEQ ID NO: 59982 - DNA, 2237 bp, Zea Mays
  misc_feature (2237)..(2237): n is a, c, g, or t
ctccgtcgtgttctgcctcccctctcgttctgcctcccgcgcctccgataaggctctccctgttcggccatacgcacaaccgctctctctccctctcgaagcgacgcagaaccgctcgccagtgtcgcagtcgcctcctgtccctctcctctctctttgccgctgccctcctctaagcatctccctctcctactccctcctctcaaagcacttgttggccccccaccgccgcatctgcatcccataatcgcctacgccatcgccgccgccttcgggtccttctcgctcagcctcgactgctcgctcatcttcaccgaggcgctcctcacccccgccatcccctccgtgtcggcgtgcgccggcggcatcttgcccagtctcagccgatttatccttcggtctgttagggccttatcaaaccgccgccacggcgaactcgcgccgctgccatgttcgcctcgcgcacccaccatctcctcaacaacgttcaaaccgccaaccacgacatcctcctccacaacccgacctctcacgcatcccaacttggtgcggcgtaaacgcgcagcagcacttcgcctcggtcgaccacggcctgcccccaggcgttgacatccagatccatctcgctccgatctacattcgagaagtttgtctctggcatcgattccccaatccgaatcattgccgacgtcttctttgggtggacggtcgaagtcacgcgcacgcacatcccacacttgttcctccccggcggtgcattcagcaacaccgtcttcttctccgtgtcggagcacctcgggccataggggcagacccgtgaacgacattcttttggcgtgtcacgacctcctgtcgcaagctcgatgctctccccatcgacacgtgagccccttggagggagccccgacctagattttactgagagtttctcctcatcaacctagatctcagtttctctggactttactgagcactcaacattgtgttttttggttgctggtaaattgctcatttactgctatagttgattagtaaatataccggtattagtatttatatagttactggttacttgtaatacaaacatttttcattgaagcgcgtatatggtttgtaaaataccagaacaaggtcagtacttttatcattggcgagtatcttttatgtgagtaatatttttatttccatgtttatctacttagttctcgtggcatgctgccttttcagtattggacaatgctaatggagttacaactccaaggacaggaaggtatagtgcagatggagcaggtggtgatgcttctgtagagcttacacggccgtgcaggcacgcagctgccgcgcttggtgatttgatatttgtgtatgacggtttacgtggaggtgccgatccatagatttagcttgaagagaaaatagcagcagaagaaaaagttggcgctcgacaattttttcgaaatcatcttaaaaggctgaccatcaaataaaaaccaggctaaaaacacaaaatgtaatatatatgtcaaggaattccatccttgtgtttgcatggacctagaaaatgcagatttaagaatgatgcgagtgatggaggcctatcaggtcaaggaatttcatcctgatgtttgcaaggacccagaaattgcagatttaagaatgagcgagcgatggaggtctatcagagactacagtgttgtgttgtgttggttcactgtaccacaaacaatattgaagaggactgatgaagagcgcaaagtttatagcatagtcgaagattttgaattgcaattcaaggagaaagaggattgctaaaggatgaccttcaaaacaaaaaaaagctcattaaagaacatgggcattatgaaagcacaataggatccaaagaggtaggtccctttttgtcacttatttaatattcctgaataacctgtgttcggtctgaaagagcacataattgcactcctatttttaatccttacatgattactgcataactgtttatcagtttgtggtctacaggtatcaggctcgctcgcaccacagatatctttgagttattttttactgcattgcgactaattttaggcctccaatttgacaaacagaattaagtagcttatgtatcccttgtttcttgtttcctcagtatatatacacactttccaatatgacgcaggtagcattgttgtagaattgcggttcacggaaacacaaggctagcgcttttgtgcaacaan

SEQ ID NO: 59983 - DNA, 2279 bp, Zea Mays
  misc_feature (2279)..(2279): n is a, c, g, or t
ctccgtcgtgttctgcctcccctctcgttctgcctcccgcgcctccgataaggctctccctgttcggccatacgcacaaccgctctctctccctctcgaagcgacgcagaaccgctcgccagtgtcgcagtcgcctcctgtccctctcctctctctttgccgctgccctcctctaagcatctccctctcctactccctcctctcaaagcacttgttggccccccaccgccgcatctgcatcccataatcgcctacgccatcgccgccgccttcgggtccttctcgctcagcctcgactgctcgctcatcttcaccgaggcgctcctcacccccgccatcccctccgtgtcggcgtgcgccggcggcatcttgcccagtctcagccgatttatccttcggtctgttagggccttatcaaaccgccgccacggcgaactcgcgccgctgccatgttcgcctcgcgcacccaccatctcctcaacaacgttcaaaccgccaaccacgacatcctcctccacaacccgacctctcacgcatcccaacttggtgcggcgtaaacgcgcagcagcacttcgcctcggtcgaccacggcctgcccccaggcgttgacatccagatccatctcgctccgatctacattcgagaagtttgtctctggcatcgattccccaatccgaatcattgccgacgtcttctttgggtggacggtcgaagtcacgcgcacgcacatcccacacttgttcctccccggcggtgcattcagcaacaccgtcttcttctccgtgtcggagcacctcgggccataggggcagacccgtgaacgacattcttttggcgtgtcacgacctcctgtcgcaagctcgatgctctccccatcgacacgtgagccccttggagggagccccgacctagattttactgagagtttctcctcatcaacctagatctcagtttctctggactttactgagcactcaacattgtgttttttggttgctggtaaattgctcatttactgctatagttgattagtaaatataccggtattagtatttatatagttactggttacttgtaatacaaacatttttcattgaagcgcgtatatggtttgtaaaataccagaacaaggtcagtacttttatcattggcgagtatcttttatgtgagtaatatttttatttccatgtttatctacttagttctcgtggcatgctgccttttcagtattggacaatgctaatggagttacaactccaaggacaggaaggtatagtgcagatggagcaggtggtgatgcttctgtagagcttacacggccgtgcaggcacgcagctgccgcgcttggtgatttgatatttgtgtatgacggtttacgtggaggtgccgatccatagatttagcttgaagagaaaatagcagcagaagaaaaagttggcgctcgacaattttttcgaaatcatcttaaaaggctgaccatcaaataaaaaccaggctaaaaacacaaaatgtaatatatatgtcaaggaattccatccttgtgtttgcatggacctagaaaatgcagatttaagaatgatgcgagtgatggaggcctatcaggtcaaggaatttcatcctgatgtttgcaaggacccagaaattgcagatttaagaatgagcgagcgatggaggtctatcagggagtgttcttcgttgctatccattgtgaaacatgtcctacaagactacagtgttgtgttgtgttggttcactgtaccacaaacaatattgaagaggactgatgaagagcgcaaagtttatagcatagtcgaagattttgaattgcaattcaaggagaaagaggattgctaaaggatgaccttcaaaacaaaaaaaagctcattaaagaacatgggcattatgaaagcacaataggatccaaagaggtaggtccctttttgtcacttatttaatattcctgaataacctgtgttcggtctgaaagagcacataattgcactcctatttttaatccttacatgattactgcataactgtttatcagtttgtggtctacaggtatcaggctcgctcgcaccacagatatctttgagttattttttactgcattgcgactaattttaggcctccaatttgacaaacagaattaagtagcttatgtatcccttgtttcttgtttcctcagtatatatacacactttccaatatgacgcaggtagcattgttgtagaattgcggttcacggaaacacaaggctagcgcttttgtgcaacaan

SEQ ID NO: 59984 - DNA, 2615 bp, Zea Mays
  misc_feature (2615)..(2615): n is a, c, g, or t
ctccgtcgtgttctgcctcccctctcgttctgcctcccgcgcctccgataaggctctccctgttcggccatacgcacaaccgctctctctccctctcgaagcgacgcagaaccgctcgccagtgtcgcagtcgcctcctgtccctctcctctctctttgccgctgccctcctctaagcatctccctctcctactccctcctctcaaagcacttgttggccccccaccgccgcatctgcatcccataatcgcctacgccatcgccgccgccttcgggtccttctcgctcagcctcgactgctcgctcatcttcaccgaggcgctcctcacccccgccatcccctccgtgtcggcgtgcgccggcggcatcttgcccagtctcagccgatttatccttcggtctgttagggccttatcaaaccgccgccacggcgaactcgcgccgctgccatgttcgcctcgcgcacccaccatctcctcaacaacgttcaaaccgccaaccacgacatcctcctccacaacccgacctctcacgcatcccaacttggtgcggcgtaaacgcgcagcagcacttcgcctcggtcgaccacggcctgcccccaggcgttgacatccagatccatctcgctccgatctacattcgagaagtttgtctctggcatcgattccccaatccgaatcattgccgacgtcttctttgggtggacggtcgaagtcacgcgcacgcacatcccacacttgttcctccccggcggtgcattcagcaacaccgtcttcttctccgtgtcggagcacctcgggccataggggcagacccgtgaacgacattcttttggcgtgtcacgacctcctgtcgcaagctcgatgctctccccatcgacacgtgagccccttggagggagccccgacctagattttactgagagtttctcctcatcaacctagatctcagtttctctggactttactgagcactcaacattgtgttttttggttgctggtaaattgctcatttactgctatagttgattagtaaatataccggtattagtatttatatagttactggttacttgtaatacaaacatttttcattgaagcgcgtatatggtttgtaaaataccagaacaagtattggacaatgctaatggagttacaactccaaggacaggaaggtatagtgcagatggagcaggtggtgatgcttctgtagagcttacacggccgtgcaggcacgcagctgccgcgcttggtgatttgatatttgtgtatgacggtttacgtggaggtgccgatccatagatttagcttgaagagaaaatagcagcagaagaaaaagttggcgctcgacaattttttcgaaatcatcttaaaaggctgaccatcaaataaaaaccaggctaaaaacacaaaatgtaatatatatgtcaaggaattccatccttgtgtttgcatggacctagaaaatgcagatttaagaatgatgcgagtgatggaggcctatcaggtcaaggaatttcatcctgatgtttgcaaggacccagaaattgcagatttaagaatgagcgagcgatggaggtctatcagggagtgttcttcgttgctatccattgtgaaacatgtcctacagtatcccttgccaaccagctcctgtatctgttgcctgctcgattcgttgaagcacagagtatggagaaaacacaacatatatcgcatggattatgatttgttagtgcatgtgttacatattgacttatcgttttgagttgtcaataggtccaaggtactaaattgttgatgcacggatttctaattttatcaatttgttttgtgggctgcgatttattttaagtcgctctaagatctcaattattcctcttttttgttattttttatgccttagctgtaatgtttgttttgaatatttattattggaaaatttgatattttataggtgagacattaattaagccattttcataaaagaacactcctgtggtgacaattagacaagaatactaataatcagattaacatacttaaccttgactgcacatatagagactacagtgttgtgttgtgttggttcactgtaccacaaacaatattgaagaggactgatgaagagcgcaaagtttatagcatagtcgaagattttgaattgcaattcaaggagaaagaggattgctaaaggatgaccttcaaaacaaaaaaaagctcattaaagaacatgggcattatgaaagcacaataggatccaaagaggtaggtccctttttgtcacttatttaatattcctgaataacctgtgttcggtctgaaagagcacataattgcactcctatttttaatccttacatgattactgcataactgtttatcagtttgtggtctacaggtatcaggctcgctcgcaccacagatatctttgagttattttttactgcattgcgactaattttaggcctccaatttgacaaacagaattaagtagcttatgtatcccttgtttcttgtttcctcagtatatatacacactttccaatatgacgcaggtagcattgttgtagaattgcggttcacggaaacacaaggctagcgcttttgtgcaacaan

SEQ ID NO: 59985 - DNA, 2794 bp, Zea Mays
  misc_feature (2794)..(2794): n is a, c, g, or t
ctccgtcgtgttctgcctcccctctcgttctgcctcccgcgcctccgataaggctctccctgttcggccatacgcacaaccgctctctctccctctcgaagcgacgcagaaccgctcgccagtgtcgcagtcgcctcctgtccctctcctctctctttgccgctgccctcctctaagcatctccctctcctactccctcctctcaaagcacttgttggccccccaccgccgcatctgcatcccataatcgcctacgccatcgccgccgccttcgggtccttctcgctcagcctcgactgctcgctcatcttcaccgaggcgctcctcacccccgccatcccctccgtgtcggcgtgcgccggcggcatcttgcccagtctcagccgatttatccttcggtctgttagggccttatcaaaccgccgccacggcgaactcgcgccgctgccatgttcgcctcgcgcacccaccatctcctcaacaacgttcaaaccgccaaccacgacatcctcctccacaacccgacctctcacgcatcccaacttggtgcggcgtaaacgcgcagcagcacttcgcctcggtcgaccacggcctgcccccaggcgttgacatccagatccatctcgctccgatctacattcgagaagtttgtctctggcatcgattccccaatccgaatcattgccgacgtcttctttgggtggacggtcgaagtcacgcgcacgcacatcccacacttgttcctccccggcggtgcattcagcaacaccgtcttcttctccgtgtcggagcacctcgggccataggggcagacccgtgaacgacattcttttggcgtgtcacgacctcctgtcgcaagctcgatgctctccccatcgacacgtgagccccttggagggagccccgacctagattttactgagagtttctcctcatcaacctagatctcagtttctctggactttactgagcactcaacattgtgttttttggttgctggtaaattgctcatttactgctatagttgattagtaaatataccggtattagtatttatatagttactggttacttgtaatacaaacatttttcattgaagcgcgtatatggtttgtaaaataccagaacaaggtcagtacttttatcattggcgagtatcttttatgtgagtaatatttttatttccatgtttatctacttagttctcgtggcatgctgccttttcagtattggacaatgctaatggagttacaactccaaggacaggaaggtatagtgcagatggagcaggtggtgatgcttctgtagagcttacacggccgtgcaggcacgcagctgccgcgcttggtgatttgatatttgtgtatgacggtttacgtggaggtgccgatccatagatttagcttgaagagaaaatagcagcagaagaaaaagttggcgctcgacaattttttcgaaatcatcttaaaaggctgaccatcaaataaaaaccaggctaaaaacacaaaatgtaatatatatggcctaattttttccttcaatcaccacatgcctatttttttcttcaatttttcttcataagaataagtcaaggaattccatccttgtgtttgcatggacctagaaaatgcagatttaagaatgatgcgagtgatggaggcctatcaggtcaaggaatttcatcctgatgtttgcaaggacccagaaattgcagatttaagaatgagcgagcgatggaggtctatcagggagtgttcttcgttgctatccattgtgaaacatgtcctacagtatcccttgccaaccagctcctgtatctgttgcctgctcgattcgttgaagcacagagtatggagaaaacacaacatatatcgcatggattatgatttgttagtgcatgtgttacatattgacttatcgttttgagttgtcaataggtccaaggtactaaattgttgatgcacggatttctaattttatcaatttgttttgtgggctgcgatttattttaagtcgctctaagatctcaattattcctcttttttgttattttttatgccttagctgtaatgtttgttttgaatatttattattggaaaatttgatattttataggtgagacattaattaagccattttcataaaagaacactcctgtggtgacaattagacaagaatactaataatcagattaacatacttaaccttgactgcacatatagagactacagtgttgtgttgtgttggttcactgtaccacaaacaatattgaagaggactgatgaagagcgcaaagtttatagcatagtcgaagattttgaattgcaattcaaggagaaagaggattgctaaagctttcttttcaatttaggatgaccttcaaaacaaaaaaaagctcattaaagaacatgggcattatgaaagcacaataggatccaaagaggtaggtccctttttgtcacttatttaatattcctgaataacctgtgttcggtctgaaagagcacataattgcactcctatttttaatccttacatgattactgcataactgtttatcagtttgtggtctacaggtatcaggctcgctcgcaccacagatatctttgagttattttttactgcattgcgactaattttaggcctccaatttgacaaacagaattaagtagcttatgtatcccttgtttcttgtttcctcagtatatatacacactttccaatatgacgcaggtagcattgttgtagaattgcggttcacggaaacacaaggctagcgcttttgtgcaacaan

SEQ ID NO: 59986 - DNA, 2449 bp, Zea Mays
  misc_feature (2449)..(2449): n is a, c, g, or t
gcctcccctctcgttctgcctcccgcgcctccgataaggctctccctgttcggccatacgcacaaccgctctctctccctctcgaagcgacgcagaaccgctcgccagtgtcgcagtcgcctcctgtccctctcctctctctttgccgctgccctcctctaagcatctccctctcctactccctcctctcaaagcacttgttggccccccaccgccgcatctgcatcccataatcgcctacgccatcgccgccgccttcgggtccttctcgctcagcctcgactgctcgctcatcttcaccgaggcgctcctcacccccgccatcccctccgtgtcggcgtgcgccggcggcatcttgcccagtctcagccgatttatccttcggtctgttagggccttatcaaaccgccgccacggcgaactcgcgccgctgccatgttcgcctcgcgcacccaccatctcctcaacaacgttcaaaccgccaaccacgacatcctcctccacaacccgacctctcacgcatcccaacttggtgcggcgtaaacgcgcagcagcacttcgcctcggtcgaccacggcctgcccccaggcgttgacatccagatccatctcgctccgatctacattcgagaagtttgtctctggcatcgattccccaatccgaatcattgccgacgtcttctttgggtggacggtcgaagtcacgcgcacgcacatcccacacttgttcctccccggcggtgcattcagcaacaccgtcttcttctccgtgtcggagcacctcgggccataggggcagacccgtgaacgacattcttttggcgtgtcacgacctcctgtcgcaagctcgatgctctccccatcgacactattggacaatgctaatggagttacaactccaaggacaggaaggtatagtgcagatggagcaggtggtgatgcttctgtagagcttacacggccgtgcaggcacgcagctgccgcgcttggtgatttgatatttgtgtatgacggtttacgtggaggtgccgatccatagatttagcttgaagagaaaatagcagcagaagaaaaagttggcgctcgacaattttttcgaaatcatcttaaaaggctgaccatcaaataaaaaccaggctaaaaacacaaaatgtaatatatatgtcaaggaattccatccttgtgtttgcatggacctagaaaatgcagatttaagaatgatgcgagtgatggaggcctatcaggtcaaggaatttcatcctgatgtttgcaaggacccagaaattgcagatttaagaatgagcgagcgatggaggtctatcagggagtgttcttcgttgctatccattgtgaaacatgtcctacagtatcccttgccaaccagctcctgtatctgttgcctgctcgattcgttgaagcacagagtatggagaaaacacaacatatatcgcatggattatgatttgttagtgcatgtgttacatattgacttatcgttttgagttgtcaataggtccaaggtactaaattgttgatgcacggatttctaattttatcaatttgttttgtgggctgcgatttattttaagtcgctctaagatctcaattattcctcttttttgttattttttatgccttagctgtaatgtttgttttgaatatttattattggaaaatttgatattttataggtgagacattaattaagccattttcataaaagaacactcctgtggtgacaattagacaagaatactaataatcagattaacatacttaaccttgactgcacatatagagactacagtgttgtgttgtgttggttcactgtaccacaaacaatattgaagaggactgatgaagagcgcaaagtttatagcatagtcgaagattttgaattgcaattcaaggagaaagaggattgctaaaggtcttcataatacttcttgttttcattttagttggtgggttcttcagtaaagctcacaaaatatttattttttctcaaagctttcttttcaatttaggatgaccttcaaaacaaaaaaaagctcattaaagaacatgggcattatgaaagcacaataggatccaaagaggtaggtccctttttgtcacttatttaatattcctgaataacctgtgttcggtctgaaagagcacataattgcactcctatttttaatccttacatgattactgcataactgtttatcagtttgtggtctacaggtatcaggctcgctcgcaccacagatatctttgagttattttttactgcattgcgactaattttaggcctccaatttgacaaacagaattaagtagcttatgtatcccttgtttcttgtttcctcagtatatatacacactttccaatatgacgcaggtagcattgttgtagaattgcggttcacggaaacacaaggctagcgcttttgtgcaacaan

SEQ ID NO: 59987 - DNA, 2940 bp, Zea Mays
  misc_feature (2940)..(2940): n is a, c, g, or t
ctcccctctcgttctgcctcccgcgcctccgataaggctctccctgttcggccatacgcacaaccgctctctctccctctcgaagcgacgcagaaccgctcgccagtgtcgcagtcgcctcctgtccctctcctctctctttgccgctgccctcctctaagcatctccctctcctactccctcctctcaaagcacttgttggccccccaccgccgcatctgcatcccataatcgcctacgccatcgccgccgccttcgggtccttctcgctcagcctcgactgctcgctcatcttcaccgaggcgctcctcacccccgccatcccctccgtgtcggcgtgcgccggcggcatcttgcccagtctcagccgatttatccttcggtctgttagggccttatcaaaccgccgccacggcgaactcgcgccgctgccatgttcgcctcgcgcacccaccatctcctcaacaacgttcaaaccgccaaccacgacatcctcctccacaacccgacctctcacgcatcccaacttggtgcggcgtaaacgcgcagcagcacttcgcctcggtcgaccacggcctgcccccaggcgttgacatccagatccatctcgctccgatctacattcgagaagtttgtctctggcatcgattccccaatccgaatcattgccgacgtcttctttgggtggacggtcgaagtcacgcgcacgcacatcccacacttgttcctccccggcggtgcattcagcaacaccgtcttcttctccgtgtcggagcacctcgggccataggggcagacccgtgaacgacattcttttggcgtgtcacgacctcctgtcgcaagctcgatgctctccccatcgacactattggacaatgctaatggagttacaactccaaggacaggaaggtatagtgcagatggagcaggtggtgatgcttctgtagagcttacacggccgtgcaggcacgcagctgccgcgcttggtgatttgatatttgtgtatgacggtttacgtggaggtaaaacacttcactctcttagctaatctaatttcttagatcagtatcatacaaggctgcttccttattgccacctgtgtcctgttctcttactgaacccgccctttctttgttcatggaaaaatatagacttctcttgtgtgcatgaaattgattattgaattggattgctctaaatttctggagcatatatattgaacgaacaattcttaatattgattcctgtagataaataaatcaatggtaatcaaccgaagctgcccttgcattacatttttctacatcagtgtagtggttgttgttgtgcaagctgcacatagaaagcctttttgaatgctacttgcttcttgtttgatgcacataccttcattgatcatttttggtcagttgaagctattgattactgttacaataacaaagccttttagtcccaagcaaaggtgtgtagttctcgtgtatttgagaattaaaaaggcctttttctaatctttcagtaaaggaacctgttagttgagaagtgttaactggcctcttagtaaaactgaactaccatattcacttggctgaagtacttatgttttttgcacaatacggcaatccaggcagctaaaatgtattccatttgcaaggtgccttcaatattactgtgttgttaaggtgattcactctatgtttttgcttctgataggtgccgatccatagatttagcttgaagagaaaatagcagcagaagaaaaagttggcgctcgacaattttttcgaaatcatcttaaaaggctgaccatcaaataaaaaccaggctaaaaacacaaaatgtaatatatatgtaagtgaaaattggtttgatgatattctcttttagacaaatagagaattatttattttcccatttttagtagcatgcctaatttttttattcaactgagtttttattttatcatgaactgattggagttcttactctgtcacaagcagggcctaattttttccttcaatcaccacatgcctatttttttcttcaatttttcttcataagaataagtaagatttttttgtgttataaactgggagtgtaggttgagcttttgctaggccaaaccagtttgttattttcttgtctaacaatactgccacgacataacattgggagctctgtacaggtcaaggaattccatccttgtgtttgcatggacctagaaaatgcagatttaagaatgatgcgagtgatggaggcctatcaggtcaaggaatttcatcctgatgtttgcaaggacccagaaattgcagatttaagaatgagcgagcgatggaggtctatcagggagtgttcttcgttgctatccattgtgaaacatgtcctacaagactacagtgttgtgttgtgttggttcactgtaccacaaacaatattgaagaggactgatgaagagcgcaaagtttatagcatagtcgaagattttgaattgcaattcaaggagaaagaggattgctaaaggatgaccttcaaaacaaaaaaaagctcattaaagaacatgggcattatgaaagcacaataggatccaaagaggtaggtccctttttgtcacttatttaatattcctgaataacctgtgttcggtctgaaagagcacataattgcactcctatttttaatccttacatgattactgcataactgtttatcagtttgtggtctacaggtatcaggctcgctcgcaccacagatatctttgagttattttttactgcattgcgactaattttaggcctccaatttgacaaacagaattaagtagcttatgtatcccttgtttcttgtttcctcagtatatatacacactttccaatatgacgcaggtagcattgttgtagaattgcggttcacggaaacacaaggctagcgcttttgtgcaacaan

SEQ ID NO: 59988 - DNA, 3253 bp, Zea Mays
  misc_feature (3253)..(3253): n is a, c, g, or t
ctcccctctcgttctgcctcccgcgcctccgataaggctctccctgttcggccatacgcacaaccgctctctctccctctcgaagcgacgcagaaccgctcgccagtgtcgcagtcgcctcctgtccctctcctctctctttgccgctgccctcctctaagcatctccctctcctactccctcctctcaaagcacttgttggccccccaccgccgcatctgcatcccataatcgcctacgccatcgccgccgccttcgggtccttctcgctcagcctcgactgctcgctcatcttcaccgaggcgctcctcacccccgccatcccctccgtgtcggcgtgcgccggcggcatcttgcccagtctcagccgatttatccttcggtctgttagggccttatcaaaccgccgccacggcgaactcgcgccgctgccatgttcgcctcgcgcacccaccatctcctcaacaacgttcaaaccgccaaccacgacatcctcctccacaacccgacctctcacgcatcccaacttggtgcggcgtaaacgcgcagcagcacttcgcctcggtcgaccacggcctgcccccaggcgttgacatccagatccatctcgctccgatctacattcgagaagtttgtctctggcatcgattccccaatccgaatcattgccgacgtcttctttgggtggacggtcgaagtcacgcgcacgcacatcccacacttgttcctccccggcggtgcattcagcaacaccgtcttcttctccgtgtcggagcacctcgggccataggggcagacccgtgaacgacattcttttggcgtgtcacgacctcctgtcgcaagctcgatgctctccccatcgacactattggacaatgctaatggagttacaactccaaggacaggaaggtatagtgcagatggagcaggtggtgatgcttctgtagagcttacacggccgtgcaggcacgcagctgccgcgcttggtgatttgatatttgtgtatgacggtttacgtggaggtaaaacacttcactctcttagctaatctaatttcttagatcagtatcatacaaggctgcttccttattgccacctgtgtcctgttctcttactgaacccgccctttctttgttcatggaaaaatatagacttctcttgtgtgcatgaaattgattattgaattggattgctctaaatttctggagcatatatattgaacgaacaattcttaatattgattcctgtagataaataaatcaatggtaatcaaccgaagctgcccttgcattacatttttctacatcagtgtagtggttgttgttgtgcaagctgcacatagaaagcctttttgaatgctacttgcttcttgtttgatgcacataccttcattgatcatttttggtcagttgaagctattgattactgttacaataacaaagccttttagtcccaagcaaaggtgtgtagttctcgtgtatttgagaattaaaaaggcctttttctaatctttcagtaaaggaacctgttagttgagaagtgttaactggcctcttagtaaaactgaactaccatattcacttggctgaagtacttatgttttttgcacaatacggcaatccaggcagctaaaatgtattccatttgcaaggtgccttcaatattactgtgttgttaaggtgattcactctatgtttttgcttctgataggtgccgatccatagatttagcttgaagagaaaatagcagcagaagaaaaagttggcgctcgacaattttttcgaaatcatcttaaaaggctgaccatcaaataaaaaccaggctaaaaacacaaaatgtaatatatatgtaagtgaaaattggtttgatgatattctcttttagacaaatagagaattatttattttcccatttttagtagcatgcctaatttttttattcaactgagtttttattttatcatgaactgattggagttcttactctgtcacaagcagggcctaattttttccttcaatcaccacatgcctatttttttcttcaatttttcttcataagaataagtcaaggaattccatccttgtgtttgcatggacctagaaaatgcagatttaagaatgatgcgagtgatggaggcctatcaggtcaaggaatttcatcctgatgtttgcaaggacccagaaattgcagatttaagaatgagcgagcgatggaggtctatcagggagtgttcttcgttgctatccattgtgaaacatgtcctacagtatcccttgccaaccagctcctgtatctgttgcctgctcgattcgttgaagcacagagtatggagaaaacacaacatatatcgcatggattatgatttgttagtgcatgtgttacatattgacttatcgttttgagttgtcaataggtccaaggtactaaattgttgatgcacggatttctaattttatcaatttgttttgtgggctgcgatttattttaagtcgctctaagatctcaattattcctcttttttgttattttttatgccttagctgtaatgtttgttttgaatatttattattggaaaatttgatattttataggtgagacattaattaagccattttcataaaagaacactcctgtggtgacaattagacaagaatactaataatcagattaacatacttaaccttgactgcacatatagagactacagtgttgtgttgtgttggttcactgtaccacaaacaatattgaagaggactgatgaagagcgcaaagtttatagcatagtcgaagattttgaattgcaattcaaggagaaagaggattgctaaaggatgaccttcaaaacaaaaaaaagctcattaaagaacatgggcattatgaaagcacaataggatccaaagaggtaggtccctttttgtcacttatttaatattcctgaataacctgtgttcggtctgaaagagcacataattgcactcctatttttaatccttacatgattactgcataactgtttatcagtttgtggtctacaggtatcaggctcgctcgcaccacagatatctttgagttattttttactgcattgcgactaattttaggcctccaatttgacaaacagaattaagtagcttatgtatcccttgtttcttgtttcctcagtatatatacacactttccaatatgacgcaggtagcattgttgtagaattgcggttcacggaaacacaaggctagcgcttttgtgcaacaan

SEQ ID NO: 59989 - DNA, 1563 bp, Zea Mays
ctgcctcccgcgcctccgataaggctctccctgttcggccatacgcacaaccgctctctctccctctcgaagcgacgcagaaccgctcgccagtgtcgcagtcgcctcctgtccctctcctctctctttgccgctgccctcctctaagcatctccctctcctactccctcctctcaaagcacttgttggccccccaccgccgcatctgcatcccataatcgcctacgccatcgccgccgccttcgggtccttctcgctcagcctcgactgctcgctcatcttcaccgaggcgctcctcacccccgccatcccctccgtgtcggcgtgcgccggcggcatcttgcccagtctcagccgatttatccttcggtctgttagggccttatcaaaccgccgccacggcgaactcgcgccgctgccatgttcgcctcgcgcacccaccatctcctcaacaacgttcaaaccgccaaccacgacatcctcctccacaacccgacctctcacgcatcccaacttggtgcggcgtaaacgcgcagcagcacttcgcctcggtcgaccacggcctgcccccaggcgttgacatccagatccatctcgctccgatctacattcgagaagtttgtctctggcatcgattccccaatccgaatcattgccgacgtcttctttgggtggacggtcgaagtcacgcgcacgcacatcccacacttgttcctccccggcggtgcattcagcaacaccgtcttcttctccgtgtcggagcacctcgggccataggggcagacccgtgaacgacattcttttggcgtgtcacgacctcctgtcgcaagctcgatgctctccccatcgacacgtgagccccttggagggagccccgacctagattttactgagagtttctcctcatcaacctagatctcagtttctctggactttactgagcactcaacattgtgttttttggttgctggtaaattgctcatttactgctatagttgattagtaaatataccggtattagtatttatatagttactggttacttgtaatacaaacatttttcattgaagcgcgtatatggtttgtaaaataccagaacaaggtcagtacttttatcattggcgagtatcttttatgtgagtaatatttttatttccatgtttatctacttagttctcgtggcatgctgccttttcagtattggacaatgctaatggagttacaactccaaggacaggaaggtatagtgcagatggagcaggtggtgatgcttctgtagagcttacacggccgtgcaggcacgcagctgccgcgcttggtgatttgatatttgtgtatgacggtttacgtggaggtcaaggaattccatccttgtgtttgcatggacctagaaaatgcagatttaagaatgatgcgagtgatggaggcctatcaggacctactttattccttcaatcaccccatgtgtgggggatagatatcccccgggtcctcttgaacactaaaacgtatcatgggccgtctgatgggcctcccactgggtcatcctatgggatgggcggg

SEQ ID NO: 59990 - DNA, 2070 bp, Zea Mays
  misc_feature (2070)..(2070): n is a, c, g, or t
ctgcctcccgcgcctccgataaggctctccctgttcggccatacgcacaaccgctctctctccctctcgaagcgacgcagaaccgctcgccagtgtcgcagtcgcctcctgtccctctcctctctctttgccgctgccctcctctaagcatctccctctcctactccctcctctcaaagcacttgttggccccccaccgccgcatctgcatcccataatcgcctacgccatcgccgccgccttcgggtccttctcgctcagcctcgactgctcgctcatcttcaccgaggcgctcctcacccccgccatcccctccgtgtcggcgtgcgccggcggcatcttgcccagtctcagccgatttatccttcggtctgttagggccttatcaaaccgccgccacggcgaactcgcgccgctgccatgttcgcctcgcgcacccaccatctcctcaacaacgttcaaaccgccaaccacgacatcctcctccacaacccgacctctcacgcatcccaacttggtgcggcgtaaacgcgcagcagcacttcgcctcggtcgaccacggcctgcccccaggcgttgacatccagatccatctcgctccgatctacattcgagaagtttgtctctggcatcgattccccaatccgaatcattgccgacgtcttctttgggtggacggtcgaagtcacgcgcacgcacatcccacacttgttcctccccggcggtgcattcagcaacaccgtcttcttctccgtgtcggagcacctcgggccataggggcagacccgtgaacgacattcttttggcgtgtcacgacctcctgtcgcaagctcgatgctctccccatcgacacgtgagccccttggagggagccccgacctagattttactgagagtttctcctcatcaacctagatctcagtttctctggactttactgagcactcaacattgtgttttttggttgctggtaaattgctcatttactgctatagttgattagtaaatataccggtattagtatttatatagttactggttacttgtaatacaaacatttttcattgaagcgcgtatatggtttgtaaaataccagaacaaggtcagtacttttatcattggcgagtatcttttatgtgagtaatatttttatttccatgtttatctacttagttctcgtggcatgctgccttttcagtattggacaatgctaatggagttacaactccaaggacaggaaggtatagtgcagatggagcaggtggtgatgcttctgtagagcttacacggccgtgcaggcacgcagctgccgcgcttggtgatttgatatttgtgtatgacggtttacgtggaggtcaaggaattccatccttgtgtttgcatggacctagaaaatgcagatttaagaatgatgcgagtgatggaggcctatcaggtcaaggaatttcatcctgatgtttgcaaggacccagaaattgcagatttaagaatgagcgagcgatggaggtctatcagagactacagtgttgtgttgtgttggttcactgtaccacaaacaatattgaagaggactgatgaagagcgcaaagtttatagcatagtcgaagattttgaattgcaattcaaggagaaagaggattgctaaaggatgaccttcaaaacaaaaaaaagctcattaaagaacatgggcattatgaaagcacaataggatccaaagaggtaggtccctttttgtcacttatttaatattcctgaataacctgtgttcggtctgaaagagcacataattgcactcctatttttaatccttacatgattactgcataactgtttatcagtttgtggtctacaggtatcaggctcgctcgcaccacagatatctttgagttattttttactgcattgcgactaattttaggcctccaatttgacaaacagaattaagtagcttatgtatcccttgtttcttgtttcctcagtatatatacacactttccaatatgacgcaggtagcattgttgtagaattgcggttcacggaaacacaaggctagcgcttttgtgcaacaan

SEQ ID NO: 59991 - DNA, 2038 bp, Zea Mays
  misc_feature (2038)..(2038): n is a, c, g, or t
ctgcctcccgcgcctccgataaggctctccctgttcggccatacgcacaaccgctctctctccctctcgaagcgacgcagaaccgctcgccagtgtcgcagtcgcctcctgtccctctcctctctctttgccgctgccctcctctaagcatctccctctcctactccctcctctcaaagcacttgttggccccccaccgccgcatctgcatcccataatcgcctacgccatcgccgccgccttcgggtccttctcgctcagcctcgactgctcgctcatcttcaccgaggcgctcctcacccccgccatcccctccgtgtcggcgtgcgccggcggcatcttgcccagtctcagccgatttatccttcggtctgttagggccttatcaaaccgccgccacggcgaactcgcgccgctgccatgttcgcctcgcgcacccaccatctcctcaacaacgttcaaaccgccaaccacgacatcctcctccacaacccgacctctcacgcatcccaacttggtgcggcgtaaacgcgcagcagcacttcgcctcggtcgaccacggcctgcccccaggcgttgacatccagatccatctcgctccgatctacattcgagaagtttgtctctggcatcgattccccaatccgaatcattgccgacgtcttctttgggtggacggtcgaagtcacgcgcacgcacatcccacacttgttcctccccggcggtgcattcagcaacaccgtcttcttctccgtgtcggagcacctcgggccataggggcagacccgtgaacgacattcttttggcgtgtcacgacctcctgtcgcaagctcgatgctctccccatcgacacgtgagccccttggagggagccccgacctagattttactgagagtttctcctcatcaacctagatctcagtttctctggactttactgagcactcaacattgtgttttttggttgctggtaaattgctcatttactgctatagttgattagtaaatataccggtattagtatttatatagttactggttacttgtaatacaaacatttttcattgaagcgcgtatatggtttgtaaaataccagaacaaggtcagtacttttatcattggcgagtatcttttatgtgagtaatatttttatttccatgtttatctacttagttctcgtggcatgctgccttttcagtattggacaatgctaatggagttacaactccaaggacaggaaggtatagtgcagatggagcaggtggtgatgcttctgtagagcttacacggccgtgcaggcacgcagctgccgcgcttggtgatttgatatttgtgtatgacggtttacgtggaggtcaaggaattccatccttgtgtttgcatggacctagaaaatgcagatttaagaatgatgcgagtgatggaggcctatcaggtcaaggaatttcatcctgatgtttgcaaggacccagaaattgcagatttaagaatgagcgagcgatggaggtctatcagggagtgttcttcgttgctatccattgtgaaacatgtcctacagtatcccttgccaaccagctcctgtatctgttgcctgctcgattcgttgaagcacagagatgaccttcaaaacaaaaaaaagctcattaaagaacatgggcattatgaaagcacaataggatccaaagaggtaggtccctttttgtcacttatttaatattcctgaataacctgtgttcggtctgaaagagcacataattgcactcctatttttaatccttacatgattactgcataactgtttatcagtttgtggtctacaggtatcaggctcgctcgcaccacagatatctttgagttattttttactgcattgcgactaattttaggcctccaatttgacaaacagaattaagtagcttatgtatcccttgtttcttgtttcctcagtatatatacacactttccaatatgacgcaggtagcattgttgtagaattgcggttcacggaaacacaaggctagcgcttttgtgcaacaan

SEQ ID NO: 59992 - DNA, 2110 bp, Zea Mays
  misc_feature (2110)..(2110): n is a, c, g, or t
ctgcctcccgcgcctccgataaggctctccctgttcggccatacgcacaaccgctctctctccctctcgaagcgacgcagaaccgctcgccagtgtcgcagtcgcctcctgtccctctcctctctctttgccgctgccctcctctaagcatctccctctcctactccctcctctcaaagcacttgttggccccccaccgccgcatctgcatcccataatcgcctacgccatcgccgccgccttcgggtccttctcgctcagcctcgactgctcgctcatcttcaccgaggcgctcctcacccccgccatcccctccgtgtcggcgtgcgccggcggcatcttgcccagtctcagccgatttatccttcggtctgttagggccttatcaaaccgccgccacggcgaactcgcgccgctgccatgttcgcctcgcgcacccaccatctcctcaacaacgttcaaaccgccaaccacgacatcctcctccacaacccgacctctcacgcatcccaacttggtgcggcgtaaacgcgcagcagcacttcgcctcggtcgaccacggcctgcccccaggcgttgacatccagatccatctcgctccgatctacattcgagaagtttgtctctggcatcgattccccaatccgaatcattgccgacgtcttctttgggtggacggtcgaagtcacgcgcacgcacatcccacacttgttcctccccggcggtgcattcagcaacaccgtcttcttctccgtgtcggagcacctcgggccataggggcagacccgtgaacgacattcttttggcgtgtcacgacctcctgtcgcaagctcgatgctctccccatcgacacgtgagccccttggagggagccccgacctagattttactgagagtttctcctcatcaacctagatctcagtttctctggactttactgagcactcaacattgtgttttttggttgctggtaaattgctcatttactgctatagttgattagtaaatataccggtattagtatttatatagttactggttacttgtaatacaaacatttttcattgaagcgcgtatatggtttgtaaaataccagaacaaggtcagtacttttatcattggcgagtatcttttatgtgagtaatatttttatttccatgtttatctacttagttctcgtggcatgctgccttttcagtattggacaatgctaatggagttacaactccaaggacaggaaggtatagtgcagatggagcaggtggtgatgcttctgtagagcttacacggccgtgcaggcacgcagctgccgcgcttggtgatttgatatttgtgtatgacggtttacgtggaggtcaaggaattccatccttgtgtttgcatggacctagaaaatgcagatttaagaatgatgcgagtgatggaggcctatcaggtcaaggaatttcatcctgatgtttgcaaggacccagaaattgcagatttaagaatgagcgagcgatggaggtctatcagggagtgttcttcgttgctatccattgtgaaacatgtcctacaactacagtgttgtgttgtgttggttcactgtaccacaaacaatattgaagaggactgatgaagagcgcaaagtttatagcatagtcgaagattttgaattgcaattcaaggagaaagaggattgctaaaggatgaccttcaaaacaaaaaaaagctcattaaagaacatgggcattatgaaagcacaataggatccaaagaggtaggtccctttttgtcacttatttaatattcctgaataacctgtgttcggtctgaaagagcacataattgcactcctatttttaatccttacatgattactgcataactgtttatcagtttgtggtctacaggtatcaggctcgctcgcaccacagatatctttgagttattttttactgcattgcgactaattttaggcctccaatttgacaaacagaattaagtagcttatgtatcccttgtttcttgtttcctcagtatatatacacactttccaatatgacgcaggtagcattgttgtagaattgcggttcacggaaacacaaggctagcgcttttgtgcaacaan

SEQ ID NO: 59993 - DNA, 2170 bp, Zea Mays
  misc_feature (2170)..(2170): n is a, c, g, or t
ctgcctcccgcgcctccgataaggctctccctgttcggccatacgcacaaccgctctctctccctctcgaagcgacgcagaaccgctcgccagtgtcgcagtcgcctcctgtccctctcctctctctttgccgctgccctcctctaagcatctccctctcctactccctcctctcaaagcacttgttggccccccaccgccgcatctgcatcccataatcgcctacgccatcgccgccgccttcgggtccttctcgctcagcctcgactgctcgctcatcttcaccgaggcgctcctcacccccgccatcccctccgtgtcggcgtgcgccggcggcatcttgcccagtctcagccgatttatccttcggtctgttagggccttatcaaaccgccgccacggcgaactcgcgccgctgccatgttcgcctcgcgcacccaccatctcctcaacaacgttcaaaccgccaaccacgacatcctcctccacaacccgacctctcacgcatcccaacttggtgcggcgtaaacgcgcagcagcacttcgcctcggtcgaccacggcctgcccccaggcgttgacatccagatccatctcgctccgatctacattcgagaagtttgtctctggcatcgattccccaatccgaatcattgccgacgtcttctttgggtggacggtcgaagtcacgcgcacgcacatcccacacttgttcctccccggcggtgcattcagcaacaccgtcttcttctccgtgtcggagcacctcgggccataggggcagacccgtgaacgacattcttttggcgtgtcacgacctcctgtcgcaagctcgatgctctccccatcgacacgtgagccccttggagggagccccgacctagattttactgagagtttctcctcatcaacctagatctcagtttctctggactttactgagcactcaacattgtgttttttggttgctggtaaattgctcatttactgctatagttgattagtaaatataccggtattagtatttatatagttactggttacttgtaatacaaacatttttcattgaagcgcgtatatggtttgtaaaataccagaacaaggtcagtacttttatcattggcgagtatcttttatgtgagtaatatttttatttccatgtttatctacttagttctcgtggcatgctgccttttcagtattggacaatgctaatggagttacaactccaaggacaggaaggtatagtgcagatggagcaggtggtgatgcttctgtagagcttacacggccgtgcaggcacgcagctgccgcgcttggtgatttgatatttgtgtatgacggtttacgtggaggtcaaggaattccatccttgtgtttgcatggacctagaaaatgcagatttaagaatgatgcgagtgatggaggcctatcaggtcaaggaatttcatcctgatgtttgcaaggacccagaaattgcagatttaagaatgagcgagcgatggaggtctatcagggagtgttcttcgttgctatccattgtgaaacatgtcctacagtatcccttgccaaccagctcctgtatctgttgcctgctcgattcgttgaagcacagaagactacagtgttgtgttgtgttggttcactgtaccacaaacaatattgaagaggactgatgaagagcgcaaagtttatagcatagtcgaagattttgaattgcaattcaaggagaaagaggattgctaaaggatgaccttcaaaacaaaaaaaagctcattaaagaacatgggcattatgaaagcacaataggatccaaagaggtaggtccctttttgtcacttatttaatattcctgaataacctgtgttcggtctgaaagagcacataattgcactcctatttttaatccttacatgattactgcataactgtttatcagtttgtggtctacaggtatcaggctcgctcgcaccacagatatctttgagttattttttactgcattgcgactaattttaggcctccaatttgacaaacagaattaagtagcttatgtatcccttgtttcttgtttcctcagtatatatacacactttccaatatgacgcaggtagcattgttgtagaattgcggttcacggaaacacaaggctagcgcttttgtgcaacaan

SEQ ID NO: 59994 - DNA, 2129 bp, Zea Mays
  misc_feature (2129)..(2129): n is a, c, g, or t
ctgcctcccgcgcctccgataaggctctccctgttcggccatacgcacaaccgctctctctccctctcgaagcgacgcagaaccgctcgccagtgtcgcagtcgcctcctgtccctctcctctctctttgccgctgccctcctctaagcatctccctctcctactccctcctctcaaagcacttgttggccccccaccgccgcatctgcatcccataatcgcctacgccatcgccgccgccttcgggtccttctcgctcagcctcgactgctcgctcatcttcaccgaggcgctcctcacccccgccatcccctccgtgtcggcgtgcgccggcggcatcttgcccagtctcagccgatttatccttcggtctgttagggccttatcaaaccgccgccacggcgaactcgcgccgctgccatgttcgcctcgcgcacccaccatctcctcaacaacgttcaaaccgccaaccacgacatcctcctccacaacccgacctctcacgcatcccaacttggtgcggcgtaaacgcgcagcagcacttcgcctcggtcgaccacggcctgcccccaggcgttgacatccagatccatctcgctccgatctacattcgagaagtttgtctctggcatcgattccccaatccgaatcattgccgacgtcttctttgggtggacggtcgaagtcacgcgcacgcacatcccacacttgttcctccccggcggtgcattcagcaacaccgtcttcttctccgtgtcggagcacctcgggccataggggcagacccgtgaacgacattcttttggcgtgtcacgacctcctgtcgcaagctcgatgctctccccatcgacacgtgagccccttggagggagccccgacctagattttactgagagtttctcctcatcaacctagatctcagtttctctggactttactgagcactcaacattgtgttttttggttgctggtaaattgctcatttactgctatagttgattagtaaatataccggtattagtatttatatagttactggttacttgtaatacaaacatttttcattgaagcgcgtatatggtttgtaaaataccagaacaaggtcagtacttttatcattggcgagtatcttttatgtgagtaatatttttatttccatgtttatctacttagttctcgtggcatgctgccttttcagtattggacaatgctaatggagttacaactccaaggacaggaaggtatagtgcagatggagcaggtggtgatgcttctgtagagcttacacggccgtgcaggcacgcagctgccgcgcttggtgatttgatatttgtgtatgacggtttacgtggaggtcaaggaattccatccttgtgtttgcatggacctagaaaatgcagatttaagaatgatgcgagtgatggaggcctatcaggtcaaggaatttcatcctgatgtttgcaaggacccagaaattgcagatttaagaatgagcgagcgatggaggtctatcagggagtgttcttcgttgctatccattgtgaaacatgtcctacaagactacagtgttgtgttgtgttggttcactgtaccacaaacaatattgaagaggactgatgaagagcgcaaagtttatagcatagtcgaagattttgaattgcaattcaaggagaaagaggattgctaaagctttcttttcaatttaggatgaccttcaaaacaaaaaaaagctcattaaagaacatgggcattatgaaagcacaataggatccaaagaggtaggtccctttttgtcacttatttaatattcctgaataacctgtgttcggtctgaaagagcacataattgcactcctatttttaatccttacatgattactgcataactgtttatcagtttgtggtctacaggtatcaggctcgctcgcaccacagatatctttgagttattttttactgcattgcgactaattttaggcctccaatttgacaaacagaattaagtagcttatgtatcccttgtttcttgtttcctcagtatatatacacactttccaatatgacgcaggtagcattgttgtagaattgcggttcacggaaacacaaggctagcgcttttgtgcaacaan

SEQ ID NO: 59995 - DNA, 2344 bp, Zea Mays
  misc_feature (2344)..(2344): n is a, c, g, or t
ctccctctcgaagcgacgcagaaccgctcgccagtgtcgcagtcgcctcctgtccctctcctctctctttgccgctgccctcctctaagcatctccctctcctactccctcctctcaaagcacttgttggccccccaccgccgcatctgcatcccataatcgcctacgccatcgccgccgccttcgggtccttctcgctcagcctcgactgctcgctcatcttcaccgaggcgctcctcacccccgccatcccctccgtgtcggcgtgcgccggcggcatcttgcccagtctcagccgatttatccttcggtctgttagggccttatcaaaccgccgccacggcgaactcgcgccgctgccatgttcgcctcgcgcacccaccatctcctcaacaacgttcaaaccgccaaccacgacatcctcctccacaacccgacctctcacgcatcccaacttggtgcggcgtaaacgcgcagcagcacttcgcctcggtcgaccacggcctgcccccaggcgttgacatccagatccatctcgctccgatctacattcgagaagtttgtctctggcatcgattccccaatccgaatcattgccgacgtcttctttgggtggacggtcgaagtcacgcgcacgcacatcccacacttgttcctccccggcggtgcattcagcaacaccgtcttcttctccgtgtcggagcacctcgggccataggggcagacccgtgaacgacattcttttggcgtgtcacgacctcctgtcgcaagctcgatgctctccccatcgacactattggacaatgctaatggagttacaactccaaggacaggaaggtatagtgcagatggagcaggtggtgatgcttctgtagagcttacacggccgtgcaggcacgcagctgccgcgcttggtgatttgatatttgtgtatgacggtttacgtggaggtgccgatccatagatttagcttgaagagaaaatagcagcagaagaaaaagttggcgctcgacaattttttcgaaatcatcttaaaaggctgaccatcaaataaaaaccaggctaaaaacacaaaatgtaatatatatggcctaattttttccttcaatcaccacatgcctatttttttcttcaatttttcttcataagaataagtcaaggaattccatccttgtgtttgcatggacctagaaaatgcagatttaagaatgatgcgagtgatggaggcctatcaggtcaaggaatttcatcctgatgtttgcaaggacccagaaattgcagatttaagaatgagcgagcgatggaggtctatcagggagtgttcttcgttgctatccattgtgaaacatgtcctacagtatcccttgccaaccagctcctgtatctgttgcctgctcgattcgttgaagcacagagtatggagaaaacacaacatatatcgcatggattatgatttgttagtgcatgtgttacatattgacttatcgttttgagttgtcaataggtccaaggtactaaattgttgatgcacggatttctaattttatcaatttgttttgtgggctgcgatttattttaagtcgctctaagatctcaattattcctcttttttgttattttttatgccttagctgtaatgtttgttttgaatatttattattggaaaatttgatattttataggtgagacattaattaagccattttcataaaagaacactcctgtggtgacaattagacaagaatactaataatcagattaacatacttaaccttgactgcacatatagagactacagtgttgtgttgtgttggttcactgtaccacaaacaatattgaagaggactgatgaagagcgcaaagtttatagcatagtcgaagattttgaattgcaattcaaggagaaagaggattgctaaaggatgaccttcaaaacaaaaaaaagctcattaaagaacatgggcattatgaaagcacaataggatccaaagaggtaggtccctttttgtcacttatttaatattcctgaataacctgtgttcggtctgaaagagcacataattgcactcctatttttaatccttacatgattactgcataactgtttatcagtttgtggtctacaggtatcaggctcgctcgcaccacagatatctttgagttattttttactgcattgcgactaattttaggcctccaatttgacaaacagaattaagtagcttatgtatcccttgtttcttgtttcctcagtatatatacacactttccaatatgacgcaggtagcattgttgtagaattgcggttcacggaaacacaaggctagcgcttttgtgcaacaan

SEQ ID NO: 59996 - DNA, 1967 bp, Zea Mays
  misc_feature (1967)..(1967): n is a, c, g, or t
ctccctctcgaagcgacgcagaaccgctcgccagtgtcgcagtcgcctcctgtccctctcctctctctttgccgctgccctcctctaagcatctccctctcctactccctcctctcaaagcacttgttggccccccaccgccgcatctgcatcccataatcgcctacgccatcgccgccgccttcgggtccttctcgctcagcctcgactgctcgctcatcttcaccgaggcgctcctcacccccgccatcccctccgtgtcggcgtgcgccggcggcatcttgcccagtctcagccgatttatccttcggtctgttagggccttatcaaaccgccgccacggcgaactcgcgccgctgccatgttcgcctcgcgcacccaccatctcctcaacaacgttcaaaccgccaaccacgacatcctcctccacaacccgacctctcacgcatcccaacttggtgcggcgtaaacgcgcagcagcacttcgcctcggtcgaccacggcctgcccccaggcgttgacatccagatccatctcgctccgatctacattcgagaagtttgtctctggcatcgattccccaatccgaatcattgccgacgtcttctttgggtggacggtcgaagtcacgcgcacgcacatcccacacttgttcctccccggcggtgcattcagcaacaccgtcttcttctccgtgtcggagcacctcgggccataggggcagacccgtgaacgacattcttttggcgtgtcacgacctcctgtcgcaagctcgatgctctccccatcgacactattggacaatgctaatggagttacaactccaaggacaggaaggtatagtgcagatggagcaggtggtgatgcttctgtagagcttacacggccgtgcaggcacgcagctgccgcgcttggtgatttgatatttgtgtatgacggtttacgtggaggtgccgatccatagatttagcttgaagagaaaatagcagcagaagaaaaagttggcgctcgacaattttttcgaaatcatcttaaaaggctgaccatcaaataaaaaccaggctaaaaacacaaaatgtaatatatatggcctaattttttccttcaatcaccacatgcctatttttttcttcaatttttcttcataagaataagtcaaggaattccatccttgtgtttgcatggacctagaaaatgcagatttaagaatgatgcgagtgatggaggcctatcaggtcaaggaatttcatcctgatgtttgcaaggacccagaaattgcagatttaagaatgagcgagcgatggaggtctatcagagactacagtgttgtgttgtgttggttcactgtaccacaaacaatattgaagaggactgatgaagagcgcaaagtttatagcatagtcgaagattttgaattgcaattcaaggagaaagaggattgctaaaggtcttcataatacttcttgttttcattttagttggtgggttcttcagtaaagctcacaaaatatttattttttctcaaagctttcttttcaatttaggatgaccttcaaaacaaaaaaaagctcattaaagaacatgggcattatgaaagcacaataggatccaaagaggtaggtccctttttgtcacttatttaatattcctgaataacctgtgttcggtctgaaagagcacataattgcactcctatttttaatccttacatgattactgcataactgtttatcagtttgtggtctacaggtatcaggctcgctcgcaccacagatatctttgagttattttttactgcattgcgactaattttaggcctccaatttgacaaacagaattaagtagcttatgtatcccttgtttcttgtttcctcagtatatatacacactttccaatatgacgcaggtagcattgttgtagaattgcggttcacggaaacacaaggctagcgcttttgtgcaacaan

SEQ ID NO: 59997 - DNA, 2157 bp, Zea Mays
  misc_feature (2157)..(2157): n is a, c, g, or t
ctccctctcgaagcgacgcagaaccgctcgccagtgtcgcagtcgcctcctgtccctctcctctctctttgccgctgccctcctctaagcatctccctctcctactccctcctctcaaagcacttgttggccccccaccgccgcatctgcatcccataatcgcctacgccatcgccgccgccttcgggtccttctcgctcagcctcgactgctcgctcatcttcaccgaggcgctcctcacccccgccatcccctccgtgtcggcgtgcgccggcggcatcttgcccagtctcagccgatttatccttcggtctgttagggccttatcaaaccgccgccacggcgaactcgcgccgctgccatgttcgcctcgcgcacccaccatctcctcaacaacgttcaaaccgccaaccacgacatcctcctccacaacccgacctctcacgcatcccaacttggtgcggcgtaaacgcgcagcagcacttcgcctcggtcgaccacggcctgcccccaggcgttgacatccagatccatctcgctccgatctacattcgagaagtttgtctctggcatcgattccccaatccgaatcattgccgacgtcttctttgggtggacggtcgaagtcacgcgcacgcacatcccacacttgttcctccccggcggtgcattcagcaacaccgtcttcttctccgtgtcggagcacctcgggccataggggcagacccgtgaacgacattcttttggcgtgtcacgacctcctgtcgcaagctcgatgctctccccatcgacactattggacaatgctaatggagttacaactccaaggacaggaaggtatagtgcagatggagcaggtggtgatgcttctgtagagcttacacggccgtgcaggcacgcagctgccgcgcttggtgatttgatatttgtgtatgacggtttacgtggaggtcaaggaattccatccttgtgtttgcatggacctagaaaatgcagatttaagaatgatgcgagtgatggaggcctatcaggtcaaggaatttcatcctgatgtttgcaaggacccagaaattgcagatttaagaatgagcgagcgatggaggtctatcagggagtgttcttcgttgctatccattgtgaaacatgtcctacagtatcccttgccaaccagctcctgtatctgttgcctgctcgattcgttgaagcacagagtatggagaaaacacaacatatatcgcatggattatgatttgttagtgcatgtgttacatattgacttatcgttttgagttgtcaataggtccaaggtactaaattgttgatgcacggatttctaattttatcaatttgttttgtgggctgcgatttattttaagtcgctctaagatctcaattattcctcttttttgttattttttatgccttagctgtaatgtttgttttgaatatttattattggaaaatttgatattttataggtgagacattaattaagccattttcataaaagaacactcctgtggtgacaattagacaagaatactaataatcagattaacatacttaaccttgactgcacatatagagactacagtgttgtgttgtgttggttcactgtaccacaaacaatattgaagaggactgatgaagagcgcaaagtttatagcatagtcgaagattttgaattgcaattcaaggagaaagaggattgctaaagctttcttttcaatttaggatgaccttcaaaacaaaaaaaagctcattaaagaacatgggcattatgaaagcacaataggatccaaagaggtaggtccctttttgtcacttatttaatattcctgaataacctgtgttcggtctgaaagagcacataattgcactcctatttttaatccttacatgattactgcataactgtttatcagtttgtggtctacaggtatcaggctcgctcgcaccacagatatctttgagttattttttactgcattgcgactaattttaggcctccaatttgacaaacagaattaagtagcttatgtatcccttgtttcttgtttcctcagtatatatacacactttccaatatgacgcaggtagcattgttgtagaattgcggttcacggaaacacaaggctagcgcttttgtgcaacaan

SEQ ID NO: 59998 - DNA, 935 bp, Zea Mays
ttcatcggttccgcctcccgcgaaccgtgatgcttcttctcctcacagctgcaaagcatattcgctttccgccaccgcccgatccccacaccgccacccgccgcctctaaccccgctgtcccgtcttgtgctctgacctcaccgctggtcagtgtcagaccgcatggaccccaccgaccagtcgccggaggaggtgtactccgtgtgggcccttccgccggagcccgtccgtgatcgtttccgccgcatcatggagggcctccgcgctgcatacggcggccccgcctttgagccgcacgttaccgtcgtcggtgacttccgcggacgccgctcggaagctgtcaaggtgctccgcgccgccgccgccagcgtccaaccctacactgctcgtgtcacgggggttgcccgtggcagcttcttctaccagtgcgtctacatccttctcgaccccaccgccgagcatacatgccgcatgtcagcctcttatatggagaccttacagatgaggagaaggaggaggcaaggaagaaggcagaggagctggacaaggatatctatgtattagagtttgagatatctgagcttgcgctctatagaacagataccacagataaaaccttggagtcatgggaattggtggaggtgtgccatcttggctcttgagaagaagttattagtttcctctccatggtgattctgctgtaagttaactcttggaatttataatgctttgtagtgtcttgttgactactttctaagaaactggtacgtaccactggcataatactttcaatgggaataaggaatgatgtgttgtgctcttctgattgtagtaaggaataatatacaatctgtgattctctgttagttttccatgaaatatactttgtattattcagattgtgctgagtttgtttaatacctgttgaaacaag

SEQ ID NO: 59999 - DNA, 3737 bp, Zea Mays
caggttcttcattaatcaaccttttaggagcactcactggtaatagctgtctagaaaaatgtttaagcggagccaaagaggccatggacataactcaaagccaataaggccatgggcagaggcagcctatagctgtaacgcaaaaaccttgcgagtccctccgataaaaagccccaatccctccatcccacctgcgtaccactcgtgtgctcgcaaacaagcgtccgagttcgaggcgtggcggcccgttttgcatgttgcgtttgcatgccgtagcagctctgctgccgatgttcctccccttccgaacccctcgccacctcctcgtctcgtgattcgaatcactgccccgctcccattgcgaacgagccagccgccacagctgttgccaggctcaagcggaagggctcgggttcccagacgtgccgggcgatcgatcggagagaggcggcgactcgggatcgggccgggggcgcggcggcaactgcacacacggggcgaagcggcggcgatgccaacctcatcgccctttgtcggcgacagcggcaccgcgggctccccgatccgcgccgagcgagcggtcggtgagcacggccgccgctacgacgtcttcgcgtcggacgcgatggataccgacgccgccgaggcggcctccgcttcggcgggggccttcgcgctcgatggtgtccactcgcctggacgtgcgtcaccggccaacatggaggacgccggcggcgcggccgcagggcacgccgcgcgaccgccgctcgccggctcccgcagcggtttccgccgcctcggtctccgcggcatgaagcagcgcctcctcgtcgtggccaaccgcctgcctgtgtccgccaaccgccgcggcgaggaccactggtcgcttgagatcagcgccggcggcctcgtgagcgccctacttggcgtgaaggacgtcgacgcgaaatggattggctgggcgggtgtcaacgtaccagatgagattggccagcgagccctcaccaaagctcttgcggagaagaggtgcataccggtgttcctggacgaggagattgtgcaccagtactacaatgggtactgcaacaacatcctgtggccgctgttccactatctaggactgccacaggaggacaggctggcaacaacgaggaactttgagtcgcagttcgacgcgtataagcgtgctaaccagatgttcgctgatgtcgtgtaccagcactaccaggagggggatgtaatctggtgtcatgactaccacctcatgttcctgcccaagtgcctcaaggaccatgacatcaatatgaaggtcgggtggttcctgcacacaccattcccgtcatcagagatttaccggacacttccgtcccgcttggagctgcttcggtcggtgctatgtgctgatttagttggattccatacttacgactatgcgaggcattttgtgagtgcttgcactagaatacttggacttgagggcacccctgagggcgtggaagatcaaggaagactaaccagggttgcagcgtttcctattgggatagactctgatcgtttcaagcgagcattggagcttccggcagtaaaaaggcacatcaatgaactgacacaacgttttgccggtcgaaaggtaatgcttggtgttgatcgacttgacatgattaagggaattccacaaaagattctggcctttgaaaagtttcttgaggaaaatccagattggaacgacaaagttgttctactgcagattgctgtgccaacaagaactgacgtccctgagtatcaaaagctcacgagccaagtgcatgaaattgttgggcgcataaatggtcgattcggaacgctgactgctgtccctattcatcatttggaccggtctcttgatttccacgccttatgtgctctttatgcagtcactgatgttgctcttgtaacatcactgagagatgggatgaaccttgtgagctacgagtatgttgcatgccaagggtctaagaaaggagttctgatacttagtgagtttgctggggcagcacaatcccttggagctggcgccattctagtaaacccttggaatattacagaggttgcagactcaatacatcatgctttaacgatgccatccgacgagagagagaaacgacacagacacaactatgctcatgtcacaactcacacggctcaagattgggctgaaacttttgtatttgagctaaatgacacggttgctgaagctctactgaggacaagacaagttcctcctggtcttcctggtcaaacggcaatccagcaatatttgcgctctaaaaatcgtctgctcatattgggtttcaattcaacattgactgagccagtcgaatcctccgggagaaggggtggtgaccaaatcaaggaaatggaactcaagttgcatcctgacttaaagggtcctctgggagccctctgtgaggatgagcgcactacagttattgttcttagtggcagtgacaggagtgttcttgatgaaaattttggagaattcaaaatgtggttggcagcagagcatgggatgtttttacgcccgacttatggagaatggatgacaacaatgcctgagcatctgaacatggattgggtagacagcgtaaagcatgttttcgaatactttacagaaagaaccccaagatcccattttgaacatcgtgaaacatcatttgtgtggaactacaagtatgctgatgttgaatttggaaggctacaagcaagagatatgctgcagcacttgtggacaggcccgatctcaaatgcagctgttgatgttgttcaagggagtcggtcagttgaagtccggtctgttggagttacaaagggtgctgcaattgatcgtattttaggggagatagttcacagcgaaaacatgattactccaattgattatgtcctgtgtatagggcatttccttgggaaggatgaggacatctatgtcttttttgatcccgaatacccttctgaatccaaagtaaaaccagagggtgggtcagcatcacttgaccggaggccaaatggaaggccggcatcgaatggcagaagcaattcaaggaacccgcagtccaggccacagaaggcgcagcaggctgcatccgagaggtcgtcctcatcaagtcacagcagcactagcagcaaccacgactggcgcgaagggtcctcggtcctcgatctcaaggccgagaactacttctcctgcgccgtcggaaggaagcggtccaacgcccgttacctgctgagttcgtcagaggaggtcgtctccttcctcaaagagttggcaacggaaacagctggcttccagtccagctgtgctgattacatgttcttggataggcagtaaatagattggagcctccgtgctttgccagacaagcacactggagaggggaaaaacccattcattcctcaaatgcgcgacggagttacacccagcgtgttgtacaatcctgtacaaaatttatgctcgtgataaaactgcgagagggtggagcaaatggaaaaggataaaattagtttagatttagatagtttcgttgcttctggtacacaatcgacggctttttttatttctcattacaaattttttgagatgcgcttttgaactggttggtattgttcacatctgaaatacgcctgcgccatgagacatctcatattcttttttatctcagtaactaacagcacataacacgacaaaagaatttacctattta

SEQ ID NO: 60000 - DNA, 3729 bp, Zea Mays
gcagcctatagctgtaacgcaaaaaccttgcgagtccctccgataaaaagccccaatccctccatcccacctgcgtaccactcgtgtgctcgcaaacaagcgtccgagttcgaggcgtggcggcccgttttgcatgttgcgtttgcatgccgtagcagctctgctgccgatgttcctccccttccgaacccctcgccacctcctcgtctcgtgattcgaatcactgccccgctcccattgcgaacgagccagccgccacagctgttgccaggctcaagcggaagggctcgggttcccagacgtgccgggcgatcgatcggagagaggcggcgactcgggatcgggtgagtcgctcctccgtcttccgcttccgaaacccgcctccctgcgtgatgggcctgcttgggtgcgcctgttgccgcctcgtcgtcgtcgctcagacgctcaccacgcgcgtccgccgaatgctgcaggccgggggcgcggcggcaactgcacacacggggcgaagcggcggcgatgccaacctcatcgccctttgtcggcgacagcggcaccgcgggctccccgatccgcgccgagcgagcggtcggtgagcacggccgccgctacgacgtcttcgcgtcggacgcgatggataccgacgccgccgaggcggcctccgcttcggcgggggccttcgcgctcgatggtgtccactcgcctggacgtgcgtcaccggccaacatggaggacgccggcggcgcggccgcagggcacgccgcgcgaccgccgctcgccggctcccgcagcggtttccgccgcctcggtctccgcggcatgaagcagcgcctcctcgtcgtggccaaccgcctgcctgtgtccgccaaccgccgcggcgaggaccactggtcgcttgagatcagcgccggcggcctcgtgagcgccctacttggcgtgaaggacgtcgacgcgaaatggattggctgggcgggtgtcaacgtaccagatgagattggccagcgagccctcaccaaagctcttgcggagaagaggtgcataccggtgttcctggacgaggagattgtgcaccagtactacaatgggtactgcaacaacatcctgtggccgctgttccactatctaggactgccacaggaggacaggctggcaacaacgaggaactttgagtcgcagttcgacgcgtataagcgtgctaaccagatgttcgctgatgtcgtgtaccagcactaccaggagggggatgtaatctggtgtcatgactaccacctcatgttcctgcccaagtgcctcaaggaccatgacatcaatatgaaggtcgggtggttcctgcacacaccattcccgtcatcagagatttaccggacacttccgtcccgcttggagctgcttcggtcggtgctatgtgctgatttagttggattccatacttacgactatgcgaggcattttgtgagtgcttgcactagaatacttggacttgagggcacccctgagggcgtggaagatcaaggaagactaaccagggttgcagcgactctgatcgtttcaagcgagcattggagcttccggcagtaaaaaggcacatcaatgaactgacacaacgttttgccggtcgaaaggtaatgcttggtgttgatcgacttgacatgattaagggaattccacaaaagattctggcctttgaaaagtttcttgaggaaaatccagattggaacgacaaagttgttctactgcagattgctgtgccaacaagaactgacgtccctgagtatcaaaagctcacgagccaagtgcatgaaattgttgggcgcataaatggtcgattcggaacgctgactgctgtccctattcatcatttggaccggtctcttgatttccacgccttatgtgctctttatgcagtcactgatgttgctcttgtaacatcactgagagatgggatgaaccttgtgagctacgagtatgttgcatgccaagggtctaagaaaggagttctgatacttagtgagtttgctggggcagcacaatcccttggagctggcgccattctagtaaacccttggaatattacagaggttgcagactcaatacatcatgctttaacgatgccatccgacgagagagagaaacgacacagacacaactatgctcatgtcacaactcacacggctcaagattgggctgaaacttttgtatttgagctaaatgacacggttgctgaagctctactgaggacaagacaagttcctcctggtcttcctggtcaaacggcaatccagcaatatttgcgctctaaaaatcgtctgctcatattgggtttcaattcaacattgactgagccagtcgaatcctccgggagaaggggtggtgaccaaatcaaggaaatggaactcaagttgcatcctgacttaaagggtcctctgggagccctctgtgaggatgagcgcactacagttattgttcttagtggcagtgacaggagtgttcttgatgaaaattttggagaattcaaaatgtggttggcagcagagcatgggatgtttttacgcccgacttatggagaatggatgacaacaatgcctgagcatctgaacatggattgggtagacagcgtaaagcatgttttcgaatactttacagaaagaaccccaagatcccattttgaacatcgtgaaacatcatttgtgtggaactacaagtatgctgatgttgaatttggaaggctacaagcaagagatatgctgcagcacttgtggacaggcccgatctcaaatgcagctgttgatgttgttcaagggagtcggtcagttgaagtccggtctgttggagttacaaagggtgctgcaattgatcgtattttaggggagatagttcacagcgaaaacatgattactccaattgattatgtcctgtgtatagggcatttccttgggaaggatgaggacatctatgtcttttttgatcccgaatacccttctgaatccaaagtaaaaccagagggtgggtcagcatcacttgaccggaggccaaatggaaggccggcatcgaatggcagaagcaattcaaggaacccgcagtccaggccacagaaggcgcagcaggctgcatccgagaggtcgtcctcatcaagtcacagcagcactagcagcaaccacgactggcgcgaagggtcctcggtcctcgatctcaaggccgagaactacttctcctgcgccgtcggaaggaagcggtccaacgcccgttacctgctgagttcgtcagaggaggtcgtctccttcctcaaagagttggcaacggaaacagctggcttccagtccagctgtgctgattacatgttcttggataggcagtaaatagattggagcctccgtgctttgccagacaagcacactggagaggggaaaaacccattcattcctcaaatgcgcgacggagttacacccagcgtgttgtacaatcctgtacaaaatttatgctcgtgataaaactgcgagagggtggagcaaatggaaaaggataaaattagtttagatttagatagtttcgttgcttctggtacacaatcgacggctttttttatttctcattacaaattttttgagatgcgcttttgaactggttggtattgttcacatctgaaatacgcctgcgccatgagacatctcatattcttttttatctcagtaactaacagcacataacacgacaaaagaatttacctattta

SEQ ID NO: 60001 - DNA, 3511 bp, Zea Mays
ctcgtgtgctcgcaaacaagcgtccgagttcgaggcgtggcggcccgttttgcatgttgcgtttgcatgccgtagcagctctgctgccgatgttcctccccttccgaacccctcgccacctcctcgtctcgtgattcgaatcactgccccgctcccattgcgaacgagccagccgccacagctgttgccaggctcaagcggaagggctcgggttcccagacgtgccgggcgatcgatcggagagaggcggcgactcgggatcgggccgggggcgcggcggcaactgcacacacggggcgaagcggcggcgatgccaacctcatcgccctttgtcggcgacagcggcaccgcgggctccccgatccgcgccgagcgagcggtcggtgagcacggccgccgctacgacgtcttcgcgtcggacgcgatggataccgacgccgccgaggcggcctccgcttcggcgggggccttcgcgctcgatggtgtccactcgcctggacgtgcgtcaccggccaacatggaggacgccggcggcgcggccgcagggcacgccgcgcgaccgccgctcgccggctcccgcagcggtttccgccgcctcggtctccgcggcatgaagcagcgcctcctcgtcgtggccaaccgcctgcctgtgtccgccaaccgccgcggcgaggaccactggtcgcttgagatcagcgccggcggcctcgtgagcgccctacttggcgtgaaggacgtcgacgcgaaatggattggctgggcgggtgtcaacgtaccagatgagattggccagcgagccctcaccaaagctcttgcggagaagcactaccaggagggggatgtaatctggtgtcatgactaccacctcatgttcctgcccaagtgcctcaaggaccatgacatcaatatgaaggtcgggtggttcctgcacacaccattcccgtcatcagagatttaccggacacttccgtcccgcttggagctgcttcggtcggtgctatgtgctgatttagttggattccatacttacgactatgcgaggcattttgtgagtgcttgcactagaatacttggacttgagggcacccctgagggcgtggaagatcaaggaagactaaccagggttgcagcgtttcctattgggatagactctgatcgtttcaagcgagcattggagcttccggcagtaaaaaggcacatcaatgaactgacacaacgttttgccggtcgaaaggtaatgcttggtgttgatcgacttgacatgattaagggaattccacaaaagattctggcctttgaaaagtttcttgaggaaaatccagattggaacgacaaagttgttctactgcagattgctgtgccaacaagaactgacgtccctgagtatcaaaagctcacgagccaagtgcatgaaattgttgggcgcataaatggtcgattcggaacgctgactgctgtccctattcatcatttggaccggtctcttgatttccacgccttatgtgctctttatgcagtcactgatgttgctcttgtaacatcactgagagatgggatgaaccttgtgagctacgagtatgttgcatgccaagggtctaagaaaggagttctgatacttagtgaggtagctgactgaatacacgcacacgcatatttttgggggggggggtatgttttatttatttatttttgatattactgcaatttcagtttgctggggcagcacaatcccttggagctggcgccattctagtaaacccttggaatattacagaggttgcagactcaatacatcatgctttaacgatgccatccgacgagagagagaaacgacacagacacaactatgctcatgtcacaactcacacggctcaagattgggctgaaacttttgtatttgagctaaatgacacggttgctgaagctctactgaggacaagacaagttcctcctggtcttcctggtcaaacggcaatccagcaatatttgcgctctaaaaatcgtctgctcatattgggtttcaattcaacattgactgagccagtcgaatcctccgggagaaggggtggtgaccaaatcaaggaaatggaactcaagttgcatcctgacttaaagggtcctctgggagccctctgtgaggatgagcgcactacagttattgttcttagtggcagtgacaggagtgttcttgatgaaaattttggagaattcaaaatgtggttggcagcagagcatgggatgtttttacgcccgacttatggagaatggatgacaacaatgcctgagcatctgaacatggattgggtagacagcgtaaagcatgttttcgaatactttacagaaagaaccccaagatcccattttgaacatcgtgaaacatcatttgtgtggaactacaagtatgctgatgttgaatttggaaggctacaagcaagagatatgctgcagcacttgtggacaggcccgatctcaaatgcagctgttgatgttgttcaagggagtcggtcagttgaagtccggtctgttggagttacaaaggtcagtggtgctgtatgatggtagatggttctctccatgttagcctatttgaggttttacagatcatttgtcttctttctgtagggtgctgcaattgatcgtattttaggggagatagttcacagcgaaaacatgattactccaattgattatgtcctgtgtatagggcatttccttgggaaggatgaggacatctatgtcttttttgatcccgaatacccttctgaatccaaagtaaaaccagagggtgggtcagcatcacttgaccggaggccaaatggaaggccggcatcgaatggcagaagcaattcaaggaacccgcagtccaggccacagaaggcgcagcaggctgcatccgagaggtcgtcctcatcaagtcacagcagcactagcagcaaccacgactggcgcgaagggtcctcggtcctcgatctcaaggccgagaactacttctcctgcgccgtcggaaggaagcggtccaacgcccgttacctgctgagttcgtcagaggaggtcgtctccttcctcaaagagttggcaacggaaacagctggcttccagtccagctgtgctgattacatgttcttggataggcagtaaatagattggagcctccgtgctttgccagacaagcacactggagaggggaaaaacccattcattcctcaaatgcgcgacggagttacacccagcgtgttgtacaatcctgtacaaaatttatgctcgtgataaaactgcgagagggtggagcaaatggaaaaggataaaattagtttagatttagatagtttcgttgcttctggtacacaatcgacggctttttttatttctcattacaaattttttgagatgcgcttttgaactggttggtattgttcacatctgaaatacgcctgcgccatgagacatctcatattcttttttatctcagtaactaacagcacataacacgacaaaagaatttacctattta

SEQ ID NO: 60002 - DNA, 3785 bp, Zea Mays
ctcgtgtgctcgcaaacaagcgtccgagttcgaggcgtggcggcccgttttgcatgttgcgtttgcatgccgtagcagctctgctgccgatgttcctccccttccgaacccctcgccacctcctcgtctcgtgattcgaatcactgccccgctcccattgcgaacgagccagccgccacagctgttgccaggctcaagcggaagggctcgggttcccagacgtgccgggcgatcgatcggagagaggcggcgactcgggatcgggccgggggcgcggcggcaactgcacacacggggcgaagcggcggcgatgccaacctcatcgccctttgtcggcgacagcggcaccgcgggctccccgatccgcgccgagcgagcggtcggtgagcacggccgccgctacgacgtcttcgcgtcggacgcgatggataccgacgccgccgaggcggcctccgcttcggcgggggccttcgcgctcgatggtgtccactcgcctggacgtgcgtcaccggccaacatggaggacgccggcggcgcggccgcagggcacgccgcgcgaccgccgctcgccggctcccgcagcggtttccgccgcctcggtctccgcggcatgaagcagcgcctcctcgtcgtggccaaccgcctgcctgtgtccgccaaccgccgcggcgaggaccactggtcgcttgagatcagcgccggcggcctcgtgagcgccctacttggcgtgaaggacgtcgacgcgaaatggattggctgggcgggtgtcaacgtaccagatgagattggccagcgagccctcaccaaagctcttgcggagaagaggtgcataccggtgttcctggacgaggagattgtgcaccagtactacaatgggtactgcaacaacatcctgtggccgctgttccactatctaggactgccacaggaggacaggctggcaacaacgaggaactttgagtcgcagttcgacgcgtataagcgtgctaaccagatgttcgctgatgtcgtgtaccagcactaccaggagggggatgtaatctggtgtcatgactaccacctcatgttcctgcccaagtgcctcaaggaccatgacatcaatatgaaggtcgggtggttcctgcacacaccattcccgtcatcagagatttaccggacacttccgtcccgcttggagctgcttcggtcggtgctatgtgctgatttagttggattccatacttacgactatgcgaggcattttgtgagtgcttgcactagaatacttggacttgagggcacccctgagggcgtggaagatcaaggaagactaaccagggttgcagcgtttcctattgggatagactctgatcgtttcaagcgagcattggagcttccggcagtaaaaaggcacatcaatgaactgacacaacgttttgccggtcgaaaggtaatgcttggtgttgatcgacttgacatgattaagggaattccacaaaagattctggcctttgaaaagtttcttgaggaaaatccagattggaacgacaaagttgttctactgcagattgctgtgccaacaagaactgacgtccctgagtatcaaaagctcacgagccaagtgcatgaaattgttgggcgcataaatggtcgattcggaacgctgactgctgtccctattcatcatttggtagctttcacacttcccatcgctgcctccatatctgtcttaggccctaatttttcttaagtgttatcctacatctgctgctgcgaaggcactacccgtttgtaaggttctattttgtagaactgatactatctgatttgcttttctaagtattacgaataagtataagtatcaatttttaacaccttgcataaaaagagctttgatgcattttctttacaataatttgaaacggtgtgttccttgcaggaccggtctcttgatttccacgccttatgtgctctttatgcagtcactgatgttgctcttgtaacatcactgagagatgggatgaaccttgtgagctacgagtatgttgcatgccaagggtctaagaaaggagttctgatacttagtgagtttgctggggcagcacaatcccttggagctggcgccattctagtaaacccttggaatattacagaggttgcagactcaatacatcatgctttaacgatgccatccgacgagagagagaaacgacacagacacaactatgctcatgtcacaactcacacggctcaagattgggctgaaacttttgtatttgagctaaatgacacggttgctgaagctctactgaggacaagacaagttcctcctggtcttcctggtcaaacggcaatccagcaatatttgcgctctaaaaatcgtctgctcatattgggtttcaattcaacattgactgagccagtcgaatcctccgggagaaggggtggtgaccaaatcaaggaaatggaactcaagttgcatcctgacttaaagggtcctctgggagccctctgtgaggatgagcgcactacagttattgttcttagtggcagtgacaggagtgttcttgatgaaaattttggagaattcaaaatgtggttggcagcagagcatgggatgtttttacgcccgacttatggagaatggatgacaacaatgcctgagcatctgaacatggattgggtagacagcgtaaagcatgttttcgaatactttacagaaagaaccccaagatcccattttgaacatcgtgaaacatcatttgtgtggaactacaagtatgctgatgttgaatttggaaggctacaagcaagagatatgctgcagcacttgtggacaggcccgatctcaaatgcagctgttgatgttgttcaagggagtcggtcagttgaagtccggtctgttggagttacaaagggtgctgcaattgatcgtattttaggggagatagttcacagcgaaaacatgattactccaattgattatgtcctgtgtatagggcatttccttgggaaggatgaggacatctatgtcttttttgatcccgaatacccttctgaatccaaagtaaaaccagagggtgggtcagcatcacttgaccggaggccaaatggaaggccggcatcgaatggcagaagcaattcaaggaacccgcagtccaggccacagaaggcgcagcaggctgcatccgagaggtcgtcctcatcaagtcacagcagcactagcagcaaccacgactggcgcgaagggtcctcggtcctcgatctcaaggccgagaactacttctcctgcgccgtcggaaggaagcggtccaacgcccgttacctgctgagttcgtcagaggaggtcgtctccttcctcaaagagttggcaacggaaacagctggcttccagtccagctgtgctgattacatgttcttggataggcagtaaatagattggagcctccgtgctttgccagacaagcacactggagaggggaaaaacccattcattcctcaaatgcgcgacggagttacacccagcgtgttgtacaatcctgtacaaaatttatgctcgtgataaaactgcgagagggtggagcaaatggaaaaggataaaattagtttagatttagatagtttcgttgcttctggtacacaatcgacggctttttttatttctcattacaaattttttgagatgcgcttttgaactggttggtattgttcacatctgaaatacgcctgcgccatgagacatctcatattcttttttatctcagtaactaacagcacataacacgacaaaagaatttacctattta

SEQ ID NO: 60003 - DNA, 1910 bp, Zea Mays
atgtcgctgtcgaagccggtctcggcacgccgcctcgtgccggcgctcttcccgctcgcgcacgcggacgccgcctcggccacggcttcccgccgcgagcgccgtaaggacacgttcgtcgcgacgcccccgatccccgcgccttccccgcgggcagtgcgcctcgcggagccgctccccacgctggcgccgtcacgcctcgcgttccacaaccggatcctcgcgctcctctcggggccccaggccgacctccccgaggcggcgctcctcacccgccacgcgctccactccaactgccgcccctcatccttcacctgcgccgccgtcctcgccgcgctcctccgcacgcgccgcctcgaagacttcttcgcgctgcaccgcttcgcgctccaagccgccgtcccgcccaccgccgccacgcacgtgctctacctatccgcgctcgccgcgcgccgcctcgccgacgacgcgctccaccacctccgcatcatcgcccgccccggctcccccgtgccgccctccccgacggcctaccgcgtcgtcgtcgagtgcctcgttgcagaccacggccggctcgcggatgccgtcaagctcaaggatgagatgctcacctctggattcgtcgggccggatcccaaggtctacagccttctcatggctgggttcgtgggtgctggggatggagccaaagccttggagctgtaccaagaactcaaggacaaggttgggggcgaaccaattctggatggcattgtgtacgggactctcatgaaggcgtacttccttatgggaacgggggaaaaggttatggagtgttacaaagaggtgctgtgtgttgaatctgcggtgaggtttggggccgagagctacaatgaggtggttgatgcgcttgggcagaatgggaggttggaggatgcacttaagctgttcgacagaatgcttgaggaacatgacccgccactgcggattgcagttgatctgagaagcttcagggtgatggttgatacctattgtgctgctgggagatttgaagatgcagttgcagtgttcagaagaatgggggaatggaagctggtgcctgatgtggcatcctataataatttgattcggcacctgcagattaaccagctgatagataaggcggaggtgctctacaatgagatgtgtgagagtggtgttggtgcggataaggagacatatttactgctcacggaagcatgcttcagtgttgatcgcatcgatgatgtatggtcgacaaggctcaggaatacttcaatcagatgaaggagaagggagttaacccaagcatctcaagctacgagacattgctgaaggcatatattgctgctgaccggttggatgatgcagtcaatgttgcaaaaggtattcttttgaatgagaaggttctgttcagctatggaatgagggagcttttagaaggagcattacgtggagatgggaggggaaatgacatcgccaagttatatgaggatgtggagagggaaaaggctgaagcggaagcccgggctgcagaagagaaggcgagggcagaggctcttgccagagaagagagggagaggaggagagcagagattgctgctaaggatgaagccgcagctaaagccagtgccgctgccattgaagctatcctagcccataaaaggaagacagagaatgaaggaggagcgcctgctcctgatgcaaacaccctggatggtggctttctcagtaagctaggccttaaaacagccggagaaggggcacttcaagacaatccaacagaaagtggagacgatggagaaggggcacttcatggcaatccaacagaaagtggagacgatggagagggggcacttcaaggcaatccaacggaaagaaatggaggcaatgtgcagcagggatatctgtga

SEQ ID NO: 60004 - DNA, 1455 bp, Zea Mays
tcggcaaatatacactgcgcccgtccgcctccgcaatcgacaacgaaccactgggcaccggccgcggctcgcaagtggcctgcgttcctcttccacgctccgcccacccgtcccggggcccgccgcaacccgatccctccccgcgcccaacgatgccggccggccagccgcacgcgcacgaagccgctgccgccgcctgcgtcggcagcggcgcgaaccactccaaccaccgagtgccggcgcactcgccaccgccgctccccgcggaggtggtgccggcgtaccccgcccccggagtcggaggacgacgagacctgggtgtggacgcagatcaagggcgggaggcccgccgcgacgcggacgcgggagccggcgctcgcctccttcctctacgccaccgtgttgtcccacccgtccctgccccgctccctctccttccacctcgccaacaagctctgctcctccacgctcctctccacgctcctctacgacctcttcctcgccacgctcaccgcgcacccctctctccgcgccgccgtcgtcgccgacctcctcgcggcccactcccgcgaccccgcctgcgtcggcttctcccactgcctcctcaactacaagggcttcctcgccatccaggcccaccgcgtcgcgcacgtgctctgggcgcagcagcgacggcccctcgcgctcgcgctccagtcccgcgtcgccgacgtcttcgccgttgacatccaccccgccgccgtcgtcgggaagggaatcctcctcgaccacgccaccggcgtcgtcatcggtgagacggccgtcgtcggcgacaacgtctccatcctccaccacgtcaccttgggcgggaccgggaaggcggtgggtgaccggcaccccaagattggggatggcgtgctgattggagcaggggccaccattcttggtaacgtgaaaattggtgccggggctaagattggagccggatccgtggtgctgatagatgtgccggcgaggagcacggcggttgggaaccctgccaggctgattggtgggaagaaggccgagggtgcgaatgaggaggacatgccaggggagtccatggatcacacgtccttcatacgtcaatggtcggactacaccatttgagagcggttatccaagattcaccatcgtttgtctgcccagagggagtacttaactaccaaattggtcagttcacatttttgttaaacctttttcttggtgtgtttcttttaactttagttatttgctttgacaattaatgtccaagtatcagacaatgcggaaggcactggttgaaatcacatgacatcacatgtgaccttttcaatttcaaaactatggatttctatatctgaaaagtaactctcatatctgtttttttccaatctcaaaacatgtgaccttggtatctgtgattaagcacaattatatttatatgcaatagggtac

SEQ ID NO: 60005 - DNA, 4210 bp, Zea Mays
  misc_feature (1)..(2): n is a, c, g, or t
nngatccccgcggggaaattttttcgtcgcggggacacgtatggggagctattccccggcggggaattccccgttgccatccctacttgtgtcctctaaccatgtcctgatgatggttttcttgctgttgtggtttggttcagtgattttttcagggtcagctgattgtcagtccttgcctcagatgtagaatcatgcatggctgttgcccgcttcgaggatgcacatgactgagttttgttagctttcagtgctactatttattttgtttgtggaactaaacattagctcatttgtaacttgattttaggaatgcaataaaccaccatgtctggcttactgagtctacgattgccataggtgatgatgaaggttgcattaaggtatgaagttgttggagcccattttgagcagggcggacagtccggccctgaggccggacggtccgcggtccggatggtccgcgcctgggggccggacggtccgcgcgtgcgcagagcagtttagggttccgagttttgtgctacggttgttagctagattcgcgggattcactcggaaatttgtttgtaacgggtccagccctcctcctctataaatagagaggtctacggccgatttggaacaacgaatcgaaccttcaatcaatacaatttacattctatcctaggagtagttctagtctagtttaggtttagctatccaatccccaaattcttcgtctctcttcggctctacgtcgattagaggagtctaggtcggccggcccgagcctagacaccacctaggatctctcctccccgacggggtccctcccgggagcgagatccaggcgccgccggcgactcccgccgcctttgcgtacgcgcggaccgtccggcccccagggcgcggaccgtccggccgtcaggcagagaagccctagccgggcaccaggccgcggaccgtccggccccaggccgcggacagtcctcccctgcgcagagagtaccaccgcgcctcgcaccaggccgtggaccgtccggccccgtgcgcggaccgtccgcccctgtgcagagggcaccgccacggttcttgttgagtgtttgacgctccaaaaaggcgtcaacataccttttggcaactccgctggggacagcaaatatagacgcatcaaatcggccctcaatggccggttcaagagatagctctgatatttccccaagcaacatcataaagccgacttgggagaccttgccggctgacgaacagctccattcgaggagcacaaggagcgtatgatccaggaggaaaaagcaaaattcttggccaacttcaaagtggacaggaacaacaaggtcgtccgacatcgggcaacggatccggcttcgctccaactcacgccagatatccccaatgtaagtaataccaacgagctacaatctcttagaaattatgtagaagagcaacgtgaacaaatgcagaacatcataagcggtatgcaaagcgatcttaagagactagtacgtgcatttgataaatctagtattgcaaattttccttcacacgaggttgagttaggaggtaacacgcgtaacacatcggctacaggttgtcacgaccagtcacaacccctttatgggatgccgatggacacataccctgagcaaccgcaaatcggcagcaaatcagccgatctgcacatgcccggaccgtccgcacgtgagtacggatcgtccggaccaacaacagtcgggcctatttttaatgagttacctagatatgcgcccgaaccaccacacacaacacagaatctaaactacccagtcggacggtccgcgtacaacgacggacggtccgcacataatcacggacggtccgggccaatgtccggacagtccgcacatgacctttttgaggaggattgttacctgaatcctcacccgtcccagcagcacttcccatcgcactatacaatgcatcaacccattaattcgagatctagagcccagtaaaactttccggccccaccgagaaggccggaaaggaacgatcaaacatatgaaccatatagggcaagtggcaatgcaccacgtagttcaaaccaatgggggaaaagacaatatgctaatatccagccaaccccacctatgtttgatcagagagctggtggtctcgcaccggctgccattgatataataagggaagaaatagccaaggcgttccaagataagctcggagtaagcatggtccctggggggcaatcatatcgaaaaccttatgacagccgatttgatcaccacccatacccacagggaaccaggatacccgaattcgcaaaattttcgggtgatcaaggaaagaacacacgtgaaaatatagtccaatttttagcacacaattaggagagttggccgacacagaggcatttcgcatacatttattttcattatctttaacaggaactgcgtttgcatggtacgccactttacctcctaattctatttcatcatggggggatctagaacaaaaatttcatgatcattttttctctggtgactatgagttggatttggagatttagtgtcattacgacaagcaaaagatgaatcggttaatgattacatccggagattccgagatacaagaaaccgatgcttccaaattcatttagcagagaaacaactagcaggattagcctttaatggtctatgatattatttaaaagaaagattagaaggcatccaattttttacactagcacagttacaccaaagaacttcggcttgtgaaagccgaagcaaagaaactgctaaagcaattcatcataacgtacatatagtagagtgcgatcaaagtagctcagaggacgagtcaacaaaagtatatgctgctgaaatggtttggccaaagcaggccaaatcttcggcttgtgcttccctacagccaattcaaaagaaacggcaggaggatgtaaagtttatgtttaatgttggcaagtgtgataaaatatttgatgaattactcaaaaatggcaacattaaaataaatcacactgttccatctgccaacgagctaaaacgtcatgcatactgcaagtggcataactcattttctcaagccactaatgattgtaatgtatttcggcgacagattcaatcggtcattaacgagggacgattgaaatttcaggaaatgcaggtggatacagagccttttccgatgaacatgattgacttcgagggcaagaaagtcctagttcggccaaacacagccgataaagacaaaggcaaagagacaatcatcggcaatgctaaagaggccgatggggatcgtaaagcttcttgcaggaaagtggtagccgagaagactcccgatggaggggagaccctaaaggtgaccatcacagcctccagtactggggggcaagcgcagacagggagacagatgcaggaacccgtgctgcgtatcccggacggtccggcacgtaggcgcggatggtccgggaccccaccggatggtccggagagctccggcggacggtccggccgtactcaggactcgcaacggccacgtactttcaaaccacgacgaccagagataggtacgtggaaaacaaatacattaaaggcagctggtcggttggttaaagccggcccaacttttgatcaattattgtctaaatacgtaaaaaagaaggccggccccagtgaccggccagcaaagcgaccccgctcacccattcatgagcagcgtcaggtaaggccgattggaccacctcaccaatcagaagaaatgagaggtcatactgtacaactgagacctaacatacctgcatggacacctccaccttatccgcctatgtcatatccatatccatatttacctccaccatatgtcccaaatcaaatgtggggcatgccaccatatccatttgggatgccacagtaccccgcctggggggcaccccaaacatccgtttttgataggttggtgccgccaatgcaagaccgattgagcactgctgaatccggtcatcaggcacaggcccaacaagattgccggactactcggcctcctaggccgaccaatccggtaggggggcatatgccctgtagcaactcaagaacaacaaaaaaggacatcatcaaaataagcaccgcagatgttgtcatacagggagacaataaagggccgatgattttcggcgaatcggccaacacaaccgaaa

SEQ ID NO: 60006 - DNA, 2882 bp, Zea Mays
  misc_feature (1)..(2): n is a, c, g, or t
nngatccccgcggggaaattttttcgtcgcggggacacgtatggggagctattccccggcggggaattccccgttgccatccctacttgtgtcctctaaccatgtcctgatgatggttttcttgctgttgtggtttggttcagtgattttttcagggtcagctgattgtcagtccttgcctcagatgtagaatcatgcatggctgttgcccgcttcgaggatgcacatgactgagttttgttagctttcagtgctactatttattttgtttgtggaactaaacattagctcatttgtaacttgattttaggaatgcaataaaccaccatgtctggcttactgagtctacgattgccataggtgatgatgaaggttgcattaaggtatgggatacccggtaacaatcttgctgcaacagttttgaagtccacgatgattacatttcagatatgacctatgtggctgactcaaatcagatactggccacaaaggtttaactagattccgtgcagttgagatgtatcaaacacaatcgaaacactatctgcatggcagcaactaaagatgatcaccaattatcttatttattcccttttttttttgtcatggatcaggcataagtactcctgttttcagttccacatttaactgctacttcatgcagattggatattaagtaatttgatgatgtgattttgtaataccatcgaacagaagatattctgtgagatctaaagatggatttatttgcaaaacatttgcatgtcaaatttatcgacatgcattctgtgcatgatacacagcatggtaactaaagattaaacttctttgctttccttgtagcggggatgaaactttgtctatgaacaccctgcggaggaataaagtaaggtcacaatctgaattttcagaagatgagttggtatcctcggtgctaatgaaggtacacgatggagggagcgggaagagatgccaaccctttgagcggttacagaattggcaaaaccctgggaattgggtcgttcggtaaagtgaagatcgcggaacatatattgactggtcataaggtggcgatcaagattctcaatcgcaagaagatcagaagcatggatatggaagagaaagttaagagagaaatcaagatactgagattatttatgcatcctcatatcatacgcctttatgaggtgatagatacacctgctgatatctgtgttgttatggagtatgttaaatctggagagttgtttgattacatcgttgagaagggaaggctacacgaagaggaagcccgacacttttttcagcagatcatatctggtgttgaatattgccataggaacatggttgctcaccgtgatttaaagccagagaatcttcttttggattcaaaatgcaatgttaagattgccgattttggcttaagtaatattatgcgtgatggtcactttcttaagacgagttgtggtagcccgaattatgcagcacctgaggtcatatctggtaaactatatgctggtcctgaagttgacgtctggagctgtggagttattctttatgctcttctttgtggcactctcccatttgacgatgagaatattccaaaccttttcaagaaaataaagggtggaatatatacccttcctagtcatttgtcaccttcagcgagggacttgattcccagaatgctggttgttgatccaatgaaaaggattacaatacgtgaaatccgtgaacatgtgtggttcaagatccgacttccgcgctatttggctgtgccgcctccagacactgctcaacaagttaaaaaggtcgacgaggaaactcttaatgatgttattaagatgggttttgacaagaatcagctaattgaatctctgcaaaacagattgcagaatgaggcaacagttgcctattatttactcttggacaataggcttcgtacaaccagtggttatcttggatctgagtttcaagaatctatggactcatctttgtctcaagtaatcgctgaaacaccaacttcagcaactgaacttcgtcagcatgggttttcagaatctccaggttctggcttgaggcagcattttgcagctgaaaggaaatgggcccttggtcttcagtctcgagcacatccacgagaaataataagtgaagtgcttaaagctctgcaagaactgaatgtttactggaaaaagattggacactacaacatgaaatgcagatggagtcctggctgccttgagagtatgatgcataacagtgatagcttcagtgcggagtctgctataattgaaactgatgttttcatggagaaatcaaccccgacagtgaagtttgagattcagctttacaaaacgagggatgagaagtaccttcttgacctgcaaagggtcagtggatcacatcttctctttctggacttgtgttccgcctttctaactcagctgagagttctttgagcctgacatgattggcttcccaagcactccttgatgcacccagtggagtttcaagttacatttgagatgtacataatgaccatatataatcctccagtagattatattttctggagcatgtaatgtagacgttagaggcttgtcctggtttgccaagatggttgttacctaaggtcctaacaagaggccgcaggcgagcccagtccaattagatgatgtgaaaaatttttggcctttttttagtctttggacatgttatcaaattaaggaggtcgtgctagcacgatacccaaactaagaaataccccattgaaaactgaaaacaaagcttgctcgttcatactagtgtcaactctggcactaaagactggtgcttattttactccatagacagtaattagatgtcacattcacgtcacg

SEQ ID NO: 60007 - DNA, 2825 bp, Zea Mays
  misc_feature (1)..(2): n is a, c, g, or t
nngatccccgcggggaaattttttcgtcgcggggacacgtatggggagctattccccggcggggaattccccgttgccatccctacttgtgtcctctaaccatgtcctgatgatggttttcttgctgttgtggtttggttcagtgattttttcagggtcagctgattgtcagtccttgcctcagatgtagaatcatgcatggctgttgcccgcttcgaggatgcacatgactgagttttgttagctttcagtgctactatttattttgtttgtggaactaaacattagctcatttgtaacttgattttaggaatgcaataaaccaccatgtctggcttactgagtctacgattgccataggtgatgatgaaggttgcattaaggtatgggatacccggtaacaatcttgctgcaacagttttgaagtccacgatgattacatttcagatatgacctatgtggctgactcaaatcagatactggccacaaaggtttaactagattccgtgcagttgagatgtatcaaacacaatcgaaacactatctgcatggcagcaactaaagatgatcaccaattatcttatttattcccttttttttttgtcatggatcaggcataagtactcctgttttcagttccacatttaactgctacttcatgcagattggatattaagtaatttgatgatgtgattttgtaataccatcgaacagaagatattctgtgagatctaaagatggatttatttgcaaaacatttgcatgtcaaatttatcgacatgcattctgtgcatgatacacagcatggtaactaaagattaaacttctttgctttccttgtagcggggatgaaactttgtctatgaacaccctgcggaggaataaagtacacgatggagggagcgggaagagatgccaaccctttgagcggttacagaattggcaaaaccctgggaattgggtcgttcggtaaagtgaagatcgcggaacatatattgactggtcataaggtggcgatcaagattctcaatcgcaagaagatcagaagcatggatatggaagagaaagttaagagagaaatcaagatactgagattatttatgcatcctcatatcatacgcctttatgaggtgatagatacacctgctgatatctgtgttgttatggagtatgttaaatctggagagttgtttgattacatcgttgagaagggaaggctacacgaagaggaagcccgacacttttttcagcagatcatatctggtgttgaatattgccataggaacatggttgctcaccgtgatttaaagccagagaatcttcttttggattcaaaatgcaatgttaagattgccgattttggcttaagtaatattatgcgtgatggtcactttcttaagacgagttgtggtagcccgaattatgcagcacctgaggtcatatctggtaaactatatgctggtcctgaagttgacgtctggagctgtggagttattctttatgctcttctttgtggcactctcccatttgacgatgagaatattccaaaccttttcaagaaaataaagggtggaatatatacccttcctagtcatttgtcaccttcagcgagggacttgattcccagaatgctggttgttgatccaatgaaaaggattacaatacgtgaaatccgtgaacatgtgtggttcaagatccgacttccgcgctatttggctgtgccgcctccagacactgctcaacaagttaaaaaggtcgacgaggaaactcttaatgatgttattaagatgggttttgacaagaatcagctaattgaatctctgcaaaacagattgcagaatgaggcaacagttgcctattatttactcttggacaataggcttcgtacaaccagtggttatcttggatctgagtttcaagaatctatggactcatctttgtctcaagtaatcgctgaaacaccaacttcagcaactgaacttcgtcagcatgggttttcagaatctccaggttctggcttgaggcagcattttgcagctgaaaggaaatgggcccttggtcttcagtctcgagcacatccacgagaaataataagtgaagtgcttaaagctctgcaagaactgaatgtttactggaaaaagattggacactacaacatgaaatgcagatggagtcctggctgccttgagagtatgatgcataacagtgatagcttcagtgcggagtctgctataattgaaactgatgttttcatggagaaatcaaccccgacagtgaagtttgagattcagctttacaaaacgagggatgagaagtaccttcttgacctgcaaagggtcagtggatcacatcttctctttctggacttgtgttccgcctttctaactcagctgagagttctttgagcctgacatgattggcttcccaagcactccttgatgcacccagtggagtttcaagttacatttgagatgtacataatgaccatatataatcctccagtagattatattttctggagcatgtaatgtagacgttagaggcttgtcctggtttgccaagatggttgttacctaaggtcctaacaagaggccgcaggcgagcccagtccaattagatgatgtgaaaaatttttggcctttttttagtctttggacatgttatcaaattaaggaggtcgtgctagcacgatacccaaactaagaaataccccattgaaaactgaaaacaaagcttgctcgttcatactagtgtcaactctggcactaaagactggtgcttattttactccatagacagtaattagatgtcacattcacgtcacg

SEQ ID NO: 60008 - DNA, 2289 bp, Zea Mays
aggtatgggatacccggtaacaatcttgctgcaacagttttgaagtccacgatgattacatttcagatatgacctatgtggctgactcaaatcagatactggccacaagcggggatgaaactttgtctatgaacaccctgcggaggaataaagtaaggtcacaatctgaattttcagaagatgagttggtatcctcggtgctaatgaagaacggtaaaaaggttgtttgtggaactccaagtggagccctcttattatattcatggggatactttaatggttgctggtaaccttgttttcatcacacaacagtacctgctgaaataaaatatcaccaagataaaccttcggtacacgatggagggagcgggaagagatgccaaccctttgagcggttacagaattggcaaaaccctgggaattgggtcgttcggtaaagtgaagatcgcggaacatatattgactggtcataaggtggcgatcaagattctcaatcgcaagaagatcagaagcatggatatggaagagaaagttaagagagaaatcaagatactgagattatttatgcatcctcatatcatacgcctttatgaggtgatagatacacctgctgatatctgtgttgttatggagtatgttaaatctggagagttgtttgattacatcgttgagaagggaaggctacacgaagaggaagcccgacacttttttcagcagatcatatctggtgttgaatattgccataggaacatggttgctcaccgtgatttaaagccagagaatcttcttttggattcaaaatgcaatgttaagattgccgattttggcttaagtaatattatgcgtgatggtcactttcttaagacgagttgtggtagcccgaattatgcagcacctgaggtcatatctggtaaactatatgctggtcctgaagttgacgtctggagctgtggagttattctttatgctcttctttgtggcactctcccatttgacgatgagaatattccaaaccttttcaagaaaataaagggtggaatatatacccttcctagtcatttgtcaccttcagcgagggacttgattcccagaatgctggttgttgatccaatgaaaaggattacaatacgtgaaatccgtgaacatgtgtggttcaagatccgacttccgcgctatttggctgtgccgcctccagacactgctcaacaagttaaaaaggtcgacgaggaaactcttaatgatgttattaagatgggttttgacaagaatcagctaattgaatctctgcaaaacagattgcagaatgaggcaacagttgcctattatttactcttggacaataggcttcgtacaaccagtggttatcttggatctgagtttcaagaatctatggactcatctttgtctcaagtaatcgctgaaacaccaacttcagcaactgaacttcgtcagcatgggttttcagaatctccaggttctggcttgaggcagcattttgcagctgaaaggaaatgggcccttggtcttcagtctcgagcacatccacgagaaataataagtgaagtgcttaaagctctgcaagaactgaatgtttactggaaaaagattggacactacaacatgaaatgcagatggagtcctggctgccttgagagtatgatgcataacagtgatagcttcagtgcggagtctgctataattgaaactgatgttttcatggagaaatcaaccccgacagtgaagtttgagattcagctttacaaaacgagggatgagaagtaccttcttgacctgcaaagggtcagtggatcacatcttctctttctggacttgtgttccgcctttctaactcagctgagagttctttgagcctgacatgattggcttcccaagcactccttgatgcacccagtggagtttcaagttacatttgagatgtacataatgaccatatataatcctccagtagattatattttctggagcatgtaatgtagacgttagaggcttgtcctggtttgccaagatggttgttacctaaggtcctaacaagaggccgcaggcgagcccagtccaattagatgatgtgaaaaatttttggcctttttttagtctttggacatgttatcaaattaaggaggtcgtgctagcacgatacccaaactaagaaataccccattgaaaactgaaaacaaagcttgctcgttcatactagtgtcaactctggcactaaagactggtgcttattttactccatagacagtaattagatgtcacattcacgtcacg

SEQ ID NO: 60009 - DNA, 2134 bp, Zea Mays
cggtaacaatcttgctgcaacagttttgaagtccacgatgattacatttcagatatgacctatgtggctgactcaaatcagatactggccacaagcggggatgaaactttgtctatgaacaccctgcggaggaataaagtaaggtcacaatctgaattttcagaagatgagttggtatcctcggtgctaatgaaggtacacgatggagggagcgggaagagatgccaaccctttgagcggttacagaattggcaaaaccctgggaattgggtcgttcggtaaagtgaagatcgcggaacatatattgactggtcataaggtggcgatcaagattctcaatcgcaagaagatcagaagcatggatatggaagagaaagttaagagagaaatcaagatactgagattatttatgcatcctcatatcatacgcctttatgaggtgatagatacacctgctgatatctgtgttgttatggagtatgttaaatctggagagttgtttgattacatcgttgagaagggaaggctacacgaagaggaagcccgacacttttttcagcagatcatatctggtgttgaatattgccataggaacatggttgctcaccgtgatttaaagccagagaatcttcttttggattcaaaatgcaatgttaagattgccgattttggcttaagtaatattatgcgtgatggtcactttcttaagacgagttgtggtagcccgaattatgcagcacctgaggtcatatctggtaaactatatgctggtcctgaagttgacgtctggagctgtggagttattctttatgctcttctttgtggcactctcccatttgacgatgagaatattccaaaccttttcaagaaaataaagggtggaatatatacccttcctagtcatttgtcaccttcagcgagggacttgattcccagaatgctggttgttgatccaatgaaaaggattacaatacgtgaaatccgtgaacatgtgtggttcaagatccgacttccgcgctatttggctgtgccgcctccagacactgctcaacaagttaaaaaggtcgacgaggaaactcttaatgatgttattaagatgggttttgacaagaatcagctaattgaatctctgcaaaacagattgcagaatgaggcaacagttgcctattatttactcttggacaataggcttcgtacaaccagtggttatcttggatctgagtttcaagaatctatggactcatctttgtctcaagtaatcgctgaaacaccaacttcagcaactgaacttcgtcagcatgggttttcagaatctccaggttctggcttgaggcagcattttgcagctgaaaggaaatgggcccttggtcttcagtctcgagcacatccacgagaaataataagtgaagtgcttaaagctctgcaagaactgaatgtttactggaaaaagattggacactacaacatgaaatgcagatggagtcctggctgccttgagagtatgatgcataacagtgatagcttcagtgcggagtctgctataattgaaactgatgttttcatggagaaatcaaccccgacagtgaagtttgagattcagctttacaaaacgagggatgagaagtaccttcttgacctgcaaagggtcagtggatcacatcttctctttctggacttgtgttccgcctttctaactcagctgagagttctttgagcctgacatgattggcttcccaagcactccttgatgcacccagtggagtttcaagttacatttgagatgtacataatgaccatatataatcctccagtagattatattttctggagcatgtaatgtagacgttagaggcttgtcctggtttgccaagatggttgttacctaaggtcctaacaagaggccgcaggcgagcccagtccaattagatgatgtgaaaaatttttggcctttttttagtctttggacatgttatcaaattaaggaggtcgtgctagcacgatacccaaactaagaaataccccattgaaaactgaaaacaaagcttgctcgttcatactagtgtcaactctggcactaaagactggtgcttattttactccatagacagtaattagatgtcacattcacgtcacg

SEQ ID NO: 60010 - DNA, 2008 bp, Zea Mays
cgtcccgtcccgtccgtccaggagcggcggacacgataacacggcgccctcgaggcgcccgctgtcgcggtacacgatggagggagcgggaagagatgccaaccctttgagcggttacagaattggcaaaaccctgggaattgggtcgttcggtaaagtgaagatcgcggaacatatattgactggtcataaggtggcgatcaagattctcaatcgcaagaagatcagaagcatggatatggaagagaaagttaagagagaaatcaagatactgagattatttatgcatcctcatatcatacgcctttatgaggtgatagatacacctgctgatatctgtgttgttatggagtatgttaaatctggagagttgtttgattacatcgttgagaagggaaggctacacgaagaggaagcccgacacttttttcagcagatcatatctggtgttgaatattgccataggaacatggttgctcaccgtgatttaaagccagagaatcttcttttggattcaaaatgcaatgttaagattgccgattttggcttaagtaatattatgcgtgatggtcactttcttaagacgagttgtggtagcccgaattatgcagcacctgaggtcatatctggtaaactatatgctggtcctgaagttgacgtctggagctgtggagttattctttatgctcttctttgtggcactctcccatttgacgatgagaatattccaaaccttttcaagaaaataaagggtggaatatatacccttcctagtcatttgtcaccttcagcgagggacttgattcccagaatgctggttgttgatccaatgaaaaggattacaatacgtgaaatccgtgaacatgtgtggttcaagatccgacttccgcgctatttggctgtgccgcctccagacactgctcaacaagttaaaaaggtcgacgaggaaactcttaatgatgttattaagatgggttttgacaagaatcagctaattgaatctctgcaaaacagattgcagaatgaggcaacagttgcctattatttactcttggacaataggcttcgtacaaccagtggttatcttggatctgagtttcaagaatctatggactcatctttgtctcaagtaatcgctgaaacaccaacttcagcaactgaacttcgtcagcatgggttttcagaatctccaggttctggcttgaggcagcattttgcagctgaaaggaaatgggcccttggtcttcagtctcgagcacatccacgagaaataataagtgaagtgcttaaagctctgcaagaactgaatgtttactggaaaaagattggacactacaacatgaaatgcagatggagtcctggctgccttgagagtatgatgcataacagtgatagcttcagtgcggagtctgctataattgaaactgatgttttcatggagaaatcaaccccgacagtgaagtttgagattcagctttacaaaacgagggatgagaagtaccttcttgacctgcaaagggtcagtggatcacatcttctctttctggacttgtgttccgcctttctaactcagctgagagttctttgagcctgacatgattggcttcccaagcactccttgatgcacccagtggagtttcaagttacatttgagatgtacataatgaccatatataatcctccagtagattatattttctggagcatgtaatgtagacgttagaggcttgtcctggtttgccaagatggttgttacctaaggtcctaacaagaggccgcaggcgagcccagtccaattagatgatgtgaaaaatttttggcctttttttagtctttggacatgttatcaaattaaggaggtcgtgctagcacgatacccaaactaagaaataccccattgaaaactgaaaacaaagcttgctcgttcatactagtgtcaactctggcactaaagactggtgcttattttactccatagacagtaattagatgtcacattcacgtcacg

SEQ ID NO: 60011 - DNA, 1900 bp, Zea Mays
tctcctctctctctccccggcatttctctctctggcgtcactcgcgtgtcaggcgcattctgcctctttctttctccccctcccctcccctcccctgcgggcttctctcacgagctcccccggcctcgccgccgccgcctgctccggcgggcgggacccagctcgcagcgtctcccctgcggcgaggtacacgatggagggagcgggaagagatgccaaccctttgagcggttacagaattggcaaaaccctgggaattgggtcgttcggtaaagtgaagatcgcggaacatatattgactggtcataaggtggcgatcaagattctcaatcgcaagaagatcagaagcatggatatggaagagaaagttaagagagaaatcaagatactgagattatttatgcatcctcatatcatacgcctttatgaggtgatagatacacctgctgatatctgtgttgttatggagtatgttaaatctggagagttgtttgattacatcgttgagaagggaaggctacacgaagaggaagcccgacacttttttcagcagatcatatctggtgttgaatattgccataggaacatggttgctcaccgtgatttaaagccagagaatcttcttttggattcaaaatgcaatgttaagattgccgattttggcttaagtaatattatgcgtgatggtcactttcttaagacgagttgtggtagcccgaattatgcagcacctgaggtcatatctggtaaactatatgctggtcctgaagttgacgtctggagctgtggagttattctttatgctcttctttgtggcactctcccatttgacgatgagaatattccaaaccttttcaagaaaataaagggtggaatatatacccttcctagtcatttgtcaccttcagcgagggacttgattcccagaatgctggttgttgatccaatgaaaaggattacaatacgtgaaatccgtgaacatgtgtggttcaagatccgacttccgcgctatttggctgtgccgcctccagacactgctcaacaagttaaaaaggtcgacgaggaaactcttaatgatgttattaagatgggttttgacaagaatcagctaattgaatctctgcaaaacagattgcagaatgaggcaacagttgcctattatttactcttggacaataggcttcgtacaaccagtggttatcttggatctgagtttcaagaatctatggactcatctttgtctcaagtaatcgctgaaacaccaacttcagcaactgaacttcgtcagcatgggttttcagaatctccaggttctggcttgaggcagcattttgcagctgaaaggaaatgggcccttggtcttcagctttacaaaacgagggatgagaagtaccttcttgacctgcaaagggtcagtggatcacatcttctctttctggacttgtgttccgcctttctaactcagctgagagttctttgagcctgacatgattggcttcccaagcactccttgatgcacccagtggagtttcaagttacatttgagatgtacataatgaccatatataatcctccagtagattatattttctggagcatgtaatgtagacgttagaggcttgtcctggtttgccaagatggttgttacctaaggtcctaacaagaggccgcaggcgagcccagtccaattagatgatgtgaaaaatttttggcctttttttagtctttggacatgttatcaaattaaggaggtcgtgctagcacgatacccaaactaagaaataccccattgaaaactgaaaacaaagcttgctcgttcatactagtgtcaactctggcactaaagactggtgcttattttactccatagacagtaattagatgtcacattcacgtcacg

SEQ ID NO: 60012 - DNA, 1846 bp, Zea Mays
ctctacgtttgaaacaggtggaccgagagatccagctgccaagttattgccgcgggcacggccgcacggccaatcccaggagcccaccgaaacgcccaacgatcccctcccggcctgccgcccgtccggacccgagccggcctcgcattcggcgccgcgccagtcgcgcctccgcctccgtcgccgcctgctccggcgagcgggacccagctcgcctctactcccctactgcgaggtacacgatggagggagccggaagagatgccaaccctttgagcagttaccgaattggcagaaccctgggaactggatcgttcggtaaagtgaagatcgcggaacatatattgactggccataaggtggcaatcaagatcatcaatcgcctgaagatcagaagcttgaaaatggaaaagaaagtgaagagagaaatcaagttactgagattattgatgcatccttatatcatacgcctttatgaggtggtacatacacctgctgatatttatgtggttatggagtatgttaaaaaaggagagttgtttgattacatcgttgagaagggaagactacatgaacaagaagcatgtcgtttatttcagcagatcatatctagtaagctatatgttggtcctgatgttgatgtctggagctgtggcgttattctttatgctcttctttgtggcactctcccatttgatgatgagaacattctagagcttttttacaaaataaagggtggaatatatatccttcctagtcatttgtcactttcagcgagggacttgatttcccgaatgctggttgttgatccaatgaaaaggattacaatacatggaatccgtgaacatgtgtggtttaagattcaacttccacgctatttggctgtgccgcctccagacacagcacaacaagttaaaaagctcagcgaggaaactcttaatgatgttcttaatatgggttttgacaagaatctgctaattgaatctctgcaaaacagattgcagaatgaggcaacagttgcctattatttactattggatgataggctttgtacaacaagtggttatcttggatctgattttcaagaatctatggattcatctttctctcaagtaatcactgaaacaccaacttcagcaaccgaacttcagcagcatgtgtttacagagggcacatttggatgcctccctctgccttgctttgcttggctcagcatcaagatacaccgtttggttggtttgcttccagtctcggttcttgcactttccagaattttcattgccagcccaagcgacctgaaaccgctctcagcagctggtaagcctggtcttgctgagcgaggcgaggcaagctggccacataaaccaaccaaacgtgcctagaatctccagggtccagcttgaggcagcattttgcagttgaaaggaaatgggcccttggtcttcaggcaattttcacgttaagtaataacatcttatgatattttccctgaattattctgattcatttatccgtaattgtctagcagtctcaggcacatccattagaaataatagtagaaatgcttaaagctctgtaagaattgaatattaactagaaaaggattggacactacaacatgaaatgagatgggagtcctagctgtcttgagagtatgatgcataacaatgatggctttggtgcggaatctgctatgcctgaaactgatgatctcatcgataaatcaacccctatagtgaagtttgagatttgggtatcatttggaaccttaatcatacacgcttaaatattctgtagcctagtcttgattagaacggttgctgtgcaggatatgaacgacattgtg

SEQ ID NO: 60013 - DNA, 702 bp, Zea Mays
ccgcgggcacggccgcacggccaatcccaggagcccaccgaaacgcccaacgatcccctcccggcctgccgcccgtccggacccgagccggcctcgcattcggcgccgcgccagtcgcgcctccgcctccgtcgccgcctgctccggcgagcgggacccagctcgcctctactcccctactgcgaggtacacgatggagggagccggaagagatgccaaccctttgagcagttaccgaattggcagaaccctgggaactggatcgttcggtaaagtgaagatcgcggaacatatattgactggccataaggtggcaatcaagatcatcaatcgcctgaagatcagaagcttgaaaatggaaaagaaagtgaagagagaaatcaagttactgagattattgatgcatccttatatcatacgcctttatgaggtggtacatacacctgctgatatttatgtggttatggagtatgttaaaaaaggagagttgtttgattacatcgttgagaagggaagactacatgaacaagaagcatgtcgtttatttcagcagatcatatctggtgttgaatattgccataggaagatggttgttcactgtggtttaaagctagacaatgttcttttggattcaagacgcaatgttaaaattgttaattttagctcaagtaatgttatgcgtgatggccactttcttaagac

SEQ ID NO: 60014 - DNA, 1739 bp, Zea Mays
cgcctccgcctccgtcgccgcctgctccggcgagcgggacccagctcgcctctactcccctactgcgaggccaatcgggtgcgaatagtttctcaaagatagcttgaggaattggcaatcggattctggtacacgatggagggagccggaagagatgccaaccctttgagcagttaccgaattggcagaaccctgggaactggatcgttcggtaaagtgaagatcgcggaacatatattgactggccataaggtggcaatcaagatcatcaatcgcctgaagatcagaagcttgaaaatggaaaagaaagtgaagagagaaatcaagttactgagattattgatgcatccttatatcatacgcctttatgaggtggtacatacacctgctgatatttatgtggttatggagtatgttaaaaaaggagagttgtttgattacatcgttgagaagggaagactacatgaacaagaagcatgtcgtttatttcagcagatcatatctagtaagctatatgttggtcctgatgttgatgtctggagctgtggcgttattctttatgctcttctttgtggcactctcccatttgatgatgagaacattctagagcttttttacaaaataaagggtggaatatatatccttcctagtcatttgtcactttcagcgagggacttgatttcccgaatgctggttgttgatccaatgaaaaggattacaatacatggaatccgtgaacatgtgtggtttaagattcaacttccacgctatttggctgtgccgcctccagacacagcacaacaagttaaaaagctcagcgaggaaactcttaatgatgttcttaatatgggttttgacaagaatctgctaattgaatctctgcaaaacagattgcagaatgaggcaacagttgcctattatttactattggatgataggctttgtacaacaagtggttatcttggatctgattttcaagaatctatggattcatctttctctcaagtaatcactgaaacaccaacttcagcaaccgaacttcagcagcatgtgtttacagagggcacatttggatgcctccctctgccttgctttgcttggctcagcatcaagatacaccgtttggttggtttgcttccagtctcggttcttgcactttccagaattttcattgccagcccaagcgacctgaaaccgctctcagcagctggtaagcctggtcttgctgagcgaggcgaggcaagctggccacataaaccaaccaaacgtgcctagaatctccagggtccagcttgaggcagcattttgcagttgaaaggaaatgggcccttggtcttcaggcaattttcacgttaagtaataacatcttatgatattttccctgaattattctgattcatttatccgtaattgtctagcagtctcaggcacatccattagaaataatagtagaaatgcttaaagctctgtaagaattgaatattaactagaaaaggattggacactacaacatgaaatgagatgggagtcctagctgtcttgagagtatgatgcataacaatgatggctttggtgcggaatctgctatgcctgaaactgatgatctcatcgataaatcaacccctatagtgaagtttgagatttgggtatcatttggaaccttaatcatacacgcttaaatattctgtagcctagtcttgattagaacggttgctgtgcaggatatgaacgacattgtg

SEQ ID NO: 60015 - DNA, 896 bp, Zea Mays
ctcatatgagaaaaaccaagatccccaaagagcgatcacattcggggatggaaatcaaggtttggtcaaaggtttgggtaaaattgctatttcacctgaccattccatttccaatgtttttcttgttgattcattagattacaacttgctttctgtggcagaacctccaagttatcgggcccacatgcacctgtctttgtcccaaagacctcaaacgaccatgcatgtgcactagataactcaacaggatctgtccgattgccccaaggacatcggataaaccacttcaaccagaaccgcgggattaagtaacacaaatcacacacaccaatatttttgcagcggaaatcttattaccaaattttacaagttacaaaaattttatattattttatcggagtgattacaaaagtataagtttgaaatatatgctagctcaaatgaccatcctcagaaagaagataaagacgggttatacttatataagaaggccgagcccatcggcacttaacaccatcaaaagcagcacaaagttagaacctgaaaaacaacagggaataaaaccctgagtatggaattactcagcaagacttacccgactaaagaaaagactctcaagggtatgctggaattgggaatcaaggagaggctttagcaagaatcaacttagatacttttgcagaaatagcttactaaagtgagtccttactttcaatattttattaccaaattaagtattaatagactctgtttgcagctggtctaatttcaccatctcatcaatacaacatcatttttattcataatgttcacatccagacttaggttgtaggtcagtgaccaagtcttcataaccgcgaaggtacggcgatccgaatcgattatactcagctgag

SEQ ID NO: 60016 - DNA, 1843 bp, Zea Mays
gccgagggcagtgtgaaaacggcactgtccccgcaaagaaaagcagacccctcgccgccgcgtacctcctcgttggagcacgatcttgctggacgtcgccgcattcccaaatccgttaggcaatggcgccccctctcctctcgccaccgctgcttgccgacgcactcgcgacgccgccgcggtctttcctctgctcccgcccaacgcggcaactgccaaccgtcgggctcgccggagccgtacgtggcgaccgggggagatggagtgtgcggagaagggatcccagggtatttgccacctccacggaagcggatcgtgaaaggtcggaggaggatgtcgccgacgattactattccgttctgggtgtgatgccagatgcaacccctgaggaaattaagaaggcatactacagttgcatgaaggagtgccaccctgaccttagcggggaccaccctgacgtgacaaacttctgcatgttcatcaacgaagtttactcggtgttgagtgatccagcacagcgtgctgtgtatgatgagatccatgggtacacagcaacagcaatcaaccctttctttgatgacagtgcaccgaaggatcatgtgttcgttgatgagtttacctgcattggatgtaaaaactgtgccaatatttgccctggagtctttcaaattgaggaagactttgggaggtcaagagtctattcccagtcaggtagcacagagctaattcaagatgccattgatagttgcccagttgattgtattcactggacttccgctgcacagctgtcactcctcgagaacgagatgcgtagagtagagagggtgaatgtaagcaaactttctgtcagatggaactttggaattgtgtgatcaatgtagcttttttttttgtcacagttcactctcaatcatatccttcggtcagtatacatttcaagataagagcagtgtactgcatgcagtaataatgaatgtagttgaagaattatctggtgatattgtccgatattctaccatcagtacagtaatcagaatttgaaaactgagcaggttggtttgatgcttgctggtatgggagcttccatcaatgttttccggatggcaagtgctcgttgggaaaagaggcaagcaaaagtcttggagaaagccagaacacggatggtgaaacaggagacgtcagacacgaggagctcttggagcgaggtctgggcatcatccccaccacgagacgaccaaagcaacggcgatggggaagcatcggagagggccaagagagcagcagctgctgccaggcggtggcgagagttctccaggcgaggtgcggacaggcctccaacgcacaagcttcccgaggcagtgggcaacaaggattagtagtagtagtaaatttgatcatattggctaaatgtacagtgccattgtctgtagaggcttgcagtgccttcccagctttgcacgcactcatgtgctccatttgtaaaatctaggtgagtaggtatatagtgatgttgataacctgaacctgtacgtagaagacaacaagcacccagtgctgcagaacaaaggtcaaacatgtacaatacaatagaacgaatacaagtgtatacatacattcgctgtaccatcgcggtacgtagaacccctgtaaccgcagtgtaggtgtagcttctcgcttttgtgtggctgtgcttgtgcagatgaattccggggcaaatttcctttggcagcagtggcacattctcgcgcatctgccaaaggagaagttgcccagaaatgcaggtgcacatcctgggtctcgcgcgctcggagccaatgaatgttctgcgtgtcgtgtgttggtg

SEQ ID NO: 60017 - DNA, 942 bp, Zea Mays
tgaacagcagctgccgtatatatgcgtgccaaaggagaattgccctgcgattctaggctcagcgatttcggcgtggcggttcgtccagctccagtgcgtagaccccagttgattaagagccaaagccaatgtcagatacatggtatatttacagtttgaggtgggtttgcgatgcgagtgcgactatatgttcaggtatggtggtgttgaagggaaggtcgtggaacaatttttcaatttacaccatgtcatagatactacatttgaaacattcggtgtagcattatttgacatcttagataagtacaattttatccatctatatggtacaaggttattgtatttctagttgttgcttgggtattcattatttctttgagtaactctctttgattgtgaccataacaagtgtgtcatacaagagaagtgaccaatgttcttaaggcggtgagaaagtaaacatgaccatcgccttaaggcctaggcgacgcctaggcgagcaaggcgcctagaattatccgagtgcctggacgcctaggcgacgccttaaaaacactggaagttacacattgattgaaagtcgtcagaacaatatttgagtaaagcttgatgccttgaagcttgaatcgggtagagaaaacatcaacattctaatcttgctacacctagggatgtgagatggagttcacatcacataactcttgtccgatagaagctaatgtgggacttaggtattgaggtgcttgaaatggttgataaggatatgtgtgatccttctctagctaaggggttgcttgagaaaatggagccttttgagtttgttttcattatgaagcttatgtaaaaattgtttgctatcacaaatgagcttttgcatattttgcaaagacaagatataaatatagttcatgctatagaactaacctaagatgtaaaagatca

SEQ ID NO: 60018 - DNA, 751 bp, Zea Mays
atctgttcccgccagacaccattcctgacatcaagttgcagttcctccccccgcccggctgctgtgacctcttcctccctccgtgtgccacggtgagccgtaatccaaaggccagacctcctcgttgccagttgtcgtgacctgaagctagggcctaccgtgcgttttacattctaaactggatttatcgttatttcacggagggtcatcgcagcagatggatcccttggcttgctggtttggtgcaaacagctctgtatgcagatttcttttactattatttcttaagttggaagaacaatgtgaagctcgagttgcctgcttgagcatgcttcgttttgccagaaagcgtgcaagctacgtgactcaagttttatagaatttagttgattatatgggcatggagagacttggtaatgacgtgagcagttgcagttgatgccaaacccttgatcttgtctgcgaaaattggcatttgtgtttcccatggccaagacgatacgattccaaagctaacagatgctgctgcacagaagtaggctagttcctttttgtacctcaatacttttgatatggaaaatcatatacagttcagttggtctgtttaacattcgatttcacttgctccaaacgaaaaatgcgatccaatgttcgtgcgatttctgtgtaaaactgttacacttttgactgtcctcaacaatccattttttatatataatgtcttggtgttactttggcctagtcttcagct

SEQ ID NO: 60019 - DNA, 1340 bp, Zea Mays
acatataaaaaaatcgaaaattgggctaaaaatcaaaatagaaaaagtctcctgcctccgcggccgtgccgagccggcatccccttccgtcccccacccccagcagcgatcgcgacgacccgagccggcaagggtgacaggcggctgacgagccccatgggagacaacaagtctccgctgagcctgagcccgatgggcgggcgcgaccgggaccgggagctcctcatcccggtctcgggcggcggctcggcgcccggcgacggggtcgaggacggggacagggcctcctccgcctccgccgcgctatcctcctccggccgcgaggctttccataaggttgtccgcagttgggcttcaaagaagttcatgactggatgtgtaattctcttccccatagcaataacgttctacatcacctggtggttcattcattttgttgatggattcttctctccaatctatgctcaactgggaatcaacatattcggtcttggctttgtcacatctgttactttcatatttttgatcggagtctttatgtcatcttggcttggggcatctgtccttagccttggcgagtggattattaagcgcatgcctcttgttcgtcatatctacaatgcatcgaagcaaattagtgctgcaatatcaccaggcgttcaaggaagtggtcatcataaggcatcctcgtgttggagaatatgcgtttggtttcatcacatcgtcagtatccctccagagttattctggtcaagaagatctttactgcgtctatgtcccaacgaaccatctttacattggtgatatcttcatggtgaattcaaaggatgtcataaggccaaatctttctgtgcgtgaaggcatcgaaattgttgtatctggtggtatgtcgatgccccaaattctgtcaaccctcgacccgcagatgatccttggggacagaaccggaccaagcagaagctgaagctgctacgagccctttgtttacctttgtgctgatgattgttagtaacattttcatacaggctaccacgagtacggcaaactagactccgagcacaagtatctgtatattaagtaggtgtaggtgactcacacggtttgattatttgctggactctgtaccatggtttgtagtttgtactgcatccgatgcaagaaagaagcatctcacctgtctgtgatatatccaactgttgtcaaattactatcctctgtgtagtccttgattctcatctgacaacgttgaattgggttcttgacttgtcgatggttagctgcattcttttcttctatgtttgttctatctatgtgcggaacttattctgcatccttcgaac

SEQ ID NO: 60020 - DNA, 1349 bp, Zea Mays
acatataaaaaaatcgaaaattgggctaaaaatcaaaatagaaaaagtctcctgcctccgcggccgtgccgagccggcatccccttccgtcccccacccccagcagcgatcgcgacgacccgagccggcaagggtgacaggcggctgacgagccccatgggagacaacaagtctccgctgagcctgagcccgatgggcgggcgcgaccgggaccgggagctcctcatcccggtctcgggcggcggctcggcgcccggcgacggggtcgaggacggggacagggcctcctccgcctccgccgcgctatcctcctccggccgcgaggctttccataaggttgtccgcagttgggcttcaaagaagttcatgactggatgtgtaattctcttccccatagcaataacgttctacatcacctggtggttcattcattttgttgatggattcttctctccaatctatgctcaactgggaatcaacatattcggtcttggctttgtcacatctgttactttcatatttttgatcggagtctttatgtcatcttggcttggggcatctgtccttagccttggcgagtggattattaagcgcatgcctcttgttcgtcatatctacaatgcatcgaagcaaattagtgctgcaatatcaccagaacaaacaggcgttcaaggaagtggtcatcataaggcatcctcgtgttggagaatatgcgtttggtttcatcacatcgtcagtatccctccagagttattctggtcaagaagatctttactgcgtctatgtcccaacgaaccatctttacattggtgatatcttcatggtgaattcaaaggatgtcataaggccaaatctttctgtgcgtgaaggcatcgaaattgttgtatctggtggtatgtcgatgccccaaattctgtcaaccctcgacccgcagatgatccttggggacagaaccggaccaagcagaagctgaagctgctacgagccctttgtttacctttgtgctgatgattgttagtaacattttcatacaggctaccacgagtacggcaaactagactccgagcacaagtatctgtatattaagtaggtgtaggtgactcacacggtttgattatttgctggactctgtaccatggtttgtagtttgtactgcatccgatgcaagaaagaagcatctcacctgtctgtgatatatccaactgttgtcaaattactatcctctgtgtagtccttgattctcatctgacaacgttgaattgggttcttgacttgtcgatggttagctgcattcttttcttctatgtttgttctatctatgtgcggaacttattctgcatccttcgaac

SEQ ID NO: 60021 - DNA, 1409 bp, Zea Mays
acatataaaaaaatcgaaaattgggctaaaaatcaaaatagaaaaagtctcctgcctccgcggccgtgccgagccggcatccccttccgtcccccacccccagcagcgatcgcgacgacccgagccggcaagggtgacaggcggctgacgagccccatgggagacaacaagtctccgctgagcctgagcccgatgggcgggcgcgaccgggaccgggagctcctcatcccggtctcgggcggcggctcggcgcccggcgacggggtcgaggacggggacagggcctcctccgcctccgccgcgctatcctcctccggccgcgaggctttccataaggttgtccgcagttgggcttcaaagaagttcatgactggatgtgtaattctcttccccatagcaataacgttctacatcacctggtggttcattcattttgttgatggattcttctctccaatctatgctcaactgggaatcaacatattcggtcttggctttgtcacatctgttactttcatatttttgatcggagtctttatgtcatcttggcttggggcatctgtccttagccttggcgagtggattattaagcgcatgcctcttgttcgtcatatctacaatgcatcgaagcaaattagtgctgcaatatcaccaggtaatatcaatcaacaaactggtcaatcgagtttgctgaggtgctgaataaactctggttaccttttacagatcagaacaaacaggcgttcaaggaagtggtcatcataaggcatcctcgtgttggagaatatgcgtttggtttcatcacatcagttattctggtcaagaagatctttactgcgtctatgtcccaacgaaccatctttacattggtgatatcttcatggtgaattcaaaggatgtcataaggccaaatctttctgtgcgtgaaggcatcgaaattgttgtatctggtggtatgtcgatgccccaaattctgtcaaccctcgacccgcagatgatccttggggacagaaccggaccaagcagaagctgaagctgctacgagccctttgtttacctttgtgctgatgattgttagtaacattttcatacaggctaccacgagtacggcaaactagactccgagcacaagtatctgtatattaagtaggtgtaggtgactcacacggtttgattatttgctggactctgtaccatggtttgtagtttgtactgcatccgatgcaagaaagaagcatctcacctgtctgtgatatatccaactgttgtcaaattactatcctctgtgtagtccttgattctcatctgacaacgttgaattgggttcttgacttgtcgatggttagctgcattcttttcttctatgtttgttctatctatgtgcggaacttattctgcatccttcgaac

SEQ ID NO: 60022 - DNA, 303 bp, Zea Mays
ggcttgttgcaaccgcccgggcgccacgcgcgggttagcagctcgcccaacgatttaagccgcatcgtgccgccgccttaccccgttcgtctagtgcatccagtgagagaagaaagaccctcgtctccattagagctcaacggagtaggggagagagaagaaggggggaggagtgcgcagtggcccgatgctgtccccgtctacgcctccctcgccgacgagttcgctgtcttcgaccgctggttcgccttcgtgcccacctccacgcagccgaccgccgacgagcaaaccactgtggattct

SEQ ID NO: 60023 - DNA, 2451 bp, Zea Mays
cgaaactggcggagaaagcatccccaccaccgatcattatgctgagtgcttctgctaataaattgtcgaggcttaaggagcaagctgaggagtatgcagccttgatcatggaggaacttgatcctgaagggcttggctacattgagctttggcaactggagacattgctactgcaaaaggatacctatgtcaactacagccaggccttgagctacacaagccaagcactaagccagaaccttgctggtctaaggaaaagaagtccaatccgaaaaattagcagcacattgaactactatctggaggacaactggaaacgtgtttgggtgcttgcagtatggattggaataatggctggattgtttatttggaagttcattcagtaccgtaaccgttatgtctttgatgtgatgggctactgtgtcacaactgcgaaaggtgctgcagagactctcaaactgaacatggcacttattctcttgcctgtatgccgcaacactatcacctggctgcggaatacgaaagctgcacgggcattgccgtttgatgacaacattaacttccacaagactattgcagcagcaattgtggttggtgttgtccttcatgcagggaaccaccttgtatgtgattttccacggctcattagttcatcagaggtgaagtatgctccactgcgcaaatactttggggaaaataaaccaacatatctggatctggtaaaaggagtggagggcataacagggataatcatggttgtgtgcatgcttatcgcttttactctagcaacaaggtggttccgccgtagcctggtgaagcttccaaggccatttgacaaactaactggcttcaatgcattctggtactctcatcatttgttcatcattgtgtacatatcacttgttattcatggagagtgtctataccttatccacgactggtacaaaaggacgacatggatgtaccttgctgttcctgttggtctgtatgtaggggagaggactctgaggtttttcagatcgggcagttattctgtccggttattgaaggtggctatatatcctggtaatgttttgacattgcagatgtctaaacctcccacattccgttacaagagtgggcagtatatgtttgttcaatgccctgcagtttcaccttttgaatggcatcctttctcaattacttcagcacctggggatgactatctaagcattcatgttcgacaacttggtgactggacacgggagctcaaacgggtattctcagcagcttgtgagccacctgtgggtgggaaaagtggccttcttcgagcagacgaaacaaccaagaaagcgttaccaaaacttttgattgacggaccatatggttctcctgcacaagactacagcaagtatgacgttttactacttgtcggattaggtatcggtgccacaccttttattagcatactgaaagacctgctcaataacatcatcaaaatggaggaagaggaagaagcttcaagcgatctttacccaccaattggtcgcagcaaggcacatgttgatcttgacacccttatgaggattacctcaaaaccaaagagggtactgaagacaacaaatgcttacttttattgggtgacacgtgaacaagggtcttttgattggtttaaaggggtcatgaatgaaattgctgaactagatcagaggaatatcattgagatgcacaattatctcacaagtgtttacgaggaaggggatgctcggtcagcactcattacgatgctacaagctctcaaccatgccaagaatggtgttgatatagtttctggaactaaagtgcggacacattttgcaaggccaaattttaaaaaggtcttatctaagatagctaccaaacatccatatgctaagattggagtgttctactgcggggctccagttctggcacaggaactaagcaagctctgttatgaattcaatggcaagtctacaacaaaattcgaattccacaaggagcatttctgacatacaacaaggttaatgcagaatattggaacaagggggagaagatgtgatgtatattgggataggctggcctccttcgtgtcaaaacccgagccacgtgaatgtgccagagattaactagaaagacggttccctacccttgcacgatgatgtcacgcaggtctcatcaaactcttgaattttgatacttgaaaattcaaggcatacattttgtagctagcaattttgcaaagtcattgttttgtaaggcaattttgcgaagccaattatccccttgtcgcatgcgcgctctctttcgtcattttctcatgcgtcgcataagagcaaagtccggatcttgcagacaagtcgctatatgcgactgctgcagcgggatatacgccttgtttgtttgtttgtgtcggattgcatccgaaatcgttgtagctaattaaagtttata

SEQ ID NO: 60024 - DNA, 2258 bp, Zea Mays
atctcaggacaccaagctcctgctgctggaaccaaaaatctacagctttggcaactggagacattgctactgcaaaaggatacctatgtcaactacagccaggccttgagctacacaagccaagcactaagccagaaccttgctggtctaaggaaaagaagtccaatccgaaaaattagcagcacattgaactactatctggaggacaactggaaacgtgtttgggtgcttgcagtatggattggaataatggctggattgtttatttggaagttcattcagtaccgtaaccgttatgtctttgatgtgatgggctactgtgtcacaactgcgaaaggtgctgcagagactctcaaactgaacatggcacttattctcttgcctgtatgccgcaacactatcacctggctgcggaatacgaaagctgcacgggcattgccgtttgatgacaacattaacttccacaagggaaccaccttgtatgtgattttccacggctcattagttcatcagaggtgaagtatgctccactgcgcaaatactttggggaaaataaaccaacatatctggatctggtaaaaggagtggagggcataacagggataatcatggttgtgtgcatgcttatcgcttttactctagcaacaaggtggttccgccgtagcctggtgaagcttccaaggccatttgacaaactaactggcttcaatgcattctggtactctcatcatttgttcatcattgtgtacatatcacttgttattcatggagagtgtctataccttatccacgactggtacaaaaggacgacatggatgtaccttgctgttcctgttggtctgtatgtaggggagaggactctgaggtttttcagatcgggcagttattctgtccggttattgaaggtggctatatatcctggtaatgttttgacattgcagatgtctaaacctcccacattccgttacaagagtgggcagtatatgtttgttcaatgccctgcagtttcaccttttgaatggcatcctttctcaattacttcagcacctggggatgactatctaagcattcatgttcgacaacttggtgactggacacgggagctcaaacgggtattctcagcagcttgtgagccacctgtgggtgggaaaagtggccttcttcgagcagacgaaacaaccaagaaagcgttaccaaaacttttgattgacggaccatatggttctcctgcacaagactacagcaagtatgacgttttactacttgtcggattaggtatcggtgccacaccttttattagcatactgaaagacctgctcaataacatcatcaaaatggaggaagaggaagaagcttcaagcgatctttacccaccaattggtcgcagcaaggcacatgttgatcttgacacccttatgaggattacctcaaaaccaaagagggtactgaagacaacaaatgcttacttttattgggtgacacgtgaacaagggtcttttgattggtttaaaggggtcatgaatgaaattgctgaactagatcagaggaatatcattgagatgcacaattatctcacaagtgtttacgaggaaggggatgctcggtcagcactcattacgatgctacaagctctcaaccatgccaagaatggtgttgatatagtttctggaactaaagtgcggacacattttgcaaggccaaattttaaaaaggtcttatctaagctccagttctggcacaggaactaagcaagctctgttatgaattcaatggcaagtctacaacaaaattcgaattccacaaggagcatttctgacatacaacaaggttaatgcagaatattggaacaagggggagaagatgtgatgtatattgggataggctggcctccttcgtgtcaaaacccgagccacgtgaatgtgccagagattaactagaaagacggttccctacccttgcacgatgatgtcacgcaggtctcatcaaactcttgaattttgatacttgaaaattcaaggcatacattttgtagctagcaattttgcaaagtcattgttttgtaaggcaattttgcgaagccaattatccccttgtcgcatgcgcgctctctttcgtcattttctcatgcgtcgcataagagcaaagtccggatcttgcagacaagtcgctatatgcgactgctgcagcgggatatacgccttgtttgtttgtttgtgtcggattgcatccgaaatcgttgtagctaattaaagtttata

SEQ ID NO: 60025 - DNA, 2961 bp, Zea Mays
ggacaccaagctcctgctgctggaaccaaaaatctacagctttggcaactggagacattgctactgcaaaaggatacctatgtcaactacagccaggccttgagctacacaagccaagcactaagccagaaccttgctggtctaaggaaaagaagtccaatccgaaaaattagcagcacattgaactactatctggaggacaactggaaacgtgtttgggtgcttgcagtatggattggaataatggctggattgtttatttggaagttcattcagtaccgtaaccgttatgtctttgatgtgatgggctactgtgtcacaactgcgaaaggtgctgcagagactctcaaactgaacatggcacttattctcttgcctgtatgccgcaacactatcacctggctgcggaatacgaaagctgcacgggcattgccgtttgatgacaacattaacttccacaagggaaccaccttgtatgtgattttccacggctcattagttcatcagaggtgaagtatgctccactgcgcaaatactttggggaaaataaaccaacatatctggatctggtaaaaggagtggagggcataacagggataatcatggttgtgtgcatgcttatcgcttttactctagcaacaaggtggttccgccgtagcctggtgaagcttccaaggccatttgacaaactaactggcttcaatgcattctggtactctcatcatttgttcatcattgtgtacatatcacttgttattcatggagagtgtctataccttatccacgactggtacaaaaggacgacatggatgtaccttgctgttcctgttggtctgtatgtaggggagaggactctgaggtttttcagatcgggcagttattctgtccggttattgaaggtggctatatatcctggtaatgttttgacattgcagatgtctaaacctcccacattccgttacaagagtgggcagtatatgtttgttcaatgccctgcagtttcaccttttgaatggcatcctttctcaattacttcagcacctggggatgactatctaagcattcatgttcgacaacttggtgactggacacgggagctcaaacgggtattctcagcagcttgtgagccacctgtgggtgggaaaagtggccttcttcgagcagacgaaacaaccaagaaagcgttaccaaaacttttgattgacggaccatatggttctcctgcacaagactacagcaagtatgacgttttactacttgtcggattaggtatcggtgccacaccttttattagcatactgaaagacctgctcaataacatcatcaaaatggaggaagaggaagaagcttcaagcgatctttacccaccaattggtcgcagcaaggcacatgttgatcttgacacccttatgaggattacctcaaaaccaaagagggtactgaagacaacaaatgcttacttttattgggtgacacgtgaacaagggtcttttgattggtttaaaggggtcatgaatgaaattgctgaactagatcagaggaatatcattgagatgcacaattatctcacaagtgtttacgaggaaggggatgctcggtcagcactcattacgatgctacaagctctcaaccatgccaagaatggtgttgatatagtttctggaactaaagtgcggacacattttgcaaggccaaattttaaaaaggtcttatctaagctccagttctggcacaggaactaagcaagctctgttatgaattcaatggcaagtctacaacaaaattcgaattccacaaggagcatttctgacatacaacaaggttaatgcagaatattggaacaagggggagaagatgtgatgtatgtaagtcacttgtgctttaacatgttgctttcttggcgatgagtttgaaagagcaagggattctgcacaaggtgttgtatcaccacagcttactccgcatttgtgatactactgtcccccagttacaactgcattatctattgcttgagatactaaaatacaataagatcgcatagaaaggaaaatgggggtcagcagcacatcacacaaggtttccatcgaaggttcaagagcacataccccaggtggagtagcaagggaatctctcccatggagtccacaaccataaattgtgattatataagtagcgtgatgtaggacacatacaatgaaggccaggatgtcacaaggctacctaactgtatatttgcatgcagctgagtggctgactgaggccacaagtttgatctaactttgtacttgtacacagggttgaaaaacaggaagaaggtacattttgtttttgtaagtagcgtaggttggtagtgactgggctcagattgggggccctcaagtttcattaaagcttgttccgttgcctcgttgagtggtaggttgcatttttttttaggacagatctggctgattcatgtatatctttactgaaggccatgttttttttaaaaaatttatgatgctgtctacatgttgatatggaaaggattaaatgtggaaaatgatatgtatacctgtgctaatttggcgacagattgggataggctggcctccttcgtgtcaaaacccgagccacgtgaatgtgccagagattaactagaaagacggttccctacccttgcacgatgatgtcacgcaggtctcatcaaactcttgaattttgatacttgaaaattcaaggcatacattttgtagctagcaattttgcaaagtcattgttttgtaaggcaattttgcgaagccaattatccccttgtcgcatgcgcgctctctttcgtcattttctcatgcgtcgcataagagcaaagtccggatcttgcagacaagtcgctatatgcgactgctgcagcgggatatacgccttgtttgtttgtttgtgtcggattgcatccgaaatcgttgtagctaattaaagtttata

SEQ ID NO: 60026 - DNA, 3710 bp, Zea Mays
tgaaatataacggcaagtatatacgtgccggtaaatggtgccagcatcgtctcgtcgccatgtatttaagcgtgccggtgcagctaattggttccagatcttatcccttccagttccaggcagcatccccagcctgacgaaggaattgaggacgctcgagctcgagctacgtcaggatccaacaccaccatggttacgggaaagaagaggacgttcgtgctctacccgtcgctgggcgtgggccacctgatcccgatggtggagctggccaagcacctcttgcgccacggccacggcgcgctcatcgccgtggtcaacccgcccgacaccgacgccgtgtcggccgccgcggtggagcgcctcgcggcggccaacccggccatcgcgttccgcctcctgccggtcccggccagcccggacgccggcgcggactgggtgaagcgcgacctggacacgctccggctcgccaaccccgtgctccgggacttcctgctccggtcccagcccgcagccgacgccgacgcgctcatcctcgacatgttctgcgtcgacgcgctcgacgtcgcggcggagctcggcgtcccggcctacttcttcttcgcctccgcggcgggggacctcgccatgttcctcaacctgccgtacctctaccccaccctgccgtcgttcagggacatgggcgaggcgccggtgcgctgccccggcatgccgccggtccgggcgatggacatgccgctgacggtgcaggacagggacagcgaccggaccaaggtccggatgtaccagttccgccgcatcccggaggggaggggcgtgctggtcaacagcttcgcctggctggagcccagggcactgagagcgctcggcgacggcgtctgcgtgcccggccgcccgacgccgagggtcttctgcgtcgggccactggtcaacgacggcagcagcacggcggggggcggggggaggcacgagtgcctggcgtggctggacgcgcagcctaagcggagcgtcgtgttcctctgcttcggcagcaagggctccttccccgccgcgcagttacaggagatcgcccacgggctggagagctccggccaccggttcctgtgggccgtgaggagcccgccggaagaaccggacacggacctggggaagctgcttcccgaagggttcctggacaggaacagagacagaggcatggtggtgaaggactgggtgccacaggcagaggtggtgcggcacgaggcggtccgcgcgttcgtcacgcactgcggctggaactccacgctcgaggccatcatgtctggcctgcccatgatatgctggccgctgtacgcggagcaggggctcaacaaggtgttcatggtggaggagtggaggatcggggtggagctgcgcgggtacgaaaagttcgtcaaggcggaggagctggaagcgaaggtcagactggtgatggaggctgaggaagggaggatcctccgggagaggctcgcggtggcgagggagaaggcgttgggggctactaaggaaggcgggtcttctgaagtggcattcgcggagttctttggagatttggacaagagcagctctccgtcggtaaacggagaatgcgattgaattgatcactggtgtgctggtgtggcagatggactgcgaacgtatatatactttaggattcaatatcacttagtattttgacagtacgagactaaaatattgcatctgtggtatgggaataaaattggattcaagcagagcgccacttgcgttgcgtgttacaatgtgattgtcagttttaccttattttatgaatcaatccactgatgattgtatctagcaatagcgtattctgatttttagctagaatatgctacccaggaatgctcgcagttctttatcacccagcatatatttatttgtcaaactcatgctccctcgaatctctttgggagaaatcaaccgaacaaacccggaaatatctcacatagatcatagtccaagctaacattagaacagatcaggtaacaggatcagccatgatgctcactttagtgcatgatcatttggcgagcatgatatccttcaagaactcctcaaacgccatccgcgacggcccgccatcagccagcgcctctgccgccttctcctttgccaacgccagcctctccctgagcttctccccttcctcagactccatcaccagcctcaccttcttctccacctccgccgcgctcaccagctcctcgtcgtagccgtccatcaccaccccggccttgatctcgtccactacgaacaccttgttcaccctctgctcggcgtacatcggccagcacagcatggggacgccggccgacgccgcctccagcaccgagttccacccgcagtgggtcatgaacgcgcccgtggctgcgtgccgcagcacctccacctgcggcgcccacatcttcaccaccatccccctgtcactcgtgcgctccagaaacccctccgggagcagcgagtccaggtccggctcaggacgcgcgaggaagaacttggtcgggtcctccggcgggctccgcacgacccacaggaaccgatgcccggagctctccagcccgcgagcgatctccttcacctgcgccgcggagacggcgcccaggctgccgaagcagaggaacaccacgctccgttccggctgtgcgtccagccacgacaggcacgcgtgccgctcccctttctccgccgcctcctggcccctgacgataatcgggccgatggggtaaaccggcggcgtggggcgaccagggacgcagacgccgtccctgagtgccccgacggcccgcgcctccagccactcgtaggtgttgatcagcaagccccgagcctcggggacgcggccgtagtgcacgatccgcgaggcgcaggtccgggccgcgcggtcgagcacggtgtgaggcatgtccgaagccgggatcggcgggacgccggggaagtggaggagcgccttgcccatgtctttgaagctgggcccgccctccgtcgtggcgaagtagtggggaaggtggaggaacgcggcgaggtcgccagcgcaggaggtgtagtagaagtaggccgggatgccggcggatgcggccgcgtcgagcgcgtcgccgcagaagaggtcgagcacgagcccggcgacggagggaagggagcggaggaaggcggtgagggaggggactgtgaggcggagcgcgtccagcatccggaggaaggggtccgggtccgggacagggtagtccggcggcgggaggtggtggaaggatacggcggggttggcggcctcgagcgtggcgacggcggatgcggaggaggcgaagaagtcggcagtggacgacggcggggtcgggacggcgattatgacagccaggtcgcggcggaggaggagcttggcgagctccaccatggggatcaggtggcccacgccgaggcaagcgtgcagcaccacggtcgggtgaggactgggctccgccatcagcgtcagcgatgaggacgagccaccgagatgtttagcttttgtgggtacgggtgatgttgggggtctgcttcgtcgtcgaatgtcctgtcagctgaagcaccttcggaaggtcagaacaagaacaatgccgaagctatcagtcacgaagctttgtagtatatttcaaaatgcaccgacttaaagatgagatgaccaatcggtccatgataaactgtgt

SEQ ID NO: 60027 - DNA, 2145 bp, Zea Mays
agaagaacaatgtatgtacactgcatgtcttcctcctgggtccaataatgtactgctgtcaagcaaaaacttttgtcctagttatggtagctctagccgaacagttcacatctccatcacccattaatcacccaaacctgtccaaaaacaaacggaacaatcagattggtatcccagagtcgataaaagcggtatcaatcaaacagactaagggaaagaatgggagatgagaaaaatgtcaagcgccatcacctgctccggcgacggtcggcggcatactgcgacagcgggacaagctccgagagtggggtagagagcggcgtggcgacgggggttgggatgggggacgagcggcagacggggcacgacgcgctacgacgcagccacgcgtcgaggcaagtgaggtggaacctgtgcctgcactctggcatcacccgcagcatctcgccctccttgtactcgcagaggcagatggagcacgcgacctccgtgtccgcccccgccccggccttggagaagggcaccatcggatacgacgcgatgacggaggcgtcgagcccgacgggggaggccgcggcggcggggccgcgggaggaggacccaggcgagtcgtagtcctccgcgacgaagacgacgcggggcacggtgatggagatgtggccggagctggaggcggaggaggcggcgtgcctggtggagccgacgccgacgccggctccggtgccgaacccctggctggcggccccgcggcggaggcagaagtaggaggcgagcagcaccgacgcgaggagcacgaggaatccgaacgcgatggcgatcgcgtagccgaggccgagcgaggcgagcgggtcaaggaaggacatggctctctcgctccccacgtggtggtcgtgggcggcggcggcggcggcggcggggctgtggtcgtggggcgggatggcatgctgcgcgggggaggggcagaatgggaagagggtatttgtttgcgggagcttaggtttccgggggggctggatctggttgttggccgcattaattgccggggaaggaggagaagccgagaaggggaatcggagtaatggcgggggactgggcgggtgcacctcgctgccgtgccgtgctctggtgtggacggtggtggccttggcctgtgtgggaactggaagagtggagtggccaagcgggagatgagggcgatcggagcaatgcgcgttgggccgtcactgactccagccagcgcacggactggcagtagggtgactgctggtctgctgcgggccgtgcgcgtggtatgggctgcgctagacgtgttccgttttcgtctgaaaacagaggtgtccgggagtagggccgtggcctcgttgacttctagtgtgcatactaggccgaccaaggagccgtatccgtacggggatagcataagggcccctttggcagggctctgacttctccaaaaacgactttggttctggctcacaaggtgaagtcacttctttagatgagccaaagccattctgaaaaatcatttgacaaaatggcttataggttctttttcagaaagacccttatatagtttggactggtgggagggctattgtgcgtggctagggattgagggcagaacccaaaaaaaataatttggactggtgggagggctattgtgcaaaaatgacgtgagctgaagccgggtgagccactttttttggctcatgccctctagttcattttggaaaagcacttcactagtgaagccatttgaaaaagaggtgtttggcacaacttttgcatgagccagagccgaagctgaaaaataagccttaccaaaggggccctaaaaatcaagctgttgatgctgctgtatttgctctgctcgatgaaagtgttgttactcatatttaaacttagctttacaaatactacagtctacaataaaaaacagaccatatgggtgtgaaagcatctaagattctagttggttttgatgattaataacaacataaaattattatcattcctaagaccatgttcggttgcatagggattagagagaattaagggattaaatctcctatttaaaattaaataggaaaggatttaatcaccttcaatcctctcaatccacctctaacggatcaagctctaaat

SEQ ID NO: 60028 - DNA, 3500 bp, Zea Mays
cggacccggattttgccggcgaatgtcctggcatgacacgcgtcgccaggtctcgtgtcctcctcgggatcttcatcccgacgggccccacggaagcaattcgccattctcccaccgattctgaccctacgctaacttacatgtgggccaagaaaagtggcccgcacaaccgtttccgcgtgggacacgaacgcagcgggaaagagaaaaaagtagaaaaagcgaaaagcctagtagcacaaggctacaagcctacaagcaaccgcgtccgcgtgtggagcaaggaaggcgaggggagccgagcgggcaaccggcggcgacagacatggcggagcagcacaaggaggagtcgggcgtgacagtgctggacaagatctccgacaagctccacgggcgcgggggcggctcgtcttcgtcgtcggactcggacgacgagcgctcgtcggcgacggccgccgtgaaggccaagatctaccgcatcttcgggcgcgagaagcccgtgcactccgtcctcggcggcggcaagcgtaagcccggacctcaactcctcatcctcaagcctcttctccgatctccactagagggccttcgtcttgtttggtctttatagagatgagatccaaccgctttggcgttgcttcacttgtcaagcgttggtgaactattattgatctgtagccgcatccatgtggacaaatgcaaattcctgggtagagatcttgggcgtctgggaaaccgctcgacttccgatccgatgtggtttgggtcaaatttctgcggcattgtctccacgatgcgagtatggcgcgaccagattactgtctctgtcgctgtaagatttgcctttacgccaggagtaagttatcgggctattctgtaagacagcaacagtaacttcgggtgattctgtagatgagctacagtagcttcctactcctggcctcctgggtaatttgcagcatgcgttacagtagctcgcttggtaatttgtagcgtgcgttacccttaaactcaggtattctttgtttgtttgctagtgagcgtttgttcccagatcccaattgttcatttatttggagctttgctctgatggacttttgatcaagcttgcagcggccgatctgtttctatggaggaacaagaggatctctggtggggtgctcgcaggcgcaactgccttctggctgctgtttgaggtcatggattaccacctcctcaccctgctatgccactgcctcatcctcaccctggccatcctgttcctctggtccaatgccacgactttcatcaacaagtgagttagtgggatcccttaaaacttgtgttgtggttttatttatgctgataatgctagtttaacccggtttacacgtttatgcagcatctgcatgtttttcatggctgccaccactattatcttcaccttatattttattaagagcatatatcacctagtggcctgtagttgatcagcataactcttggattgtgacataattgccatgcatatttaggtctcctcctaacatccccgaggtgaagatcccagatgacctggctgtgaatgttgcacgttccctgagatatgagatcaacaggggttttgctaccttgagggagattggccaaggccatgacctcaagaaatttctgattgtgattgcaggactgtggatcctttctgttcttgggagctgctgcaatttcctcaccttgtcttacatagtttttatggtactgtacactgtaccggtcctgtatgagaaacatgaggataaggttgatgcttttggtgagaaggccatggtcgagctgaagaggtactacgccatcttcgacgagaaatgcctatcaaagattccgaagggcccattaaaagacaagaagcaacattagaagcttagaatcagataagggtctgcggtgatttatcatctcttttgaccattattcgtcggttttggtggatggatgtgattccatgtctaaatacctggacgtgctctagtgttttagtgtggtcagtagcaatgttctaaattatctgagattacgctgaatcatgttctgaagtccacgtttaacgttgctctccctatcctttggaagtggcaatttcctcaatgtctgtaatatatctagtctagtgctatttcttaatctgacctagcgtcatgatgaacccttcttggatatttatttatttgtgccactggacatggtaattagagagcacgtaaattgtacatttgccatcatactcattagacgtgagacgtgttagtgtggtatcgatgcttgcactggagatacgatgctcaataacgccaagtttagaaaagtagcccttagagcatcttcaacaatatatagggttctattcagaaaaaaaaaactatttcaacggtgccctatttcataaaatttagttaaaaattataaagcaccctcttaaatgacttaaatatattactatctccgttttcgaatattttttatccgatgatttatttttataactaaaccacgataaataaaaaagatcactatagtgggcttccctttaacctaaatttaaggttttactgttggaacaaaatattttgttagtgcctaaattttataaaatatatttatttttaaattatagatcattttatagatcatgttattggagatgagcttatggattgtacgtgtagacgtccggtgaaaaagttggttatcgaagcatctccaacggttttttaaacaactcattaaattttaaatttaataagtgaataaaaaacacttcttcaatagttctataaatgttaaatatagttacttcctatccaattcaatttcgtctgtaagtttgaagactcgatagtcagctgtcgccgaatattttaatgcccacgttggccacgtagctaagtatatagatttgccgtgttttttaacacccacgagataatatgaaggaaaatctagcaaatattttttttaaatgatcaaggcacaatgattagtaccaagtggatttgtgcgcttccaacttgttgcagtaccgggcggtggacgatgacggcttctcgtgattagcaatacctgcggtcgacgatgacggcggtctgagacctcgcggcatatgtgactccttccctacattgctccgaacgatccgcgatggcactggagatcttaggatcctctgggttcacctggggcgtcgcgagacgacgttgagtcgcttagaaattaagaaatcaagtcggtgaagagatcttgattcttgagtggagtgggttttgccctgggggtaagatctgagggtcgtcttggggtcggcaggccacccaagacggatctagacgacataaagtcgaataggatagaggtggatatgcagaaggctataactaaaagctatgttacatctactcttagggcaggaatgataaagaaaggtaaataacgtagatttgttcgattggaatgtgttcggggttctg

SEQ ID NO: 60029 - DNA, 2537 bp, Zea Mays
tggcccgcacaaccgtttccgcgtgggacacgaacgcagcgggaaagagaaaaaagtagaaaaagcgaaaagcctagtagcacaaggctacaagcctacaagcaaccgcgtccgcgtgtggagcaaggaaggcgaggggagccgagcgggcaaccggcggcgacagacatggcggagcagcacaaggaggagtcgggcgtgacagtgctggacaagatctccgacaagctccacgggcgcgggggcggctcgtcttcgtcgtcggactcggacgacgagcgctcgtcggcgacggccgccgtgaaggccaagatctaccgcatcttcgggcgcgagaagcccgtgcactccgtcctcggcggcggcaagccggccgatctgtttctatggaggaacaagaggatctctggtggggtgctcgcaggcgcaactgccttctggctgctgtttgaggtcatggattaccacctcctcaccctgctatgccactgcctcatcctcaccctggccatcctgttcctctggtccaatgccacgactttcatcaacaagtctcctcctaacatccccgaggtgaagatcccagatgacctggctgtgaatgttgcacgttccctgagatatgagatcaacaggggttttgctaccttgagggagattggccaaggccatgacctcaagaaatttctgattgtgattgcaggactgtggatcctttctgttcttgggagctgctgcaatttcctcaccttgtcttacatagtttttatggtactgtacactgtaccggtcctgtatgagaaacatgaggataaggttgatgcttttggtgagaaggccatggtcgagctgaagaggtactacgccatcttcgacgagaaatgcctatcaaagattccgaagggcccattaaaagacaagaagcaacattagaagcttagaatcagataagggtctgcggtgatttatcatctcttttgaccattattcgtcggttttggtggatggatgtgattccatgtctaaatacctggacgtgctctagtgttttagtgtggtcagtagcaatgttctaaattatctgagattacgctgaatcatgttctgaagtccacgtttaacgttgctctccctatcctttggaagtggcaatttcctcaatgtctgtaatatatctagtctagtgctatttcttaatctgacctagcgtcatgatgaacccttcttggatatttatttatttgtgccactggacatggtaattagagagcacgtaaattgtacatttgccatcatactcattagacgtgagacgtgttagtgtggtatcgatgcttgcactggagatacgatgctcaataacgccaagtttagaaaagtagcccttagagcatcttcaacaatatatagggttctattcagaaaaaaaaaactatttcaacggtgccctatttcataaaatttagttaaaaattataaagcaccctcttaaatgacttaaatatattactatctccgttttcgaatattttttatccgatgatttatttttataactaaaccacgataaataaaaaagatcactatagtgggcttccctttaacctaaatttaaggttttactgttggaacaaaatattttgttagtgcctaaattttataaaatatatttatttttaaattatagatcattttatagatcatgttattggagatgagcttatggattgtacgtgtagacgtccggtgaaaaagttggttatcgaagcatctccaacggttttttaaacaactcattaaattttaaatttaataagtgaataaaaaacacttcttcaatagttctataaatgttaaatatagttacttcctatccaattcaatttcgtctgtaagtttgaagactcgatagtcagctgtcgccgaatattttaatgcccacgttggccacgtagctaagtatatagatttgccgtgttttttaacacccacgagataatatgaaggaaaatctagcaaatattttttttaaatgatcaaggcacaatgattagtaccaagtggatttgtgcgcttccaacttgttgcagtaccgggcggtggacgatgacggcttctcgtgattagcaatacctgcggtcgacgatgacggcggtctgagacctcgcggcatatgtgactccttccctacattgctccgaacgatccgcgatggcactggagatcttaggatcctctgggttcacctggggcgtcgcgagacgacgttgagtcgcttagaaattaagaaatcaagtcggtgaagagatcttgattcttgagtggagtgggttttgccctgggggtaagatctgagggtcgtcttggggtcggcaggccacccaagacggatctagacgacataaagtcgaataggatagaggtggatatgcagaaggctataactaaaagctatgttacatctactcttagggcaggaatgataaagaaaggtaaataacgtagatttgttcgattggaatgtgttcggggttctg

SEQ ID NO: 60030 - DNA, 5426 bp, Zea Mays
gaatatgatatctatcgaatgtgatatatggaatatataacaaatgtagagtcttagagtattttgatcgatcggcatataaatataggcccgagtcagacatcaaatagcttctatttgtattatccgtaggacaccttatatgtatcaaaatcgatatcaaaataaaaaaagatgtacaatccaatttatcgatttaatagaagcccaaagagatgcatatgatacctaaatagggaacgtatctggtgcaaaccaaccccgccgtgcaaccgtgcaaacttctaatctaaaccacatgatgttaatccaaggggcgcaggggcgtggatagttttacacttaactgcccgctgctaatcacactttttcaaatccccctcacactcctccgcacgtcccattggatcaacatcatgtggttcagattagaagtttgcacggttacacggaggggttggttttcagcagatacgttcccacctaaataaagatacgatagatatgtcaaaagcaggtctggttatatctattgttaatcctatatagaatgcaaggacgtagggatttctatgtagacatagtatctccttcaaagactttttccaaccaccacttctaaaatttgactagattaaaatcgttgccaacgagctcagggtctttgccaggatcccatcactccatgtaactcatcgagaagagattgcttttgatctttataagcaggaccatatactactatgaactttcaagaaaaaaacaaactttttatcggtcagcatagcactaattgtatattataaaatatcgcatataccagcatattataaatatcagcattaactcccactaaaagaccaccacctctaaataattccaaggggatattaccaacaaggtccctcaaaaacctaacaaaaagtcttttttttcttaatccatgatttctagattatctctaatcccactgaccaaaaagcagcgaacatactaatctcataatgcgacattacaagtaatctaaactataattatcatatgcccatcattaaaaactaaaaaaatgagtcgaatatctataaaactatcaaatggccatcattatcgtggcaacattattgtataggttgattaattttctacagctcgcgagccagaatggctcggttcggcttgttgcccccaacgaacctaaaaatctggctcggctcgctcaagacccgcgaagcgctccaaaccgaactgagccactccgaacttgagctgcttcgcgaggttcgagttttttttttcaaaccctacccatatactcctaatatacttcagaataagccaatgatttgctttagactttatctttttcctaggaccaattttacacgaacctactttggaccaaccagactgctggtaagtctttttaagctcgaagctacttttgatttcaggttttggggggtgtcaactgcccgccacgcacattgattattcaataggcgttaatgcccgtgttcctgtaagtttggtcgtttgtgtaatccgctgcgcggagctgctacgtacttgcgtgactacaccacgtgagcacgacgatttctcaccatgcaagtttgcaatatatatggacatctatatagtccaggatagtcctctcattgtattcacaatttcagatccaacgacgacccttggatccgcacatgaaaccccgcgagcatattggcagcgcccgcgctaggtattccttattatccccatctcggtggtccgtcggtgggcgccgatcgacgcggcgcggcgccgcgacttgctgttgatgtctgccgctgtttggttccagcggactgcagtggcagtgcagggcatcatcatcacaattcacacctgggccctcacgcacacgatcatcgagtcgatcgagcgagcgaactcccaaacattatcgacattagtgctgcaagatgggccgtgccgtgctggcccggcacgagcccgtcgtgcttcgggcttcaaagtgtcgggccgggccagcacgaattacttccgggccgggccttatcgtgactatagactaaaatagaggcccagcacggcactaaagcccgccgtgcttgaatcgggccgtgtttttttaggcccggcacgcaattcctcgctgcgatttaattcctgacgcttcgattcctggcggcgattcaattccggcgcggagactggcgcttcgaattcgattcctggctgcgcggcgcggagactggaactgaaacggcgtcgtggtcctagagactggaagtctggaacagtggaactagaggtggcgggctggcggcgtccagaaacggcaaaggcgtcgggctgccggccacccgttgcaacggcccttccggtcgccgggtcggtgcggtgtacgtacaaaaggacggcgcagcagccatatgtgcatgccaacagtgccccgtgcgttggaggtgaccaggacgtctgggctcgtgctcgtggtgacttggagattgtgacggggcggcggcgcggcgccctggaaggctggaactggagaatggtgccgaccaaacctaaaggcctaacgagtgcaactgcgaacctgggctgaccgtgccattttcgtgccgggctggcccgagcacggcccattatcccgtgccgtgtcatttgggtcatcgggccgaaacgataagcacggcccagcacgctaatcgtgctgtgctggcccggtttcttctctttcgtgctgggccgggcttcgtgtttttaaattcgtgccgggcccgtgctggcccgatgggcaccgcccaaactgtcaggaccaatcgacatggaggcaatgacacgcgcctttgagtttgagcacgcggagactggaagaaggttcagcgcatgcatgcagctgagttcagacgccacgccacgccacatgttcatccgaacatttcacgcaaattaaagataggaacaaggttcagcgcgcgttattacggcgggcggaaatgtccgtagggacgatagctcgttaaagtcccgagtcagctgatgcgaatcggtcggcgtgtagtagtgatgcagctgggctgggctcccagaaatgggaagttgacgtagcgaaacctgctctgctccctgggcactccgagaggccgcgacgtggcgggcaacatgcagcacgggcctccacgccgctccacgtaccccgccccgcgccaaaaccaaccccccgcgcagccacgccagcctccgatagctcggcaaccaacagagccctcaataccgcccatgaccctcccgcggccccgccacgccatgcccccagcccaacccaacccaacccaacggcgggcgcgcgtcgacgccgtccgtcccctactccgaaactcccctcccgcgcgcgacctataaaaccccgcgcaacggaaggtgaggtagtgatagtgagcgacgccacgggacaggcatggcgagccgcgagcggcagcacacccgcagctacgactacgactacgagcacctcgtgctcgacccggcgtctctgggcgtgccgtgggccgacccggccgccgtggagatcccgccgcagctcctcgccgcgctcggggagtacctctccggctccgcggcccgcggggacgtcgaggcggaggcggacgacgagttcatgatgcacgagttcaaggtgcggcggtgcgcgcgcgcgcggagccacgactggacggcgtgcccctacgcgcacccgggcgaggccgcgcggcgccgggacccgcgccgcgtcgcctacgcgggggagccgtgcccggacttccggcgccgcccgggcgccgccaccgccgcgtgcccgcgcggggccgcctgcccgctcgcgcacggcaccttcgagctgtggctccacccgtcccgctaccgcacccgcccctgccgcgcgggcgccgcctgccgccgccgcgtctgcttcttcgcgcacgccgcggccgagctccgcgccgccgcgaatcccaaggacgggtgctctccgctctcgctctcgctctcgccaaagtccaccctgcaggcggcgctctgggagtcgccgccggtgtcccccgtggagggccgcaggtgggtcgacgagccgtcggaggacgccgacgccgacgccgagatggaggagctgatgctcgcgatgcgggagctcagcttcaggaaggcccaggcgtcgccagcgccggttctgcctgccgtcacagaggacgacgggccggacttggggtgggtgtcggagctggtgatgtaggcgaggcatatgccagcgcctgcccggtgccgacgcccgaaattaatcaaagccaagacgtggacgccgccatctccagaggcgcctctcgccgtttggaacagcttcattaagcaatgtttatttttagcatttccatgaattgcatcattcttctgtggatagaccaaacatggtgcaagtattaatactgcaatctgtaagcgtggcgtgtgtgccccccttctctttttttttccggagaccatggcctcactcaacatgctactgtcgtccatggttttcgttcgatcgtgttactactaccatacaaacaaaaaagaaaacagggcttccaatatgttccaatggatctgtatattgtatataatctcttgaggcaacggagccacgaaagcgaagcgccgccggattgcagcaaaacaacgtgtctcaaacgacggtggtgcgtggctggctgcacaagttgcccaggcttttcgctgggttcctcgcccccacgccacgcgaccacgggtttaggattagggctccccctgttcggctgccaagttgggctctcgagttgcggtttttgcaaatctcgctgcgaggcagagtggtttctccttgatgcgacatcacaagaaagtaggaggcggaaagctcgcgactcatattacatccacggtggtaatggctcgccatttcttcataaaatggtagagcactagataaatgtttaaaaataactataaatgggtctttaaatcttatagtgtaaaatttagagtctgtcacctttacttacatcacctactttgagcactttttttcatcgacaatattcttcctcttttctgtaatttctcatcacgattgttgaccttgaacggatccgccttatctccttcaacaaaggttcttgagctttccaaaattcatgattgggttttttttccataacatgggagccgcatggccttccatttctaacacctaccatctgtcgtcttcaagctcttagctaggtggctcacaacgttcatccacctatctgagtttcttgccaacacttcaacttcagggttctggtcttgccatttcaagttttcagctctgtcctggtggacagcgttgatcggcaagctaaggcagaatcggt

SEQ ID NO: 60031 - DNA, 1832 bp, Zea Mays
gggcgcgcgtcgacgccgtccgtcccctactccgaaactcccctcccgcgcgcgacctataaaaccccgcgcaacggaaggtgaggtagtgatagtgagcgacgccacgggacaggcatggcgagccgcgagcggcagcacacccgcagctacgactacgactacgagcacctcgtgctcgacccggcgtctctgggcgtgccgtgggccgacccggccgccgtggagatcccgccgcagctcctcgccgcgctcggggagtacctctccggctccgcggcccgcggggacgtcgaggcggaggcggacgacgagttcatgatgcacgagttcaaggtgcggcggtgcgcgcgcgcgcggagccacgactggacggcgtgcccctacgcgcacccgggcgaggccgcgcggcgccgggacccgcgccgcgtcgcctacgcgggggagccgtgcccggacttccggcgccgcccgggcgccgccaccgccgcgtgcccgcgcggggccgcctgcccgctcgcgcacggcaccttcgagctgtggctccacccgtcccgctaccgcacccgcccctgccgcgcgggcgccgcctgccgccgccgcgtctgcttcttcgcgcacgccgcggccgagctccgcgccgccgcgaatcccaaggacgggtgctctccgctctcgctctcgctctcgccaaagtccaccctgcaggcggcgctctgggagtcgccgccggtgtcccccgtggagggccgcaggtgggtcgacgagccgtcggaggacgccgacgccgacgccgagatggaggagctgatgctcgcgatgcgggagctcagcttcaggaaggcccaggcgtcgccagcgccggttctgcctgccgtcacagaggacgacgggccggacttggggtgggtgtcggagctggtgatgtaggcgaggcatatgccagcgcctgcccggtgccgacgcccgaaattaatcaaagccaagacgtggacgccgccatctccagaggcgcctctcgccgtttggaacagcttcattaagcaatgtttatttttagcatttccatgaattgcatcattcttctgtggatagaccaaacatggtgcaagtattaatactgcaatctgtaagcgtggcgtgtgtgccccccttctctttttttttccggagaccatggcctcactcaacatgctactgtcgtccatggttttcgttcgatcgtgttactactaccatacaaacaaaaaagaaaacagggcttccaatatgttccaatggatctgtatattgtatataatctcttgaggcaacggagccacgaaagcgaagcgccgccggattgcagcaaaacaacgtgtctcaaacgacggtggtgcgtggctggctgcacaagttgcccaggcttttcgctgggttcctcgcccccacgccacgcgaccacgggtttaggattagggctccccctgttcggctgccaagttgggctctcgagttgcggtttttgcaaatctcgctgcgaggcagagtggtttctccttgatgcgacatcacaagaaagtaggaggcggaaagctcgcgactcatattacatccacggtgaggtggggagcttcgctcaagctgaaggatcaatggaagctggaggaggttttggacactatgaaaagctggctgcgttgctctcagtctagcgtgggagaggtctcggatattctttctatactaggtatatacccgtgcgttgctacggaatcaacacattttattaacatacattgagattaatacattttattaagatacattgagattgtgaatacaaatgtgaa

SEQ ID NO: 60032 - DNA, 1851 bp, Zea Mays
cgacgccgtccgtcccctactccgaaactcccctcccgcgcgcgacctataaaaccccgcgcaacggaaggtgaggtagtgatagtgagcgacgccacgggacaggcatggcgagccgcgagcggcagcacacccgcagctacgactacgactacgagcacctcgtgctcgacccggcgtctctgggcgtgccgtgggccgacccggccgccgtggagatcccgccgcagctcctcgccgcgctcggggagtacctctccggctccgcggcccgcggggacgtcgaggcggaggcggacgacgagttcatgatgcacgagttcaaggtgcggcggtgcgcgcgcgcgcggagccacgactggacggcgtgcccctacgcgcacccgggcgaggccgcgcggcgccgggacccgcgccgcgtcgcctacgcgggggagccgtgcccggacttccggcgccgcccgggcgccgccaccgccgcgtgcccgcgcggggccgcctgcccgctcgcgcacggcaccttcgagctgtggctccacccgtcccgctaccgcacccgcccctgccgcgcgggcgccgcctgccgccgccgcgtctgcttcttcgcgcacgccgcggccgagctccgcgccgccgcgaatcccaaggacgggtgctctccgctctcgctctcgctctcgccaaagtccaccctgcaggcggcgctctgggagtcgccgccggtgtcccccgtggagggccgcaggtgggtcgacgagccgtcggaggacgccgacgccgacgccgagatggaggagctgatgctcgcgatgcgggagctcagcttcaggaaggcccaggcgtcgccagcgccggttctgcctgccgtcacagaggacgacgggccggacttggggtgggtgtcggagctggtgatgtaggcgaggcatatgccagcgcctgcccggtgccgacgcccgaaattaatcaaagccaagacgtggacgccgccatctccagaggcgcctctcgccgtttggaacagcttcattaagcaatgtttatttttagcatttccatgaattgcatcattcttctgtggatagaccaaacatggtgcaagtattaatactgcaatctgtaagcgtggcgtgtgtgccccccttctctttttttttccggagaccatggcctcactcaacatgctactgtcgtccatggttttcgttcgatcgtgttactactaccatacaaacaaaaaagaaaacagggcttccaatatgttccaatggatctgtatattgtatataatctcttgaggcaacggagccacgaaagcgaagcgccgccggattgcagcaaaacaacgtgtctcaaacgacggtggtgcgtggctggctgcacaagttgcccaggcttttcgctgggttcctcgcccccacgccacgcgaccacgggtttaggattagggctccccctgttcggctgccaagttgggctctcgagttgcggtttttgcaaatctcgctgcgaggcagagtggtttctccttgatgcgacatcacaagaaagtaggaggcggaaagctcgcgactcatattacatccacggtggtaatggctcgccatttcttcataaaatgaggtggggagcttcgctcaagctgaaggatcaatggaagctggaggaggttttggacactatgaaaagctggctgcgttgctctcagtctagcgtgggagaggtctcggatattctttctatactaggtatatacccgtgcgttgctacggaatcaacacattttattaacatacattgagattaatacattttattaagatacattgagattgtgaatacaaatgtgaa

SEQ ID NO: 60033 - DNA, 1963 bp, Zea Mays
gcaaaagcacactaagccatgactgatcagagctaaacataggggaaagcagatctgtcgcaaactcgcaacccaatacgccatctattcccgtcgctgtcgtccacctgtttttttcgttgatccgcagccgccccttccttctcccatttcggcgtctcgaagccagtagattattcatttctcgatccacaaatccctccacactctccatcccgaaccctgaaatcgaggagcgcgggaggacgccgcaaagcgcgttggctcttagggtttgccggtagggttgggaggctccgatccgggcgcgcaggcatgaggattcgggagctccgagatgggctggaggtggaggacgacgagcgggaggagcagggatcggaggttggcagtggttacggggaggttgtcgcggttgtgcgactgcgggcgaagcgcgctatcgttggtgccggcgcgagggtcctgttctatccgacgcttctctacaacgtgctccgcaaccggttcgatggcgagttccgctggtgggatcgcatcgacaaggtgctgttccgttctctagcgatgttctgcgcctgaagcaacttggtgtaagaggagttgttacactcaatgaaccctatgaaactctggttccgacatccttataccaggctcatggaatcaatcatctcaaaattcctacaagagactacctgtttgccccatccctggagcatatttgtcgtgcagtggattttatccattgtaatgaagtgcaaggtggtagcacctatgtccactgtaaggctggaaggggacgaagcaccactatagttttgtgttttttgatcaagtacagaaatatgactcctgaagtagctttggatcatgcgaggtctgtgaggcctagagtgcttttagcgcccgcacagtggcaggccgttaaaatgttcagcaagctcaacgctagatgcctttccatacagagctcgaacccaacttgctcagcactatcttatgaggaatccagtgaactgtcaagcacgctgagcagcagatgccttcggattcagagctcaaatgaggtctcgataacttgtgaagaatccaatgaagcatcctttggagaccctgaagttgatggctacaccaccactgagtttgacaccgagcattttgttttacctcgttgtcgaagtatgctgtccagaccaacgagccccactgggtgtagtgatgcagtcttcataaccgaagaagatctagagggctatgagacctacgccgatgacgggaaggacgttgtcgaagtgcaagtagtggttcgccacaagcccatcatgaggaaactctcctgcttccttgggtccttgaagcttaccggcaattgcgagccaccacctggccgtttgaccgaggttcgagcctgctaggtggatcagctatggtttccgcatctgtttttcgctctttgtacatcggcagagtgtaattaccggcataagtttgcacagcctgcggaattccctcgggacagaactgtatgttgtggcatgtgggtggcgagataaatttggctatcgggagccgggagacctgtgggttgttgcagggagtgcgagagatctgtgtgcatatctggtatgaatgttttccttgtaataaaaagatgtttccttcttgtaataaaaaagatgtactccctccattaataaagctgcacttcccccccccccccccaaaaactaaacaacttgtaatttaaacaatactgccatttatagtacaacataagtgttactgtattaaagtaaccataatatgctctctttagaactcttacctaaatcataaaccgttgtggctttttaagatacactccttccgtcatctcaaaatataattcgtttatactaatatacattcattacttaatggtgtatttgtttctctcctaaattatataagttggattata

SEQ ID NO: 60034 - DNA, 1254 bp, Zea Mays
gtcagttcagctcagggaagtagtggtagtgatcagctatggtaatgaagtgcaaggtggtagcacctatgtccactgtaaggctggaaggggacgaagcaccactatagttttgtgttttttgatcaagtacagaaatatgactcctgaagtagctttggatcatgcgaggtctgtgaggcctagagtgcttttagcgcccgcacagtggcaggccgttaaaatgttcagcaagctcaacgctagatgcctttccatacagagctcgaacccaacttgctcagcactatcttatgaggaatccagtgaactgtcaagcacgctgagcagcagatgccttcggattcagagctcaaatgaggtctcgataacttgtgaagaatccaatgaagcatcctttggagaccctgaagttgatggctacaccaccactgagtttgacaccgagcattttgttttacctcgttgtcgaagtatgctgtccagaccaacgagccccactgggtgtagtgatgcagtcttcataaccgaagaagatctagagggctatgagacctacgccgatgacgggaaggacgttgtcgaagtgcaagtagtggttcgccacaagcccatcatgaggaaactctcctgcttccttgggtccttgaagcttaccggcaattgcgagccaccacctggccgtttgaccgaggttcgagcctgctaggtggatcagctatggtttccgcatctgtttttcgctctttgtacatcggcagagtgtaattaccggcataagtttgcacagcctgcggaattccctcgggacagaactgtatgttgtggcatgtgggtggcgagataaatttggctatcgggagccgggagacctgtgggttgttgcagggagtgcgagagatctgtgtgcatatctggtatgaatgttttccttgtaataaaaagatgtttccttcttgtaataaaaaagatgtactccctccattaataaagctgcacttcccccccccccccccaaaaactaaacaacttgtaatttaaacaatactgccatttatagtacaacataagtgttactgtattaaagtaaccataatatgctctctttagaactcttacctaaatcataaaccgttgtggctttttaagatacactccttccgtcatctcaaaatataattcgtttatactaatatacattcattacttaatggtgtatttgtttctctcctaaattatataagttggattata

SEQ ID NO: 60035 - DNA, 1582 bp, Zea Mays
gcgctccctccctcgtttgctttgcttgccttcttcagctggcctggctagctaggcgagggcattcctcgccagtgttctcgtcaagagttctcctcggctagctggtttgtcactgcacctggtcagagaagaccaattaagtcccatggaggacagctccggagagaggggtcctccttccaccccgcagctgctaaacctcatccgagacgagagagaatggacggtgaccagagaggtagtggaagacggaggagcggggtcgacatcagcaacagcaacggccgcaagcccagaccaccccgaggaggacgactactccaagcttgagctgaggctctgcctccccggagcccaagacgacgagagaacgccgccgccgccgggagagaaggggacctgcacggcgctctccctcggctctggttgcttcccgtcgcatccgaagctcgccgccagcgctggtgctagtgctactgctgccacctgggcaaagagagggttcttggcaaccgttggtgccaaagcacaaggttattgtaggcaggaggaggacagcgaagggtgtgggaacgagctaacattgggaggtgaaaacatggcaggtgagacgaagaaagggtgctgctgtcccccatcgtcgtcgcatgactcggatgccgggcctgctgtgcacagaggtgatgttcttccggtggttggttggcctccggtacggtccttcaggagaaacctggcaaatgccagctcgtctaagcaatccctcgagcagcaacaacaaaacgatgatgaagcctcctgtgacaaggcgaagcagacctgcaagagaagcccgctcatcaaaataaacatggacggcatccccattgggaggaaaataaacctctcagcgtacgacagctaccagaagctttcgtctgccgtccaagatttgttctgtggcttccttgatgcagcccagaaggatgaatctagagggcgaggagcagaagagaaaatgttctcagggttgttggatggaactggtgagtacactttagtttgtgaagacagtgaaggaggcaggacactagttgggcacctaccatggaatgtatttgtttctaccgctaagaggctgagggtcatggaaagctctgaacttcctcatggactgattaaaactgcctccgagagggctgatgactgatatgaggccaagtcgcgcccagccttcgaatcatgcaattgcaagctatgtcaatcattggcttcttcggatggccctttttggcttgtagagagaaatctaataagataatgttagcatatcgcagatgccctgaatgcactgtgcaccttctgtaattttcctcgctctgtttcagatgtggtgctgatcagtgctattccacatggtctagtatgtctacgtttactaaaggtaaagaatgtgcttttagtgtgatgtgtggtggttttcagctaactacactgagacacaaaatgcatacgtaaaaacattaggaatcggacagcagaccaaaaaaaaaaactactaccatttctttttgtgcaacagatgtaaatgttcactgcc

SEQ ID NO: 60036 - DNA, 1579 bp, Zea Mays
gcgctccctccctcgtttgctttgcttgccttcttcagctggcctggctagctaggcgagggcattcctcgccagtgttctcgtcaagagttctcctcggctagctggtttgtcactgcacctggtcagagaccaattaagtcccatggaggacagctccggagagaggggtcctccttccaccccgcagctgctaaacctcatccgagacgagagagaatggacggtgaccagagaggtagtggaagacggaggagcggggtcgacatcagcaacagcaacggccgcaagcccagaccaccccgaggaggacgactactccaagcttgagctgaggctctgcctccccggagcccaagacgacgagagaacgccgccgccgccgggagagaaggggacctgcacggcgctctccctcggctctggttgcttcccgtcgcatccgaagctcgccgccagcgctggtgctagtgctactgctgccacctgggcaaagagagggttcttggcaaccgttggtgccaaagcacaaggttattgtaggcaggaggaggacagcgaagggtgtgggaacgagctaacattgggaggtgaaaacatggcaggtgagacgaagaaagggtgctgctgtcccccatcgtcgtcgcatgactcggatgccgggcctgctgtgcacagaggtgatgttcttccggtggttggttggcctccggtacggtccttcaggagaaacctggcaaatgccagctcgtctaagcaatccctcgagcagcaacaacaaaacgatgatgaagcctcctgtgacaaggcgaagcagacctgcaagagaagcccgctcatcaaaataaacatggacggcatccccattgggaggaaaataaacctctcagcgtacgacagctaccagaagctttcgtctgccgtccaagatttgttctgtggcttccttgatgcagcccagaaggatgaatctagagggcgaggagcagaagagaaaatgttctcagggttgttggatggaactggtgagtacactttagtttgtgaagacagtgaaggaggcaggacactagttgggcacctaccatggaatgtatttgtttctaccgctaagaggctgagggtcatggaaagctctgaacttcctcatggactgattaaaactgcctccgagagggctgatgactgatatgaggccaagtcgcgcccagccttcgaatcatgcaattgcaagctatgtcaatcattggcttcttcggatggccctttttggcttgtagagagaaatctaataagataatgttagcatatcgcagatgccctgaatgcactgtgcaccttctgtaattttcctcgctctgtttcagatgtggtgctgatcagtgctattccacatggtctagtatgtctacgtttactaaaggtaaagaatgtgcttttagtgtgatgtgtggtggttttcagctaactacactgagacacaaaatgcatacgtaaaaacattaggaatcggacagcagaccaaaaaaaaaaactactaccatttctttttgtgcaacagatgtaaatgttcactgcc

SEQ ID NO: 60037 - DNA, 1480 bp, Zea Mays
gactcggctaaaccctttgctttctcctgcctctcctagaagaccaattaagtcccatggaggacagctccggagagaggggtcctccttccaccccgcagctgctaaacctcatccgagacgagagagaatggacggtgaccagagaggtagtggaagacggaggagcggggtcgacatcagcaacagcaacggccgcaagcccagaccaccccgaggaggacgactactccaagcttgagctgaggctctgcctccccggagcccaagacgacgagagaacgccgccgccgccgggagagaaggggacctgcacggcgctctccctcggctctggttgcttcccgtcgcatccgaagctcgccgccagcgctggtgctagtgctactgctgccacctgggcaaagagagggttcttggcaaccgttggtgccaaagcacaaggcaggaggaggacagcgaagggtgtgggaacgagctaacattgggaggtgaaaacatggcaggtgagacgaagaaagggtgctgctgtcccccatcgtcgtcgcatgactcggatgccgggcctgctgtgcacagaggtgatgttcttccggtggttggttggcctccggtacggtccttcaggagaaacctggcaaatgccagctcgtctaagcaatccctcgagcagcaacaacaaaacgatgatgaagcctcctgtgacaaggcgaagcagacctgcaagagaagcccgctcatcaaaataaacatggacggcatccccattgggaggaaaataaacctctcagcgtacgacagctaccagaagctttcgtctgccgtccaagatttgttctgtggcttccttgatgcagcccagaaggatgaatctagagggcgaggagcagaagagaaaatgttctcagggttgttggatggaactggtgagtacactttagtttgtgaagacagtgaaggaggcaggacactagttgggcacctaccatggaatgtatttgtttctaccgctaagaggctgagggtcatggaaagctctgaacttcctcatggactgattaaaactgcctccgagagggctgatgactgatatgaggccaagtcgcgcccagccttcgaatcatgcaattgcaagctatgtcaatcattggcttcttcggatggccctttttggcttgtagagagaaatctaataagataatgttagcatatcgcagatgccctgaatgcactgtgcaccttctgtaattttcctcgctctgtttcagatgtggtgctgatcagtgctattccacatggtctagtatgtctacgtttactaaaggtaaagaatgtgcttttagtgtgatgtgtggtggttttcagctaactacactgagacacaaaatgcatacgtaaaaacattaggaatcggacagcagaccaaaaaaaaaaactactaccatttctttttgtgcaacagatgtaaatgttcactgcc

SEQ ID NO: 60038 - DNA, 2139 bp, Zea Mays
tgccgccgcacgcagagagagctcattgtgcagataagggggctaggctacccagcagcacccacgaagccagtcgatcggcgtcgtggcctcccagaaagaaaacgcgtttgccggatcggatcttggccggacgcggccgcggcggccagccagccagccatccgcaaaagccgccgcgtccggggtgggcgccgccggccctcggccgctcgcggcgatcgcctcgcctcgccgcctcgactcttttgagctaccagcaccaagccacgccggccgccatggggcgcgcgatgaggtggctcaagaaggtgctcaccggcagcagcaagaaggaagcgtcggacggggttcgcaaggcgcgcgatgccgcgtgcgccggcgccggcggtggcggtgaccacgggctgggcccgccggcatcggagaagaggcggtggagcttcgccaagccgaggagcagcgtgtctggctccgcccggaggccctccgtcgccgccggggagctgtcgcaggtgcgcccgtgcagctgcggccttgagcgcgaggtggaggccgccgccgtcatccagaaggccttcagaggctacttggctcggaaggcgctccgcgccctcaagtcgctcgtgaagctgcaagccctggtgcgaggctacctcgtgaggaagcagacggccatgacgctgcgcaggctgcaggccctcatgcggctccaggccaacacggcggcgtcccggagatccactgaacaagtgaggacattgatgagcactaaaccaatcacgttttagattttaatttttcttcacttctgcattttgcacgcacaggagcgtatcgttgcgcgggtgaggccactggccgtgcctgctgctgcggtgcaccgccggcggctgtccgacggcggggacgccgctggcggcttcgaccgcagcccgaggatcgtggagatggacacgtgcgagctccgctgccggtcgtcccggatcacgagccggtccgccggcggcgacccggcgggcgactcaccgctcctcctgcgctgccacgagccggcgtggtgtctccaggggcgagagctcgagcccccgcctccgcctccgcctccgcaccccaagacgacgcacaacacgccccgcctcggcgcgttcgcgggctacctcggctcgccggcgaagcgcgcggccgcgtgccgggactccgggagctgcccgcggtacatggcgggcacggcgtcgtccgtggcgcgcgcccggtggcagagcgcgcccaggcagcggcgcggcgagcagcagcagcaggcgcccgcgggggatgcagacggggcgaggcccagccccagcgtcggccgcggcgggtcgaggatgcacgcgcggccgcaggagctgcaggcgccggacagcttcagcctcaagagctcggaggccagccgcgtggaggtggagggctcggagctgagcgacgaggtcaccagggactactacctggaccggctctggtgattccgcctggtgtagaagaggaggaggcttaacatttcggtacatagtgaaatgtcatgactaagctacgactaatctcaactaccttggaggtcgagtatcagagtaggtatggtatcatagagaaggaaataaatggtgttctactgctacctgtgaccatttgaaaaagaaaatggaaaagaaaacaactgcctcacctagtagtgcagctgcaagctggttctgagttctgacaccgtatagaatgcagcttcgacgccgatacgtagaaccagatgtcgacgtcacctgtggctagtcctacgtggaatccgatccgacagtgctggtgtaaatggcatggagatcagaaaatgaaggcttggaggttaaagacaagcaaatgttgtctggtacagacagagccgtccttctcccaacttcattgcaccatgttgccgtgctctgagcctctgggtgaagtattactaccactacttatactgggagtgggtactagagagcttggcctgcgcgcgcgggtgcagctttgtgtttgtgtaacgggcgcatgttgagcgttggcatgacattggcttgctgtggctggcgagagctcaatgcctctcttcgcacgtctggatttggcaagttc

SEQ ID NO: 60039 - DNA, 2400 bp, Zea Mays
cctcccctgagcactggccactctgatcgagtctgtaggctgtggttccctgctgccactactgtactacccactcgttcttctcccttggcggctacgcttctgcattcaactctgccggcctctgtgagacctctttccttcgctcccatgtttcttggctacagcctacaggcctctgtaaaagattctgccctttctcttccgctgaagcttcttcccctgccttgttcgttcaagtttcctgtcctgctgcgctagcgctactacaggtttcaaaatattttgtttcgtcgaccaaccaccttttgctcgtctgcatctgcgcagtgtagctttcaaagaaatcccgggttgatctccgcgagttcccccactcccccccccccccccccgctgtaggagtacttgtgtttctgtaggctcgttgcttcccaaccacttcctttccgggtttcccgcgtccatccaacgccctcgcttcgccttttcacgcattcccccgctgctgcagctaccagcaccaagccacgccggccgccatggggcgcgcgatgaggtggctcaagaaggtgctcaccggcagcagcaagaaggaagcgtcggacggggttcgcaaggcgcgcgatgccgcgtgcgccggcgccggcggtggcggtgaccacgggctgggcccgccggcatcggagaagaggcggtggagcttcgccaagccgaggagcagcgtgtctggctccgcccggaggccctccgtcgccgccggggagctgtcgcaggtgcgcccgtgcagctgcggccttgagcgcgaggtggaggccgccgccgtcatccagaaggccttcagaggctacttggctcggaaggcgctccgcgccctcaagtcgctcgtgaagctgcaagccctggtgcgaggctacctcgtgaggaagcagacggccatgacgctgcgcaggctgcaggccctcatgcggctccaggccaacacggcggcgtcccggagatccactgaacaagtgaggacattgatgagcactaaaccaatcacgttttagattttaatttttcttcacttctgcattttgcacgcacaggagcgtatcgttgcgcgggtgaggccactggccgtgcctgctgctgcggtgcaccgccggcggctgtccgacggcggggacgccgctggcggcttcgaccgcagcccgaggatcgtggagatggacacgtgcgagctccgctgccggtcgtcccggatcacgagccggtccgccggcggcgacccggcgggcgactcaccgctcctcctgcgctgccacgagccggcgtggtgtctccaggggcgagagctcgagcccccgcctccgcctccgcctccgcaccccaagacgacgcacaacacgccccgcctcggcgcgttcgcgggctacctcggctcgccggcgaagcgcgcggccgcgtgccgggactccgggagctgcccgcggtacatggcgggcacggcgtcgtccgtggcgcgcgcccggtggcagagcgcgcccaggcagcggcgcggcgagcagcagcagcaggcgcccgcgggggatgcagacggggcgaggcccagccccagcgtcggccgcggcgggtcgaggatgcacgcgcggccgcaggagctgcaggcgccggacagcttcagcctcaagagctcggaggccagccgcgtggaggtggagggctcggagctgagcgacgaggtcaccagggactactacctggaccggctctggtgattccgcctggtgtagaagaggaggaggcttaacatttcggtacatagtgaaatgtcatgactaagctacgactaatctcaactaccttggaggtcgagtatcagagtaggtatggtatcatagagaaggaaataaatggtgttctactgctacctgtgaccatttgaaaaagaaaatggaaaagaaaacaactgcctcacctagtagtgcagctgcaagctggttctgagttctgacaccgtatagaatgcagcttcgacgccgatacgtagaaccagatgtcgacgtcacctgtggctagtcctacgtggaatccgatccgacagtgctggtgtaaatggcatggagatcagaaaatgaaggcttggaggttaaagacaagcaaatgttgtctggtacagacagagccgtccttctcccaacttcattgcaccatgttgccgtgctctgagcctctgggtgaagtattactaccactacttatactgggagtgggtactagagagcttggcctgcgcgcgcgggtgcagctttgtgtttgtgtaacgggcgcatgttgagcgttggcatgacattggcttgctgtggctggcgagagctcaatgcctctcttcgcacgtctggatttggcaagttc

SEQ ID NO: 60040 - DNA, 727 bp, Zea Mays
tctttatcaacgcagcaaataagcaatgcaatgtgtggtcacagtctccagggagctggagaaaggtaattacacaagcaaatacttatcccaaagaatttccgtctcgccaagttatatcagggaaatttagacattgcgaccactattatatcataggacaaaaacactcgagtgtacatctctccttaaaacacaagctgccaagctctatctgataaagagtatcacacattatttattgcacagtagaggcacgcatgttcttggcctactgagcgacttgactaccgtatcatgtcagcctgcagatccaggttcagtacagagacgagaagggcgccgcgtttacgatcctcctgtgctggagtttctggcagcgtccttcttcttcatctcctcaaacttgtcgatcgccacctgcagctcgtccgtgcctcccacggctctcatggtgtagtagtagaccccgagcacgaaggccgacaggccccccagccaccaccaggttcctggtcttgggtgcaaggcttctgaatcccgccatcgttgaggtgtggaggggctcaggatatgtgctgcaggacctgggtgctcgttgacggagaagggcctgacgaagagctgggaagctggcgtagggggcggcggcggtagccgactagccgagtcgtcgccgcgcgcgcgagagagagggagagcacgcggggagaggagcaaagcgcac

SEQ ID NO: 60041 - DNA, 3680 bp, Zea Mays
aacagaatgcgttggtgctcgagtgtatgcaatgagcaacgcaacaaggttaatcgtgttcgtataatttcttggttagttggtttccgggaaaaaaagaagcaggacggagaaaaaaaaaccggcatcactcttgtagtcttgtggcccctactagctaacggtaacagtgacggggggcgcgagttcaggaagaagagcgagtcagcgagaggcaattccgctgccgcaattcaacacgcgaggctaaaaacaattcgaaacccccgacctacgccgagtcgccgagaaaacaacagtgctccggcgcttagagaagagcgaaaggcgagcgcgcagcacagcacggctcccgtgggccgtggcggaggcaaaaaccccgacccgcattaccccgaaaccctccgattcggcccggggcgagctcgaatccgtgcaacctcgccgccgccgggctcgatctgagccagggctaccgcgcgccggcgaggaatgaggagcgtgaacggcgaggtcgaggggacccacgaccacgaagctaatcggcgtggtcagctgatcgaatggatgaacgccttactcccggaattcagtttgcctccggattcatcggatgaagagctacgagagctgctcagtgacggcgtggtcctgtgccgtgttgcgaacacactcatcccgggggttcttgagggatcctgggacggttatgcaccgtcggatcaacggttgggcaatctgaacaaattcctctcagtgattgctgatatggggctgccaggtttcagtgtgaaagatcttgatgagggatcaatgtctcctgtagtggaatgtctcttggttttgagagacagtgtggatcctagattaggtgacgatattccaccagatgttaccagaactcctttgagaaaacaatggggagttccggaaatggacaagcctcaagttcatggtgcagcactagggaaaagatcccctgcagaggacaagagaaatggcgttgcagatcccaaagcccatcagaaaacttctgtcttttctggacaaaagttttgtgatgttttccaattaaaacacggatcatattctggacctgctgctgccaagatttcagagatgatgcactctaatagcttagataatgcaccaacacagtcacttattagtgttgtcaatggcattttggatgaaagcatagaaaggaaaaagggagaaataccacatcgtgtagtttacttactgcggaaagtcgttcaagagattgagcgccgtctctatattcaagcagaacacataagaagtcaaaatgttatcatgaagagaagagaacagaagtactgttcaaaaattaaagtacttgaaatgttggtaaatggcacaaatgaagaaaaccagatggcaataaacaggcttcagatagtcaagaatgagaagtcaaaaatcgaagagaggagaaaacttagtgagcaagatgttcatcgattgatgagagagaaagaacattctgaaaacatcatagcaaacctaaagaaagatatagaagccatgaatagattgcatgaacagcaacttgagcaaactgaaagaaaggcaaaggaaatggaggagcaactaaccaccaaagtaaaagaagtagagtatctcttgctacaatcgaagaagaaagttgaagaagttgagactgcttccaggctaaaatcacagttatgggataagaaagaggacaattttcagagtcacatggataatcaacaactaattatcaaggacataagaatattgtcgcgatcatgtgaaaatgatatgtatgcacttcaaatgcagtggagaaatgagatctctaacttaggatctgggttaaaatgtttggttgatgctgctgaaaattatcataaagtcttggcggagaaccaaaagttatttaatgaagtgcaagaactaaaaggtaatataagagtatattgtcgtgtgaggccatttctttcgggtcaagacaaaaagtctactacaattgactacatgggggaaaatggtgagcttcttatatcaaatccatttaaacaagggaaggacggacacagattgttcaagtttaataaagtgtttagtccatttgcttctcaagctgaggttttttctgacatacaaccactaatccgatcagtcctggatggattcaacgtttgtatttttgcatatggtcagactggttctggcaaaacttacaccatgagtgggcctagcacatcgaagcaagattggggtgtcaattatcgggctttaaatgatttgtttgatatttcactaagtagaagaaatgccttctcatatgaggtgggtgtacagatggttgagatatacaatgaacaagttcgtgatttgctatcaaatgatattgcacagagaaggcttgggatttggagcacttctcaacccaatgggcttgttgttccagatgcaagcttgcactcagttaagtcgacatctgatgtattagacttgatggaaattgggcaagcaaatagagcagttggttcaacagcactaaatgagcgaagtagtcggtcacacagaatggatctacctcgaggggttgtttgcatcttattgatcttgctggtagtgagagggtggagaagtctgaagtaactggggatagattaaaagaagctcaatacatcaacaaatcactttctgcgttaggcgatgtgatttttgctctgtcacagaaaagtatccacgtgccttatagaaacagcaagctaacacaagttcttcaaagttctttaggtggacaagcaaaaactctaatgttcgttcaaataaatcctgatgttgagtcatattcagaaactataagcactttaaagtttgctgaaagggtgtctggagtagagttaggtgctgcaagaagcaacaaggagggaaaggatataaaagagctactggaacaggttgcgtctttgaaagacacaatttcacgcaaagatatggaaatagagcagctccaagtcatcaaagacaaagcaaaatccccaaatttattgttagatagaaatgggcctggcttgacaaagattacagtaaaccaacctagccaactattatcaggcgaacgaatgctcaagtctagtgacagagttctatcagatcctcctgataacagagattctaaccataatttgacggatactgctccagtgagcttagatgaagcagaatatgatggcaatgcatctgatgatggtttatcaggtgaagccgagaattacaattcagctgctgagatgacagcggaacggttgcatggaattccatcaagaataagcagattcactctcacaaaaaacgggcaaccatctatgtctagatcaaaatcaaaggatgctaagactccaagtaatgcaaaagctccatctagccagttaacaggaggttcttcagccagggggtctaaaagatggcagaagtaaagcacgatcatgttgctcgtgttgatgcacattgtaattgaaatgtgaatttgctgggtagctgtgttagaaagttaggcatttttagttttaatttaatccagaaaaacagtgcgatatatgtgatgacatgtatgtgcatgtgtgtataactactcgcataagcagtaaacaacaatgaaacatgcacaaatacgaagaaca

SEQ ID NO: 60042 - DNA, 3717 bp, Zea Mays
aacagaatgcgttggtgctcgagtgtatgcaatgagcaacgcaacaaggttaatcgtgttcgtataatttcttggttagttggtttccgggaaaaaaagaagcaggacggagaaaaaaaaaccggcatcactcttgtagtcttgtggcccctactagctaacggtaacagtgacggggggcgcgagttcaggaagaagagcgagtcagcgagaggcaattccgctgccgcaattcaacacgcgaggctaaaaacaattcgaaacccccgacctacgccgagtcgccgagaaaacaacagtgctccggcgcttagagaagagcgaaaggcgagcgcgcagcacagcacggctcccgtgggccgtggcggaggcaaaaaccccgacccgcattaccccgaaaccctccgattcggcccggggcgagctcgaatccgtgcaacctcgccgccgccgggctcgatctgagccagggctaccgcgcgccggcgaggaatgaggagcgtgaacggcgaggtcgaggggacccacgaccacgaagctaatcggcgtggtcagctgatcgaatggatgaacgccttactcccggaattcagtttgcctccggattcatcggatgaagagctacgagagctgctcagtgacggcgtggtcctgtgccgtgttgcgaacacactcatcccgggggttcttgagggatcctgggacggttatgcaccgtcggatcaacggttgggcaatctgaacaaattcctctcagtgattgctgatatggggctgccaggtttcagtgtgaaagatcttgatgagggatcaatgtctcctgtagtggaatgtctcttggttttgagagacagtgtggatcctagattaggtgacgatattccaccagatgttaccagaactcctttgagaaaacaatggggagttccggaaatggacaagcctcaagttcatggtgcagcactagggaaaagatcccctgcagaggacaagagaaatggcgttgcagatcccaaagcccatcagaaaacttctgtcttttctggacaaaagttttgtgatgttttccaattaaaacacggatcatattctggacctgctgctgccaagatttcagagatgatgcactctaatagcttagataatgcaccaacacagtcacttattagtgttgtcaatggcattttggatgaaagcatagaaaggaaaaagggagaaataccacatcgtgtagtttacttactgcggaaagtcgttcaagagattgagcgccgtctctatattcaagcagaacacataagaagtcaaaatgttatcatgaagagaagagaacagaagtactgttcaaaaattaaagtacttgaaatgttggtaaatggcacaaatgaagaaaaccagatggcaataaacaggcttcagatagtcaagaatgagaagtcaaaaatcgaagagaggagaaaacttagtgagcaagatgttcatcgattgatgagagagaaagaacattctgaaaacatcatagcaaacctaaagaaagatatagaagccatgaatagattgcatgaacagcaacttgagcaaactgaaagaaaggcaaaggaaatggaggagcaactaaccaccaaagtaaaagaagtagagtatctcttgctacaatcgaagaagaaagttgaagaagttgagactgcttccaggctaaaatcacagttatgggataagaaagaggacaattttcagagtcacatggataatcaacaactaattatcaaggacataagaatattgtcgcgatcatgtgaaaatgatatgtatgcacttcaaatgcagtggagaaatgagatctctaacttaggatctgggttaaaatgtttggttgatgctgctgaaaattatcataaagtcttggcggagaaccaaaagttatttaatgaagtgcaagaactaaaaggtaatataagagtatattgtcgtgtgaggccatttctttcgggtcaagacaaaaagtctactacaattgactacatgggggaaaatggtgagcttcttatatcaaatccatttaaacaagggaaggacggacacagattgttcaagtttaataaagtgtttagtccatttgcttctcaagctgaggttttttctgacatacaaccactaatccgatcagtcctggatggattcaacgtttgtatttttgcatatggtcagactggttctggcaaaacttacaccatgagtgggcctagcacatcgaagcaagattggggtgtcaattatcgggctttaaatgatttgtttgatatttcactaagtagaagaaatgccttctcatatgaggtgggtgtacagatggttgagatatacaatgaacaagttcgtgatttgctatcaaatgatattgcacagagaaggcttgggatttggagcacttctcaacccaatgggcttgttgttccagatgcaagcttgcactcagttaagtcgacatctgatgtattagacttgatggaaattgggcaagcaaatagagcagttggttcaacagcactaaatgagcgaagtagtcggtcacacagtattctaactgtacatgttcgagggttggatttgaagaatggatctacctcgaggggttgtttgcatcttattgatcttgctggtagtgagagggtggagaagtctgaagtaactggggatagattaaaagaagctcaatacatcaacaaatcactttctgcgttaggcgatgtgatttttgctctgtcacagaaaagtatccacgtgccttatagaaacagcaagctaacacaagttcttcaaagttctttaggtggacaagcaaaaactctaatgttcgttcaaataaatcctgatgttgagtcatattcagaaactataagcactttaaagtttgctgaaagggtgtctggagtagagttaggtgctgcaagaagcaacaaggagggaaaggatataaaagagctactggaacaggttgcgtctttgaaagacacaatttcacgcaaagatatggaaatagagcagctccaagtcatcaaagacaaagcaaaatccccaaatttattgttagatagaaatgggcctggcttgacaaagattacagtaaaccaacctagccaactattatcaggcgaacgaatgctcaagtctagtgacagagttctatcagatcctcctgataacagagattctaaccataatttgacggatactgctccagtgagcttagatgaagcagaatatgatggcaatgcatctgatgatggtttatcaggtgaagccgagaattacaattcagctgctgagatgacagcggaacggttgcatggaattccatcaagaataagcagattcactctcacaaaaaacgggcaaccatctatgtctagatcaaaatcaaaggatgctaagactccaagtaatgcaaaagctccatctagccagttaacaggaggttcttcagccagggggtctaaaagatggcagaagtaaagcacgatcatgttgctcgtgttgatgcacattgtaattgaaatgtgaatttgctgggtagctgtgttagaaagttaggcatttttagttttaatttaatccagaaaaacagtgcgatatatgtgatgacatgtatgtgcatgtgtgtataactactcgcataagcagtaaacaacaatgaaacatgcacaaatacgaagaaca

SEQ ID NO: 60043 - DNA, 3626 bp, Zea Mays
ggcgcgagttcaggaagaagagcgagtcagcgagaggcaattccgctgccgcaattcaacacgcgaggctaaaaacaattcgaaacccccgacctacgccgagtcgccgagaaaacaacagtgctccggcgcttagagaagagcgaaaggcgagcgcgcagcacagcacggctcccgtgggccgtggcggaggcaaaaaccccgacccgcattaccccgaaaccctccgattcggcccggggcgagctcgaatccgtgcaacctcgccgccgccgggctcgatctgagccagggctaccgcgcgccggcgaggaatgaggagcgtgaacggcgaggtcgaggggacccacgaccacgaagctaatcggcgtggtcagctgatcgaatggatgaacgccttactcccggaattcagtttgcctccggattcatcggatgaagagctacgagagctgctcagtgacggcgtggtcctgtgccgtgttgcgaacacactcatcccgggggttcttgagggatcctgggacggttatgcaccgtcggatcaacggttgggcaatctgaacaaattcctctcagtgattgctgatatggggctgccaggtttcagtgtgaaagatcttgatgagggatcaatgtctcctgtagtggaatgtctcttggttttgagagacagtgtggatcctagattaggtgacgatattccaccagatgttaccagaactcctttgagaaaacaatggggagttccggaaatggacaagcctcaagttcatggtgcagcactagggaaaagatcccctgcagaggacaagagaaatggcgttgcagatcccaaagcccatcagaaaacttctgtcttttctggacaaaagttttgtgatgttttccaattaaaacacggatcatattctggacctgctgctgccaagatttcagagatgatgcactctaatagcttagataatgcaccaacacagtcacttattagtgttgtcaatggcattttggatgaaagcatagaaaggaaaaagggagaaataccacattttacttactgcggaaagtcgttcaagagattgagcgccgtctctatattcaagcagaacacataagaagtcaaaatgttatcatgaagagaagagaacagaagtactgttcaaaaattaaagtacttgaaatgttggtaaatggcacaaatgaagaaaaccagatggcaataaacaggcttcagatagtcaagaatgagaagtcaaaaatcgaagagaggagaaaacttagtgagcaagatgttcatcgattgatgagagagaaagaacattctgaaaacatcatagcaaacctaaagaaagatatagaagccatgaatagattgcatgaacagcaacttgagcaaactgaaagaaaggcaaaggaaatggaggagcaactaaccaccaaagtaaaagaagtagagtatctcttgctacaatcgaagaagaaagttgaagaagttgagactgcttccaggctaaaatcacagttatgggataagaaagaggacaattttcagagtcacatggataatcaacaactaattatcaaggacataagaatattgtcgcgatcatgtgaaaatgatatgtatgcacttcaaatgcagtggagaaatgagatctctaacttaggatctgggttaaaatgtttggttgatgctgctgaaaattatcataaagtcttggcggagaaccaaaagttatttaatgaagtgcaagaactaaaaggtaatataagagtatattgtcgtgtgaggccatttctttcgggtcaagacaaaaagtctactacaattgactacatgggggaaaatggtgagcttcttatatcaaatccatttaaacaagggaaggacggacacagattgttcaagtttaataaagtgtttagtccatttgcttctcaagctgaggttttttctgacatacaaccactaatccgatcagtcctggatggattcaacgtttgtatttttgcatatggtcagactggttctggcaaaacttacaccatgagtgggcctagcacatcgaagcaagattggggtgtcaattatcgggctttaaatgatttgtttgatatttcactaagtagaagaaatgccttctcatatgaggtgggtgtacagatggttgagatatacaatgaacaagttcgtgatttgctatcaaatgatattgcacagagaaggcttgggatttggagcacttctcaacccaatgggcttgttgttccagatgcaagcttgcactcagttaagtcgacatctgatgtattagacttgatggaaattgggcaagcaaatagagcagttggttcaacagcactaaatgagcgaagtagtcggtcacacagtattctaactgtacatgttcgagggttggatttgaagaatggatctacctcgaggggttgtttgcatcttattgatcttgctggtagtgagagggtggagaagtctgaagtaactggggatagattaaaagaagctcaatacatcaacaaatcactttctgcgttaggcgatgtgatttttgctctgtcacagaaaagtatccacgtgccttatagaaacagcaagctaacacaagttcttcaaagttctttaggtaatcaagtatttatttactaccagtaaactagatcttaaatagatttatgtgaatattttaaatatttgtactaccttttgctttcttccaggtggacaagcaaaaactctaatgttcgttcaaataaatcctgatgttgagtcatattcagaaactataagcactttaaagtttgctgaaagggtgtctggagtagagttaggtgctgcaagaagcaacaaggagggaaaggatataaaagagctactggaacaggttgcgtctttgaaagacacaatttcacgcaaagatatggaaatagagcagctccaagtcatcaaagacaaagcaaaatccccaaatttattgttagatagaaatgggcctggcttgacaaagattacagtaaaccaacctagccaactattatcaggcgaacgaatgctcaagtctagtgacagagttctatcagatcctcctgataacagagattctaaccataatttgacggatactgctccagtgagcttagatgaagcagaatatgatggcaatgcatctgatgatggtttatcaggtgaagccgagaattacaattcagctgctgagatgacagcggaacggttgcatggaattccatcaagaataagcagattcactctcacaaaaaacgggcaaccatctatgtctagatcaaaatcaaaggatgctaagactccaagtaatgcaaaagctccatctagccagttaacaggaggttcttcagccagggggtctaaaagatggcagaagtaaagcacgatcatgttgctcgtgttgatgcacattgtaattgaaatgtgaatttgctgggtagctgtgttagaaagttaggcatttttagttttaatttaatccagaaaaacagtgcgatatatgtgatgacatgtatgtgcatgtgtgtataactactcgcataagcagtaaacaacaatgaaacatgcacaaatacgaagaaca

SEQ ID NO: 60044 - DNA, 3752 bp, Zea Mays
gcgagaggcaattccgctgccgcaattcaacacgcgaggctaaaaacaattcgaaacccccgacctacgccgagtcgccgagaaaacaacagtgctccggcgcttagagaagagcgaaaggcgagcgcgcagcacagcacggctcccgtgggccgtggcggaggcaaaaaccccgacccgcattaccccgaaaccctccgattcggcccggggcgagctcgaatccgtgcaacctcgccgccgccgggctcgatctgagccagggctaccgcgcgccggcgaggaatgaggagcgtgaacggcgaggtcgaggggacccacgaccacgaagctaatcggcgtggtcagctgatcgaatggatgaacgccttactcccggaattcagtttgcctccggattcatcggatgaagagctacgagagctgctcagtgacggcgtggtcctgtgccgtgttgcgaacacactcatcccgggggttcttgagggatcctgggacggttatgcaccgtcggatcaacggttgggcaatctgaacaaattcctctcagtgattgctgatatggggctgccaggtttcagtgtgaaagatcttgatgagggatcaatgtctcctgtagtggaatgtctcttggttttgagagacagtgtggatcctagattaggtgacgatattccaccagatgttaccagaactcctttgagaaaacaatggggagttccggaaatggacaagcctcaagttcatggtgcagcactagggaaaagatcccctgcagaggacaagagaaatggcgttgcagatcccaaagcccatcagaaaacttctgtcttttctggtagatttatttctcgcacaacctttcaagaatcatccagaaatgagatattcagattctgattacagctgacataattttaatccgttacaaattgcacattcaatgatcattatcatttaatatcgtttctaagctgcgcgcatccacaatattataacatttcccactttgtatagtgttattcattgtgtccggtgcagatttcatatctgtttaatctacggaggattgttatatgtcccacaggacaaaagttttgtgatgttttccaattaaaacacggatcatattctggacctgctgctgccaagatttcagagatgatgcactctaatagcttagataatgcaccaacacagtcacttattagtgttgtcaatggcattttggatgaaagcatagaaaggaaaaagggagaaataccacattttacttactgcggaaagtcgttcaagagattgagcgccgtctctatattcaagcagaacacataagaagtcaaaatgttatcatgaagagaagagaacagaagtactgttcaaaaattaaagtacttgaaatgttggtaaatggcacaaatgaagaaaaccagatggcaataaacaggcttcagatagtcaagaatgagaagtcaaaaatcgaagagaggagaaaacttagtgagcaagatgttcatcgattgatgagagagaaagaacattctgaaaacatcatagcaaacctaaagaaagatatagaagccatgaatagattgcatgaacagcaacttgagcaaactgaaagaaaggcaaaggaaatggaggagcaactaaccaccaaagtaaaagaagtagagtatctcttgctacaatcgaagaagaaagttgaagaagttgagactgcttccaggctaaaatcacagttatgggataagaaagaggacaattttcagagtcacatggataatcaacaactaattatcaaggacataagaatattgtcgcgatcatgtgaaaatgatatgtatgcacttcaaatgcagtggagaaatgagatctctaacttaggatctgggttaaaatgtttggttgatgctgctgaaaattatcataaagtcttggcggagaaccaaaagttatttaatgaagtgcaagaactaaaaggtaatataagagtatattgtcgtgtgaggccatttctttcgggtcaagacaaaaagtctactacaattgactacatgggggaaaatggtgagcttcttatatcaaatccatttaaacaagggaaggacggacacagattgttcaagtttaataaagtgtttagtccatttgcttctcaagctgaggttttttctgacatacaaccactaatccgatcagtcctggatggattcaacgtttgtatttttgcatatggtcagactggttctggcaaaacttacaccatgagtgggcctagcacatcgaagcaagattggggtgtcaattatcgggctttaaatgatttgtttgatatttcactaagtagaagaaatgccttctcatatgaggtgggtgtacagatggttgagatatacaatgaacaagttcgtgatttgctatcaaatgatattgcacagagaaggcttgggatttggagcacttctcaacccaatgggcttgttgttccagatgcaagcttgcactcagttaagtcgacatctgatgtattagacttgatggaaattgggcaagcaaatagagcagttggttcaacagcactaaatgagcgaagtagtcggtcacacagtattctaactgtacatgttcgagggttggatttgaagaatggatctacctcgaggggttgtttgcatcttattgatcttgctggtagtgagagggtggagaagtctgaagtaactggggatagattaaaagaagctcaatacatcaacaaatcactttctgcgttaggcgatgtgatttttgctctgtcacagaaaagtatccacgtgccttatagaaacagcaagctaacacaagttcttcaaagttctttaggtggacaagcaaaaactctaatgttcgttcaaataaatcctgatgttgagtcatattcagaaactataagcactttaaagtttgctgaaagggtgtctggagtagagttaggtgctgcaagaagcaacaaggagggaaaggatataaaagagctactggaacaggttgcgtctttgaaagacacaatttcacgcaaagatatggaaatagagcagctccaagtcatcaaagacaaagcaaaatccccaaatttattgttagatagaaatgggcctggcttgacaaagattacagtaaaccaacctagccaactattatcaggcgaacgaatgctcaagtctagtgacagagttctatcagatcctcctgataacagagattctaaccataatttgacggatactgctccagtgagcttagatgaagcagaatatgatggcaatgcatctgatgatggtttatcaggtgaagccgagaattacaattcagctgctgagatgacagcggaacggttgcatggaattccatcaagaataagcagattcactctcacaaaaaacgggcaaccatctatgtctagatcaaaatcaaaggatgctaagactccaagtaatgcaaaagctccatctagccagttaacaggaggttcttcagccagggggtctaaaagatggcagaagtaaagcacgatcatgttgctcgtgttgatgcacattgtaattgaaatgtgaatttgctgggtagctgtgttagaaagttaggcatttttagttttaatttaatccagaaaaacagtgcgatatatgtgatgacatgtatgtgcatgtgtgtataactactcgcataagcagtaaacaacaatgaaacatgcacaaatacgaagaaca

SEQ ID NO: 60045 - DNA, 3191 bp, Zea Mays
ggcaattccgctgccgcaattcaacacgcgaggctaaaaacaattcgaaacccccgacctacgccgagtcgccgagaaaacaacagtgctccggcgcttagagaagagcgaaaggcgagcgcgcagcacagcacggctcccgtgggccgtggcggaggcaaaaaccccgacccgcattaccccgaaaccctccgattcggcccggggcgagctcgaatccgtgcaacctcgccgccgccgggctcgatctgagccagggctaccgcgcgccggcgaggaatgaggagcgtgaacggcgaggtcgaggggacccacgaccacgaagggatcaatgtctcctgtagtggaatgtctcttggttttgagagacagtgtggatcctagattaggtgacgatattccaccagatgttaccagaactcctttgagaaaacaatggggagttccggaaatggacaagcctcaagttcatggtgcagcactagggaaaagatcccctgcagaggacaagagaaatggcgttgcagatcccaaagcccatcagaaaacttctgtcttttctggacaaaagttttgtgatgttttccaattaaaacacggatcatattctggacctgctgctgccaagatttcagagatgatgcactctaatagcttagataatgcaccaacacagtcacttattagtgttgtcaatggcattttggatgaaagcatagaaaggaaaaagggagaaataccacattttacttactgcggaaagtcgttcaagagattgagcgccgtctctatattcaagcagaacacataagaagtcaaaatgttatcatgaagagaagagaacagaagtactgttcaaaaattaaagtacttgaaatgttggtaaatggcacaaatgaagaaaaccagatggcaataaacaggcttcagatagtcaagaatgagaagtcaaaaatcgaagagaggagaaaacttagtgagcaagatgttcatcgattgatgagagagaaagaacattctgaaaacatcatagcaaacctaaagaaagatatagaagccatgaatagattgcatgaacagcaacttgagcaaactgaaagaaaggcaaaggaaatggaggagcaactaaccaccaaagtaaaagaagtagagtatctcttgctacaatcgaagaagaaagttgaagaagttgagactgcttccaggctaaaatcacagttatgggataagaaagaggacaattttcagagtcacatggataatcaacaactaattatcaaggacataagaatattgtcgcgatcatgtgaaaatgatatgtatgcacttcaaatgcagtggagaaatgagatctctaacttaggatctgggttaaaatgtttggttgatgctgctgaaaattatcataaagtcttggcggagaaccaaaagttatttaatgaagtgcaagaactaaaaggtaatataagagtatattgtcgtgtgaggccatttctttcgggtcaagacaaaaagtctactacaattgactacatgggggaaaatggtgagcttcttatatcaaatccatttaaacaagggaaggacggacacagattgttcaagtttaataaagtgtttagtccatttgcttctcaagctgaggttttttctgacatacaaccactaatccgatcagtcctggatggattcaacgtttgtatttttgcatatggtcagactggttctggcaaaacttacaccatgagtgggcctagcacatcgaagcaagattggggtgtcaattatcgggctttaaatgatttgtttgatatttcactaagtagaagaaatgccttctcatatgaggtgggtgtacagatggttgagatatacaatgaacaagttcgtgatttgctatcaaatgatattgcacagagaaggcttgggatttggagcacttctcaacccaatgggcttgttgttccagatgcaagcttgcactcagttaagtcgacatctgatgtattagacttgatggaaattgggcaagcaaatagagcagttggttcaacagcactaaatgagcgaagtagtcggtcacacagaatggatctacctcgaggggttgtttgcatcttattgatcttgctggtagtgagagggtggagaagtctgaagtaactggggatagattaaaagaagctcaatacatcaacaaatcactttctgcgttaggcgatgtgatttttgctctgtcacagaaaagtatccacgtgccttatagaaacagcaagctaacacaagttcttcaaagttctttaggtggacaagcaaaaactctaatgttcgttcaaataaatcctgatgttgagtcatattcagaaactataagcactttaaagtttgctgaaagggtgtctggagtagagttaggtgctgcaagaagcaacaaggagggaaaggatataaaagagctactggaacaggttgcgtctttgaaagacacaatttcacgcaaagatatggaaatagagcagctccaagtcatcaaagacaaagcaaaatccccaaatttattgttagatagaaatgggcctggcttgacaaagattacagtaaaccaacctagccaactattatcaggcgaacgaatgctcaagtctagtgacagagttctatcagatcctcctgataacagagattctaaccataatttgacggatactgctccagtgagcttagatgaagcagaatatgatggcaatgcatctgatgatggtttatcaggtgaagccgagaattacaattcagctgctgagatgacagcggaacggttgcatggaattccatcaagaataagcagattcactctcacaaaaaacgggcaaccatctatgtctagatcaaaatcaaaggatgctaagactccaagtaatgcaaaagctccatctagccagttaacaggaggttcttcagccagggggtctaaaagatggcagaagtaaagcacgatcatgttgctcgtgttgatgcacattgtaattgaaatgtgaatttgctgggtagctgtgttagaaagttaggcatttttagttttaatttaatccagaaaaacagtgcgatatatgtgatgacatgtatgtgcatgtgtgtataactactcgcataagcagtaaacaacaatgaaacatgcacaaatacgaagaaca

SEQ ID NO: 60046 - DNA, 3308 bp, Zea Mays
caacacgcgaggctaaaaacaattcgaaacccccgacctacgccgagtcgccgagaaaacaacagtgctccggcgcttagagaagagcgaaaggcgagcgcgcagcacagcacggctcccgtgggccgtggcggaggcaaaaaccccgacccgcattaccccgaaaccctccgattcggcccggggcgagctcgaatccgtgcaacctcgccgccgccgggctcgatctgagccagggctaccgcgcgccggcgaggaatgaggagcgtgaacggcgaggtcgaggggacccacgaccacgaagggatcaatgtctcctgtagtggaatgtctcttggttttgagagacagtgtggatcctagattaggtgacgatattccaccagatgttaccagaactcctttgagaaaacaatggggagttccggaaatggacaagcctcaagttcatggtgcagcactagggaaaagatcccctgcagaggacaagagaaatggcgttgcagatcccaaagcccatcagaaaacttctgtcttttctggacaaaagttttgtgatgttttccaattaaaacacggatcatattctggacctgctgctgccaagatttcagagatgatgcactctaatagcttagataatgcaccaacacagtcacttattagtgttgtcaatggcattttggatgaaagcatagaaaggaaaaagggagaaataccacatcgtgtagtttacttactgcggaaagtcgttcaagagattgagcgccgtctctatattcaagcagaacacataagaagtcaaaatgttatcatgaagagaagagaacagaagtactgttcaaaaattaaagtacttgaaatgttggtaaatggcacaaatgaagaaaaccagatggcaataaacaggcttcagatagtcaagaatgagaagtcaaaaatcgaagagaggagaaaacttagtgagcaagatgttcatcgattgatgagagagaaagaacattctgaaaacatcatagcaaacctaaagaaagatatagaagccatgaatagattgcatgaacagcaacttgagcaaactgaaagaaaggcaaaggaaatggaggagcaactaaccaccaaagtaaaagaagtagagtatctcttgctacaatcgaagaagaaagttgaagaagttgagactgcttccaggctaaaatcacagttatgggataagaaagaggacaattttcagagtcacatggataatcaacaactaattatcaaggacataagaatattgtcgcgatcatgtgaaaatgatatgtatgcacttcaaatgcagtggagaaatgagatctctaacttaggatctgggttaaaatgtttggttgatgctgctgaaaattatcataaagtcttggcggagaaccaaaagttatttaatgaagtgcaagaactaaaaggtaatataagagtatattgtcgtgtgaggccatttctttcgggtcaagacaaaaagtctactacaattgactacatgggggaaaatggtgagcttcttatatcaaatccatttaaacaagggaaggacggacacagattgttcaagtttaataaagtgtttagtccatttgcttctcaagctgaggttttttctgacatacaaccactaatccgatcagtcctggatggattcaacgtttgtatttttgcatatggtcagactggttctggcaaaacttacaccatgagtgggcctagcacatcgaagcaagattggggtgtcaattatcgggctttaaatgatttgtttgatatttcactaagtagaagaaatgccttctcatatgaggtgggtgtacagatggttgagatatacaatgaacaagttcgtgatttgctatcaaatgatattgcacagagaaggcttgggatttggagcacttctcaacccaatgggcttgttgttccagatgcaagcttgcactcagttaagtcgacatctgatgtattagacttgatggaaattgggcaagcaaatagagcagttggttcaacagcactaaatgagcgaagtagtcggtcacacagtattctaactgtacatgttcgagggttggatttgaagaatggatctacctcgaggggttgtttgcatcttattgatcttgctggtagtgagagggtggagaagtctgaagtaactggggatagattaaaagaagctcaatacatcaacaaatcactttctgcgttaggcgatgtgatttttgctctgtcacagaaaagtatccacgtgccttatagaaacagcaagctaacacaagttcttcaaagttctttaggtaatcaagtatttatttactaccagtaaactagatcttaaatagatttatgtgaatattttaaatatttgtactaccttttgctttcttccaggtggacaagcaaaaactctaatgttcgttcaaataaatcctgatgttgagtcatattcagaaactataagcactttaaagtttgctgaaagggtgtctggagtagagttaggtgctgcaagaagcaacaaggagggaaaggatataaaagagctactggaacaggttgcgtctttgaaagacacaatttcacgcaaagatatggaaatagagcagctccaagtcatcaaagacaaagcaaaatccccaaatttattgttagatagaaatgggcctggcttgacaaagattacagtaaaccaacctagccaactattatcaggcgaacgaatgctcaagtctagtgacagagttctatcagatcctcctgataacagagattctaaccataatttgacggatactgctccagtgagcttagatgaagcagaatatgatggcaatgcatctgatgatggtttatcaggtgaagccgagaattacaattcagctgctgagatgacagcggaacggttgcatggaattccatcaagaataagcagattcactctcacaaaaaacgggcaaccatctatgtctagatcaaaatcaaaggatgctaagactccaagtaatgcaaaagctccatctagccagttaacaggaggttcttcagccagggggtctaaaagatggcagaagtaaagcacgatcatgttgctcgtgttgatgcacattgtaattgaaatgtgaatttgctgggtagctgtgttagaaagttaggcatttttagttttaatttaatccagaaaaacagtgcgatatatgtgatgacatgtatgtgcatgtgtgtataactactcgcataagcagtaaacaacaatgaaacatgcacaaatacgaagaaca

SEQ ID NO: 60047 - DNA, 3122 bp, Zea Mays
ctcgggggttcttgagggatcctgggacggttatgcaccgtcggatcaacggttgggcaatctgaacaaattcctctcagtgattgctgatatggggctgccaggtttcagtgtgaaagatcttgatgagggatcaatgtctcctgtagtggaatgtctcttggttttgagagacagtgtggatcctagattaggtgacgatattccaccagatgttaccagaactcctttgagaaaacaatggggagttccggaaatggacaagcctcaagttcatggtgcagcactagggaaaagatcccctgcagaggacaagagaaatggcgttgcagatcccaaagcccatcagaaaacttctgtcttttctggacaaaagttttgtgatgttttccaattaaaacacggatcatattctggacctgctgctgccaagatttcagagatgatgcactctaatagcttagataatgcaccaacacagtcacttattagtgttgtcaatggcattttggatgaaagcatagaaaggaaaaagggagaaataccacatgtatgtgttcattttgaactacatcactatctttccattgatgcttgtttaacggtgcttaaatttgactgcctcatctcagcgtgtagtttacttactgcggaaagtcgttcaagagattgagcgccgtctctatattcaagcagaacacataagaagtcaaaatgttatcatgaagagaagagaacagaagtactgttcaaaaattaaagtacttgaaatgttggtaaatggcacaaatgaagaaaaccagatggcaataaacaggcttcagatagtcaagaatgagaagtcaaaaatcgaagagaggagaaaacttagtgagcaagatgttcatcgattgatgagagagaaagaacattctgaaaacatcatagcaaacctaaagaaagatatagaagccatgaatagattgcatgaacagcaacttgagcaaactgaaagaaaggcaaaggaaatggaggagcaactaaccaccaaagtaaaagaagtagagtatctcttgctacaatcgaagaagaaagttgaagaagttgagactgcttccaggctaaaatcacagttatgggataagaaagaggacaattttcagagtcacatggataatcaacaactaattatcaaggacataagaatattgtcgcgatcatgtgaaaatgatatgtatgcacttcaaatgcagtggagaaatgagatctctaacttaggatctgggttaaaatgtttggttgatgctgctgaaaattatcataaagtcttggcggagaaccaaaagttatttaatgaagtgcaagaactaaaaggtaatataagagtatattgtcgtgtgaggccatttctttcgggtcaagacaaaaagtctactacaattgactacatgggggaaaatggtgagcttcttatatcaaatccatttaaacaagggaaggacggacacagattgttcaagtttaataaagtgtttagtccatttgcttctcaagctgaggttttttctgacatacaaccactaatccgatcagtcctggatggattcaacgtttgtatttttgcatatggtcagactggttctggcaaaacttacaccatgagtgggcctagcacatcgaagcaagattggggtgtcaattatcgggctttaaatgatttgtttgatatttcactaagtagaagaaatgccttctcatatgaggtgggtgtacagatggttgagatatacaatgaacaagttcgtgatttgctatcaaatgatattgcacagagaaggcttgggatttggagcacttctcaacccaatgggcttgttgttccagatgcaagcttgcactcagttaagtcgacatctgatgtattagacttgatggaaattgggcaagcaaatagagcagttggttcaacagcactaaatgagcgaagtagtcggtcacacagtattctaactgtacatgttcgagggttggatttgaagaatggatctacctcgaggggttgtttgcatcttattgatcttgctggtagtgagagggtggagaagtctgaagtaactggggatagattaaaagaagctcaatacatcaacaaatcactttctgcgttaggcgatgtgatttttgctctgtcacagaaaagtatccacgtgccttatagaaacagcaagctaacacaagttcttcaaagttctttaggtggacaagcaaaaactctaatgttcgttcaaataaatcctgatgttgagtcatattcagaaactataagcactttaaagtttgctgaaagggtgtctggagtagagttaggtgctgcaagaagcaacaaggagggaaaggatataaaagagctactggaacaggttgcgtctttgaaagacacaatttcacgcaaagatatggaaatagagcagctccaagtcatcaaagacaaagcaaaatccccaaatttattgttagatagaaatgggcctggcttgacaaagattacagtaaaccaacctagccaactattatcaggcgaacgaatgctcaagtctagtgacagagttctatcagatcctcctgataacagagattctaaccataatttgacggatactgctccagtgagcttagatgaagcagaatatgatggcaatgcatctgatgatggtttatcaggtgaagccgagaattacaattcagctgctgagatgacagcggaacggttgcatggaattccatcaagaataagcagattcactctcacaaaaaacgggcaaccatctatgtctagatcaaaatcaaaggatgctaagactccaagtaatgcaaaagctccatctagccagttaacaggaggttcttcagccagggggtctaaaagatggcagaagtaaagcacgatcatgttgctcgtgttgatgcacattgtaattgaaatgtgaatttgctgggtagctgtgttagaaagttaggcatttttagttttaatttaatccagaaaaacagtgcgatatatgtgatgacatgtatgtgcatgtgtgtataactactcgcataagcagtaaacaacaatgaaacatgcacaaatacgaagaaca

SEQ ID NO: 60048 - DNA, 2419 bp, Zea Mays
cgcacgcacgcacaagccacgcactcgcacagcggcacacagactcccaattccaaaccctagacgttgacggcgacggtaggtcgacagctctagccaggcagccagccacgagcccacgacgaccgtggaggcctcacctcctcggctcttcatctcacgacggcacagcctgcaagcaagaggccgctctgatccctcgcgccggacttgacgacagcatggcatctgcaagtggcagtgggtgcgcaagcactggagcatcccttgttgctacgaacaccctggctgtggctgtgcaagacacaactccagttaatggagctggagaaggagaagatggagaaagaacaactgatattggagtgaaagagtctgatacaaagaaaaggaaaccaaaaagacaaacatctggtgtttgggactactttatcaagtccactgtgacagagaagggagataagggcgagaccgaggaacaaatttgggcaaaatgcaagaagtgcaagttcaaaacttgtggtgaatcatcgaggggcacaactatcttctggaacaatttgaaatcaaggcactacatacatagagggcagcaagaactacatgttcagaaaggtgaaggtaacaatgctattgttcaaaatttcaagtatgatcctgaagctagcttgaggaagtttcatctggctatagttatgcatgagtacccctttaagatggttgaacatgaatattttgttgatttcatcaagtctttgcgtccacactttacattcttgtgccgcacaaccactaggaatgagataatgacaatgtacatggatgaaaaaaaatgtttgagcagcttaaatccctttcctgtcgattttctgcaactatggatatgtggacatcgaaccaaaataaaggctatatgagcattaccatccattggattgatgacaagtggcagatgcaaaaacgtataatttgtctccctcatgtgaaaggacatcacaatggagaattattagcttcagaatttatcaaaggtgtgatgtcatggaacctagaaaaaagattatttgctctcacattagacaatgctgcagccaatgataagtatgtgagattagttgtcaaggagcttaataagcttgctagaattcagaagtatccacctttagtctgtgggggtgttttctttcatgtccgatgtttatgtcacatactaaatttggttgctcaagatggtctgtcagttatagcatcaccacttaagaacattagagctataattgttattgtgaagaactctacattgcaatgggaagaatttgaaaagtgtgcacaattttttgatttgaataacaaatctggtcttccattggatgttcctacaagatggaattcaacatatgacatgttgagccatgctatgtattataggagtgcatttgaaaggttggtatactttcacaaggataaatattggcattgtactccatcaagtgatgaatgggacatggcggaatcattttgcaaatgtttgaagcaactcaatgatgctaccgtgttgttttcgggctgtcagtatccaacaaccaacttgttttggtggaagttctgtgagataaagttagcacttagagaatggtgtgaaagtgccaatatcactatagcttctatggccgaagcaatgcagaaaaaatatgataagtattggaaaaagtccaacatagctcttgcagtggcttgctttcttgatcctagatacaagaaaaaattggtagaatatttcatgttgaagatttataaggacagtgctgtcgcagaactcactcgctttatggatgttgtgaaccaattattccaatcatatttgagcagtacacgtgatgtttctattactcaaactgatcttgctgcaagtacatctaactcaatttgtataaatactgacattgacgagtttatatatgaagataatgatgcagccaaaggtgaaataaatgaattggatgtgtacatgaaagataaaccaattcgatgggttgatcctactggtaaaggtctacaatttgacatattatcatggtggaaggccaaccaagttacatatcctgttctctcgcgtcttgctcgtgatgtattggctgttcaagtctctactgtggcctcagaatgtgctttcagttcgagtgggcgtgttgtgagtaaatatcacagccgtttagagcctgagactgtggaggcattagtttgtaccaaagactggaatcttgcatctaacaaagatcgcaatgacaaggtaccgtcaattgttgaggagttcatggcagatgaaaatgaatatagctcgacaattgaagagaaccaagctgacaatgaaggaaatggtgaggatagtgaggatgagggcagcgatatggagttatga

SEQ ID NO: 60049 - DNA, 2440 bp, Zea Mays
cgcacgcacgcacaagccacgcactcgcacagcggcacacagactcccaattccaaaccctagacgttgacggcgacggtaggtcgacagctctagccaggcagccagccacgagcccacgacgaccgtggaggcctcacctcctcggctcttcatctcacgacggcacagcctgcaagcaagaggccgctctgatccctcgcgccggacttgacgacaggtgactgcctgactgcatggcatctgcaagtggcagtgggtgcgcaagcactggagcatcccttgttgctacgaacaccctggctgtggctgtgcaagacacaactccagttaatggagctggagaaggagaagatggagaaagaacaactgatattggagtgaaagagtctgatacaaagaaaaggaaaccaaaaagacaaacatctggtgtttgggactactttatcaagtccactgtgacagagaagggagataagggcgagaccgaggaacaaatttgggcaaaatgcaagaagtgcaagttcaaaacttgtggtgaatcatcgaggggcacaactatcttctggaacaatttgaaatcaaggcactacatacatagagggcagcaagaactacatgttcagaaaggtgaaggtaacaatgctattgttcaaaatttcaagtatgatcctgaagctagcttgaggaagtttcatctggctatagttatgcatgagtacccctttaagatggttgaacatgaatattttgttgatttcatcaagtctttgcgtccacactttacattcttgtgccgcacaaccactaggaatgagataatgacaatgtacatggatgaaaaaaaatgtttgagcagcttaaatccctttcctgtcgattttctgcaactatggatatgtggacatcgaaccaaaataaaggctatatgagcattaccatccattggattgatgacaagtggcagatgcaaaaacgtataatttgtctccctcatgtgaaaggacatcacaatggagaattattagcttcagaatttatcaaaggtgtgatgtcatggaacctagaaaaaagattatttgctctcacattagacaatgctgcagccaatgataagtatgtgagattagttgtcaaggagcttaataagcttgctagaattcagaagtatccacctttagtctgtgggggtgttttctttcatgtccgatgtttatgtcacatactaaatttggttgctcaagatggtctgtcagttatagcatcaccacttaagaacattagagctataattgttattgtgaagaactctacattgcaatgggaagaatttgaaaagtgtgcacaattttttgatttgaataacaaatctggtcttccattggatgttcctacaagatggaattcaacatatgacatgttgagccatgctatgtattataggagtgcatttgaaaggttggtatactttcacaaggataaatattggcattgtactccatcaagtgatgaatgggacatggcggaatcattttgcaaatgtttgaagcaactcaatgatgctaccgtgttgttttcgggctgtcagtatccaacaaccaacttgttttggtggaagttctgtgagataaagttagcacttagagaatggtgtgaaagtgccaatatcactatagcttctatggccgaagcaatgcagaaaaaatatgataagtattggaaaaagtccaacatagctcttgcagtggcttgctttcttgatcctagatacaagaaaaaattggtagaatatttcatgttgaagatttataaggacagtgctgtcgcagaactcactcgctttatggatgttgtgaaccaattattccaatcatatttgagcagtacacgtgatgtttctattactcaaactgatcttgctgcaagtacatctaactcaatttgtataaatactgacattgacgagtttatatatgaagataatgatgcagccaaaggtgaaataaatgaattggatgtgtacatgaaagataaaccaattcgatgggttgatcctactggtaaaggtctacaatttgacatattatcatggtggaaggccaaccaagttacatatcctgttctctcgcgtcttgctcgtgatgtattggctgttcaagtctctactgtggcctcagaatgtgctttcagttcgagtgggcgtgttgtgagtaaatatcacagccgtttagagcctgagactgtggaggcattagtttgtaccaaagactggaatcttgcatctaacaaagatcgcaatgacaaggtaccgtcaattgttgaggagttcatggcagatgaaaatgaatatagctcgacaattgaagagggacagaaccaagctgacaatgaaggaaatggtgaggatagtgaggatgagggcagcgatatggagttatga

SEQ ID NO: 60050 - DNA, 3465 bp, Zea Mays
ttttcatctcttcgactgttcgatggccacgaataaaattttggttatctcaataaaatatactcctactattcaaactaaaaaaatcgatctagtattacatttacaacgacacaccgtgtctgcgcattatagtaggccgaagcgggattcaatcaaacaaccccgttccgacaaatagaagcgttctcaggggcttactcgcgaaaagctcaataaatcccgagtcgtagcacgggactggagcacccaacccaagttcacgatcgcgaggtcttcgtctccgcctgggtccagctctcggatttccgcgcgttccacttccacccacacacacacccccaaggacgcaggccgcaatggcggagcccgaggtctcccccgcagcggccggcggcggcgggcggctccgcaacgccttcgggggcgtgctctgcgccttcacgcttctcctcatcggcgtcgtcgccttctcgatccgcctcttctctgtaatcaagtacgagagcgtgatccacgagttcgacccctacttcaacttccgcgtcactcagtttctgtccaagaatggaatttatgagttctggaactggtttgatgataggacatggtacccccttggccgtgtgatcggtggcactgtgtatcctgggttgacattgactgctggaactatgtggtggttgctgaactctcttaacatcccattgtcggtggagacagtttgtgtgttcacagctccaattttctcagcaaatgcatcatgggctacctacctgctaacaaaggaagcgaaaggtactggagctggattaatggcagcagccattttagcaatggtcccctcatatatttcaagatctgttgcaggcagctatgataatgaagctgtagcaatatttgccttgatatttacattttatctatatgtaaagacgctgaacacgggatcactcttttatgcaacactcaatgctctctcatatttctacatggcttttctaggtctgctcttggggaggctacacattcattatcaatcttatcccaatgcatgtcctcttgtgcattgtaactggtcgttattcttcgcgtctctacattgcatatgctccccttgttgtacttggaacgcttctggcagcattagtaccggtggttggttttaatgcagtaatgacctctgagcacttcgcatcatttctggtgttcataatccttcacgtggttgctcttgtgtattatatcaaagggcttttgactcctaggctgttcaaagttgctatgactcttgtcatatctgttggcttagctgtttgttttgcagtagtagccatacttgttgcattggtggcatctagtccaacgaaaggctggagtggccgcagtttgagtctacttgacccaacttatgcaagcaagtacatccccatcattgctagtgtcagtgaacaccaacctcctacctggccctcgtattttatggacattaatgtgttggccttcctgattcctgctgggattatttcatgcttcttgcctctgtctgacgcaagctccttcatggtcttgtacttagtcactgcagtttatttttctggagtaatggtacggcttatgcttgtccttgctcctgctgcgtgcattttatctgggattgctctatctgaagttttcagtgtgctcacacgatccattaaattgcagctgtcaaaattatttgatgatagccctacttcttcaggtgacagtagcccagagagttctacaaattcaacaaaaaatgaaaataggaatgaaaaacacgaaatagctccaaaggaaaaaacatcaaagaagaaccggaagaaggagaaagaagtggcagagagtgttcctgtaaagcctaaaaaggaaaataggcttttggttctgccttttgaattatctgttatgggtattttattgctcatcgtattaggtggtttctatgtggtccattgtgtatgggcggcagctgaagcgtactccgcgccttcaattgtgttgacatctcgttcacgagatgggttgcatgtttttgatgatttccgtgaagcttacgcatggctgagccataacacagatgttgatgacaaggttgcttcctggtgggactatggttaccaaacaactgcaatggccaacagaactgtgattgtagacaataacacctggaacaacactcatatagcaacagttggtacagcaatgtcgtccccagaaaaagcagcttgggaaatcttcaattctttagatgtcaaatatgtgcttgttgtctttggaggacttgttggataccctagcgatgatatcaataagttcctttggatggtacgaataggaggtggtgtgttccctcacattaaggagccagattatcttagggatggtcaatatcgcgttgatgctcaagccactccaactatgctgaattgcctcatgtacaagctttgttactacaggtttgtggagactgatggaaaaggctttgacagagtaagaggatatgaaataggaaagaagcatttcaagctaacacattttgaggaggtatttacaacccaccattggatggtccgcatatataaactgaaaccccagaagaacagggttcgaggcaagctgaagaagttgaaggccagtgccaaaactagtcccacacttgcggcagggcgaaagaacccgtggcaataggtgaagttaccaatagtgccatttacctgatactttgttggtagatcaagtgcgctaggttggtgaaccagaaaactacagaactagattagagatctggactattgtattggaccctcgttatatgttctcccaaccggccgggtgctgatgaaatttttgatagaccagaggagtttatcaatcccatgggtttgagattggatggcggcgataattttctagtgacaggggttgtttaagactacctgttacttgctgttttgtgtaacctacaatttttcttacaaggtacttctctactggggtgatagtgagttcaggacatcgtgagcactgagcactgaggctatatccactatccagcaaagaaggcaaaatgcaaaatagggtatcgcacggcactttagcacaatggcatgtctctaatagggtatgcattaggaggtaaaatgcatatgagaggggatatgcaaaatacagtattgatttgcatatgcatgatctgttggaggaatctatactatatgttttttttgtaaaataaaaaaatataatcgtgtcgggccgggccagcactacgtgccgaggctacagcctaaacatggcacgacgtttttggctcttgcaagcattaggtcgtttctcagaccacattggcgcaatggattccatgatgtttgaggttgctgaattagatggagcaataatgatttgtcacactaacagtaaaatgaaagattatttgtt

SEQ ID NO: 60051 - DNA, 2573 bp, Zea Mays
ctcataccaattttgaccacaattaaggaaaagctaaattggtcccctcatatatttcaagatctgttgcaggcagctatgataatgaagctgtagcaatatttgccttgatatttacattttatctatatgtaaagacgctgaacacgggatcactcttttatgcaacactcaatgctctctcatatttctacatggtctgctcttggggaggctacacattcattatcaatcttatcccaatgcatgtcctcttgtgcattgtaactggtcgttattcttcgcgtctctacattgcatatgctccccttgttgtacttggaacgcttctggcagcattagtaccggtggttggttttaatgcagtaatgacctctgagcacttcgcatcatttctggtgttcataatccttcacgtggttgctcttgtgtattatatcaaagggcttttgactcctaggctgttcaaagttgctatgactcttgtcatatctgttggcttagctgtttgttttgcagtagtagccatacttgttgcattggtggcatctagtccaacgaaaggctggagtggccgcagtttgagtctacttgacccaacttatgcaagcaagtacatccccatcattgctagtgtcagtgaacaccaacctcctacctggccctcgtattttatggacattaatgtgttggccttcctgattcctgctgggattatttcatgcttcttgcctctgtctgacgcaagctccttcatggtcttgtacttagtcactgcagtttatttttctggagtaatggtacggcttatgcttgtccttgctcctgctgcgtgcattttatctgggattgctctatctgaagttttcagtgtgctcacacgatccattaaattgcagctgtcaaaattatttgatgatagccctacttcttcaggtgacagtagcccagagagttctacaaattcaacaaaaaatgaaaataggaatgaaaaacacgaaatagctccaaaggaaaaaacatcaaagaagaaccggaagaaggagaaagaagtggcagagagtgttcctgtaaagcctaaaaaggaaaataggcttttggttctgccttttgaattatctgttatgggtattttattgctcatcgtattaggtggtttctatgtggtccattgtgtatgggcggcagctgaagcgtactccgcgccttcaattgtgttgacatctcgttcacgagatgggttgcatgtttttgatgatttccgtgaagcttacgcatggctgagccataacacagatgttgatgacaaggttgcttcctggtgggactatggttaccaaacaactgcaatggccaacagaactgtgattgtagacaataacacctggaacaacactcatatagcaacagttggacttgttggataccctagcgatgatatcaataagttcctttggatggtacgaataggaggtggtgtgttccctcacattaaggagccagattatcttagggatggtcaatatcgcgttgatgctcaagccactccaactatgctgaattgcctcatgtacaagctttgttactacaggtttgtggagactgatggaaaaggctttgacagagtaagaggatatgaaataggaaagaagcatttcaagctaacacattttgaggaggtatttacaacccaccattggatggtccgcatatataaactgaaaccccagaagaacagggttcgaggcaagctgaagaagttgaaggccagtgccaaaactagtcccacacttgcggcagggcgaaagaacccgtggcaataggtgaagttaccaatagtgccatttacctgatactttgttggtagatcaagtgcgctaggttggtgaaccagaaaactacagaactagattagagatctggactattgtattggaccctcgttatatgttctcccaaccggccgggtgctgatgaaatttttgatagaccagaggagtttatcaatcccatgggtttgagattggatggcggcgataattttctagtgacaggggttgtttaagactacctgttacttgctgttttgtgtaacctacaatttttcttacaaggtacttctctactggggtgatagtgagttcaggacatcgtgagcactgagcactgaggctatatccactatccagcaaagaaggcaaaatgcaaaatagggtatcgcacggcactttagcacaatggcatgtctctaatagggtatgcattaggaggtaaaatgcatatgagaggggatatgcaaaatacagtattgatttgcatatgcatgatctgttggaggaatctatactatatgttttttttgtaaaataaaaaaatataatcgtgtcgggccgggccagcactacgtgccgaggctacagcctaaacatggcacgacgtttttggctcttgcaagcattaggtcgtttctcagaccacattggcgcaatggattccatgatgtttgaggttgctgaattagatggagcaataatgatttgtcacactaacagtaaaatgaaagattatttgtt

SEQ ID NO: 60052 - DNA, 2717 bp, Zea Mays
agataataccaagatgttaatttgttgctactctcccacttcttagtacattgtattatctatgcagctatgataatgaagctgtagcaatatttgccttgatatttacattttatctatatgtaaagacgctgaacacgggatcactcttttatgcaacactcaatgctctctcatatttctacatggtaaacttgttaaattttgatccatgtttttcgaatgtactttgtaatcatattactaggcttttctaggtctgctcttggggaggctacacattcattatcaatcttatcccaatgcatgtcctcttgtgcattgtaactggtcgttattcttcgcgtctctacattgcatatgctccccttgttgtacttggaacgcttctggcagcattagtaccggtggttggttttaatgcagtaatgacctctgagcacttcgcatcatttctggtgttcataatccttcacgtggttgctcttgtgtattatatcaaagggcttttgactcctaggctgttcaaagttgctatgactcttgtcatatctgttggcttagctgtttgttttgcagtagtagccatacttgttgcattggtggcatctagtccaacgaaaggctggagtggccgcagtttgagtctacttgacccaacttatgcaagcaagtacatccccatcattgctagtgtcagtgaacaccaacctcctacctggccctcgtattttatggacattaatgtgttggccttcctgattcctgctgggattatttcatgcttcttgcctctgtctgacgcaagctccttcatggtcttgtacttagtcactgcagtttatttttctggagtaatggtacggcttatgcttgtccttgctcctgctgcgtgcattttatctgggattgctctatctgaagttttcagtgtgctcacacgatccattaaattgcagctgtcaaaattatttgatgatagccctacttcttcaggtgacagtagcccagagagttctacaaattcaacaaaaaatgaaaataggaatgaaaaacacgaaatagctccaaaggaaaaaacatcaaagaagaaccggaagaaggagaaagaagtggcagagagtgttcctgtaaagcctaaaaaggaaaataggcttttggttctgccttttgaattatctgttatgggtattttattgctcatcgtattaggtggtttctatgtggtccattgtgtatgggcggcagctgaagcgtactccgcgccttcaattgtgttgacatctcgttcacgagatgggttgcatgtttttgatgatttccgtgaagcttacgcatggctgagccataacacagatgttgatgacaaggttgcttcctggtgggactatggttaccaaacaactgcaatggccaacagaactgtgattgtagacaataacacctggaacaacactcatatagcaacagttggtacagcaatgtcgtccccagaaaaagcagcttgggaaatcttcaattctttagatgtcaaatatgtgcttgttgtctttggaggacttgttggataccctagcgatgatatcaataagttcctttggatggtacgaataggaggtggtgtgttccctcacattaaggagccagattatcttagggatggtcaatatcgcgttgatgctcaagccactccaactatgctgaattgcctcatgtacaagctttgttactacaggtttgtggagactgatggaaaaggctttgacagagtaagaggatatgaaataggaaagaagcatttcaagctaacacattttgaggaggtatttacaacccaccattggatggtccgcatatataaactgaaaccccagaagaacagggttcgaggcaagctgaagaagttgaaggccagtgccaaaactagtcccacacttgcggcagggcgaaagaacccgtggcaataggtgaagttaccaatagtgccatttacctgatactttgttggtagatcaagtgcgctaggttggtgaaccagaaaactacagaactagattagagatctggactattgtattggaccctcgttatatgttctcccaaccggccgggtgctgatgaaatttttgatagaccagaggagtttatcaatcccatgggtttgagattggatggcggcgataattttctagtgacaggggttgtttaagactacctgttacttgctgttttgtgtaacctacaatttttcttacaaggtacttctctactggggtgatagtgagttcaggacatcgtgagcactgagcactgaggctatatccactatccagcaaagaaggcaaaatgcaaaatagggtatcgcacggcactttagcacaatggcatgtctctaatagggtatgcattaggaggtaaaatgcatatgagaggggatatgcaaaatacagtattgatttgcatatgcatgatctgttggaggaatctatactatatgttttttttgtaaaataaaaaaatataatcgtgtcgggccgggccagcactacgtgccgaggctacagcctaaacatggcacgacgtttttggctcttgcaagcattaggtcgtttctcagaccacattggcgcaatggattccatgatgtttgaggttgctgaattagatggagcaataatgatttgtcacactaacagtaaaatgaaagattatttgtt

SEQ ID NO: 60053 - DNA, 3190 bp, Zea Mays
gtcccgtcgcttgtttcctctcgtttccacggccttctagactcccggcgaacactccactccgccttcttatgcgcatcccctccgcttccgaagcacacagttcaaccagaaaaactagccgaagcaaacccattccacaagcacctggtgggatcatctcatcatcagaaacaaagagagagattccgtgcccacttgttgtagtagattgtgaggattgaggagtagcaaagagaagcagccatgaatccggacaacttcacccacaagacgaacgaggcgatcgtgggggcgcacgagattgcggtggaggccggccacgcgcagctcacgccgctgcacctggccgcagtgctggctgcggacaagggcggcatcctgcggcaggccatcacgggggcgtcggggggcgacggagcggccggggactcgttcgagcgcgtgctgaacaactcgctcaagaagctgccgtcgcagtccccgccgccggactccgtcccggcgtccacggcactgatcaaggtcatccgccgggcgcagtccgcgcagaaaaaacgcggggactctcacctcgccgtcgaccagctgctgctcggcctgctcgaggactcgcagatctccgactgcctcaaggaggccggcgtgtccgcggcgcgggtgcgcgccgagcttgagaagctccgcggcggggaggggcgccgcgtggagtccgcgtcgggggacactaacttccaggcgctcaagacatacggccgggacctcgtcgagcaggccgggaagcttgatcccgtcatcggccgcgacgaggagatccgccgcgtggtgcgcatcctctcgcgccgcactaagaacaaccccgtcctcatcggcgagcccggcgttggcaagacggccgtcgtggagggcctcgcgcagcgcatcgttcgcggcgacgtgcccagtaacctcctcgacgtccgcctcatcgcgctcgacatgggcgcgcttgtcgcgggcgccaagtaccgcggcgagttcgaggagcggctcaaggccgtgctcaaggaggtggaagaggccgaggggaaggtcattctcttcatcgacgagatacacctcgtcctgggcgcgggcaggacggagggttccatggacgcggccaacctgttcaagccaatgctggcgaggggacagctcaggtgcatcggcgccaccacgctggaggagtaccgcaagtacgtggagaaggacgcagcgttcgagcggcggttccagcaggtgttcgtcgcggagccgagcgtgcccgataccgtcagcattctgaggggactcaaggagaagtacgaggggcaccatggcgtgaggatccaggaccgcgccctcgtggtcgcggcacagctctccgcgaggtacatcatgggtcggcacctgcctgacaaagccatagacctggtggacgaggcctgcgccaatgtgagggtgcagctcgacagccagccggaggagattgataacctggagaggaagagaatccagcttgaggtcgagctccacgcgctcgagaaggagaaggacaaggccagtaaagcccggctgattgaggtcaggaaggaattggacgatctgagggacaagctgcagcccctgaccatgaagtacaggaaggagaaggagagaatcgatgagatcaggaagctgaagcagcgccgcgaggagctccagttcaccctgcaggaggccgagcgccggatggacctggcccgtgtggccgatctcaagtacggcgccctccaggaaatcgacgccgcgatctccaagctggagagcgaaacaggggagaacctgatgctcaccgaaaccgtcggccctgaacaaattgcagaggtggtgagccgttggacgggtattccagtgacccggcttggccagaacgacaaggagaggctggtcggcctggctgacaggcttcaccagagggtggtcggccagacagaggctgtgagcgccgtcgcagaggcggtgctgaggtcgagggccggtcttggcaggccacaacagcccactggctcgttcctcttcctgggtccgactggcgtggggaaaactgagctggccaaggccctagccgaacagctgttcgacgacgagaaccttcttgtccgcatcgacatgtcggagtacatggagcagcactcggttgctcgcctcatcggagcaccacctggctacgtcggccatgaagagggtgggcagctgactgaacaagtgaggaggaggccgtacagcgtgatcctgttcgacgaggtcgagaaggcccatgtcgccgtgttcaacaccctgctccaggtcctcgacgacggcaggctgacggatgggcaaggcaggacggtggacttcaggaacaccgtgatcatcatgacatcgaacctcggcgccgagcacctcctcgctgggatggtgggcaagaactccatgaaggtcgctcgcgatctggtcatgcaggaggtgaggaggcacttccgccctgagctgctgaaccgtctcgacgagatcgtgatcttcgatcctctgtcccacgagcagctgaggaaggtcgctcgccttcagatgaaggatgtggccgtccgtcttgccgaaaggggcatcgctctggctgtgaccgacgccgcattggacatcatcttgtctctctcttacgatccggtgtacggcgcgcggccaataaggaggtggatcgagaagagggtggtgacgcagctgtcgaagatgctgatccaggaggagatcgacgagaactgcacggtctacatcgacgccgcgcccgctccaccaggagcgacgctgcgcaggccgtcaagaagatgaggatcatggaggaggacgaggacggcatggacgaggagtaaaaggcgggccggaggacgcggagctgcgcccaggccgcaggtctggcgccggcatcatcgagtgtcttttgaataagcgtgtagataagcccgtgaatgtggaaacgaggatgagatgatgttcttgtaacgctgctgtttgtcaagcatggacgaatgctctcatatcatcatatggtgtcaaagtgacaaagtctctcaatcgatgtcttgatgtcattatttttatctccctgaatgtttttacatgttttcctctattcattgtatcctttatgcatacacgaagggagaactttcgg

SEQ ID NO: 60054 - DNA, 3096 bp, Zea Mays
gccagcccccccaaaccctaggctgccgccaacccgactggctcccccctcactcttctcccgccatgaactaccgcttccagaacctcctcggcgcgccgtaccgcggcggcgacgccgtgttcgcgggagactcacccgttctcctctccgctgttgggaatcgcgtggcctccactgacctcactgcctcctcgtctctcacgcttccgttcgagtcctcatccaacgtcacccgcctcgccacttccccctcgggcgacttcctcctcgcagccgatgacaatggccgcgcgctctacgccaacctccgccgccgcgccgtactccaccgcgtttccttcaagggcgcgccatcagccgtccgcttcagccccgacggtcagctcatcgcggtggccgtcgggaaggtcgtgcagatctggcgctccccggggtttcgcagggagttcttccccttccacctcctccgcactttcccgggcttcgccgctggcgtgacagcattcgattggtcaccggactctgcgttcctcctcgcgtcctgcaaggacttaacagctcggctcttgcctgtcaagaagggactaggaggcaagcctttcctcttccttggccatcgcgcggctgtcgtgggtgccttctttgccacggacaagaagacaaggagagtcaagggggtttatacagtctccaaggatggagctatctttacatgggatttggtggaaggaaatgaggaaaatgatacttcacctccgccatcaccagggacgccagagcaggggtcaaaacaaaatgtcgtcgatgccatggaactggatggtgggagcaggaaaaggaagattttgggagaattagagggactagacactatgctgcatttggcaaaatgggagctgcgggaaaagcatttcttcatgcagtcaccggctaagttaacagcatgtgattaccaccgagaactcgacatggtggtggttggattctctagtggagtatttgggctgtaccagatgccagactttgtgtgcctccatctgttgtcaatatcaagggagaagatcaccactgctattttcaacagttcggggagttggcttgtctttggatgtgccaaacttgggcagcttctggtgtgggagtggcggtcagagagctacattttgaaacagcagggacactactttgatgtgaattgcatcgcatactcaccagattctcagatattggccactggggctgatgataacaaagtcaaggtctggacagtttcatctgggttctgtttcataacattttcggagcatacaaatgctgtaactgcggttcattttatggccaataaccattctcttctaagtgcctcccttgatgggactattcgagcatgggatttgtttcgctatcgcaacttcaggacatttaccaccccttcacctaggcagtttgtttctttaaccgcagaccagagtggagaagtcatatgtgctggaacacttgattcgtttgagatatttgtttggtcaatgaaaactggtcgattgttggatgtactcagtggtcatgaaggaccagtgcatggtctaatgttttcaccaattaatgctattctggcttcatcatcatgggacaaaactgttcgcctctgggatgtctttgagagcaagggtgcagtggaaacttttcagcactcacacgatgttcttactttagcttatcgacctgatggaaggcagatagcatgcagtactttagatggcctaattcatttctgggatccatctgatggtttgttgatgtataccattgagggacgcagggatattgctgggggtcgcctcatgacagataggagatctgcagctaatacaagtataggaaagtacttcacaacattgtgctattctgctgatggaagttctattttagctggaggaaacaccaaatatatttgcatgtatgatgttggagaacaggtgctgttgcgtaggttccagatcactcgcaatctctcattggatggagttcttgattttctgaactcaaagaagatgacagatggtggtgcactagatcttattgacgatgaagacagtgatgttgaagaaggaattgatcgacatactagaggaaacttagggcttggtttacctggatcaatggcaaatcgtggaagacccatggctcggacaaaatgtgttaagtttgctccaactggaagatcgtttgctgcagcgaccactgatggtgttttattgtactcagttgatgaatcatttatttttgatccaacggacctcgacatcgacgttacgcctgagtagaggaagctcttgcagaaaaccaacaacaaagagcccttatacttagccttcggttaaatgaggatttattgattaagaagtgcatattcgcagttgatccagccgatgtgagagcaatttgttcggcaattccttacaagtatctccaaagattgattgatactttcgctagtctcttggaaagttgtccccatctggaatttatcctcctgtggtctcaggagctatgtaaggttcatggccactatattcaacagaactccagaactttgcttccttctctgaaatcattgcagaagtctataacaagactacatcaggatttggcagatacttgctcttctaatgagtacttgttgaaatatctttgcactgctggtacgaagaattaggttgtgctggaaaatatctttgcaccgatctccctgacgatttctataggaggttgttgtgcttgcaaacccagacgcatgcgagctctgagcagttctgctttggacctctagggggattggcatccgggcttaatcctctgggcagtggctgttgtgttcagaactactgagctgaagcaacaatgtaacatgatcgatcctctggagaaagttgagctgtctggttttgtcagtgaaacgagagaaaaaaaatgtcgggaacgattaaagttatgtaacttaccgtgttatcaaatgtttggaccagaactggaaattgatatttgtcatgaatcaaatagaagaaacatgttatattcactcctgtttttttt

SEQ ID NO: 60055 - DNA, 2655 bp, Zea Mays
tagcagaactgactccctcttcttcgtcttcgcgagcagcgaggcatcacacgcgcctgcacgatctcctcctgcgagcgagatctcaccaccgcagcggcgccgtggccatggcgggaaggtactaccagggccagggcggtggcgggggcacgtccatggaggtagtcagcacgccgaaccaggagctggccctcaccaactgtgcatacgtctgccccgcggacctccgtcgcttccccaacgcgctcgccgtcgtcgccgactcctgggtcttcaccctacgtgaacacaatgctgtcgcaagcgggcgcattgccttgaatgctattcaacgtcgtcaggcaaaggtttcagctggggattctgttactgttagcagttttgtcccccctgatgatttcaagttggctttgctcactttggagctagagtatgccaaggcaagagccaaccgaaatgacgagctggatgctgttgtgcttgcccaacaactccgtaagaggtttctggatcaggtcatgaccttggggcaaagggtgccatttgaatttcatggaacaaactatgtattcaccgtcaatcaagctttgctagagggtcaagagagttctacaccattggatagaggattcttgtcaagtgatacatacatcatatttgaggctgctcctaattcaggaattaaggtgatcaaccaaaaggaagctgctagcagcaaacttttcaaacataaagagtttaacctggaaaaattggggataggtgggttaagtgctgaattcactgacatatttcgtagggcattcgcttcaagagtctttcctcctcaagttgtcagtaagttgggcatcaaacatgtaaaaggtatactgctatatggacctcctggtactggcaagactcttatggcacgacaaattggaaaattattgaacggaaaagatcccaagattgtgaatggacctgaagttctgagcaagtttgttggagaaaccgagaagaatgtgagagatttgtttgctgatgctgaaaatgagcagaggacacgaggtgatcagagtgacctccatgtaattatatttgatgaaattgatgccatctgcaagtctagaggatctacccgcgatggtacaggtgtacatgatagcattgtaaaccagctccttacaaagatggtgttgaggcgttgaataacgtattgcttattggaatgaccaatcgtaaagatttgcttgacgaagctttattgagacctggacgattggaagttcacatcgagataaacctgcctgatgaaaatggtcgtttccaaattcttcagattcatacaaataagatgaaagagaattctttcctatctccagatattaatcttcttgagctagccgcaaggacaaagaactacagtggagcagagttggaaggtgttgtcaaaagtgctgtctcgtatgctttgaaccggcagataaccatggatgacctcactaaacctttggatgaggaaagcattaaggttactatggatgactttgtgaatgcacttcatgaaattactcctgcatttggtgcttccaccgatgatctcgaaagatgcagattgcgaggtattgttgactgtggtaaggcacataagcacatttaccagagagctatgctccttgtagagcaagttaaagttagcaaaggtagtccacttgtgacttgcctgttggaaggtcctgctggaagtggtaaaacagctatggcagcaagtgttggcattgacagtgattttgcatatgtgaaaattatatcagcagaaacaatgattggtttcagtgaaagcagtaaatgtgcacagatttgcaaggtttttgaagatgcatacaagtctcagttcagcatcatagttcttgatgatatcgaaaggttactggagtatgtagccattggaccacgtttttcaaacttgatctctcaaactcttctggtcctcctcaagagggttcctcctaagggaaaaaacctgcttgtgattggaacaacaagcgaggttggcttcctagaatctgttggaatgtgtgacgtgttctctgtgacataccatgtccccaagctgaaaaaggaggatgcgaaaaaggtattgcatcatcttgatgtgttcgatgacggggaccttgatgcagcagcagaagcactggatgatatgccaatcaagaagctgtacacgcttgttgagatggctgcacaggggccaaccggaggaagtgcagaagcaatttatgccggagaagacaagatagatatcaaccatttcttcagcatcttaagtgatattatccgttactgagcccgcatggatcctaggtatccagtgggaggttatttgcacctgtgcttcatcaccccttgtggcatccttacagcgtgttaagagtggtttgatgtgttgtttttgtttggtgcgcctactagagctgttggatttgaccagaggcgaattccacgatatagcgttttttgtattgtatgacgatgtttctacagttgataataggatccagctatagacctcagaaaagaaatgaatttcattctccttttacatatggttccagctcttctgtgctcatttttagaatacgaacaatctgttttaaggctgcaaggacg

SEQ ID NO: 60056 - DNA, 2646 bp, Zea Mays
gaactgactccctcttcttcgtcttcgcgagcagcgaggcatcacacgcgcctgcacgatctcctcctgcgagcgagatctcaccaccgcagcggcgccgtggccatggcgggaaggtactaccagggccagggcggtggcgggggcacgtccatggaggtagtcagcacgccgaaccaggagctggccctcaccaactgtgcatacgtctgccccgcggacctccgtcgcttccccaacgcgctcgccgtcgtcgccgactcctgggtcttcaccctacgtgaacacaatgctgtcgcaagcgggcgcattgccttgaatgctattcaacgtcgtcaggcaaaggtttcagctggggattctgttactgttagcagttttgtcccccctgatgatttcaagttggctttgctcactttggagctagagtatgccaaggcaagagccaaccgaaatgacgagctggatgctgttgtgcttgcccaacaactccgtaagaggtttctggatcaggtcatgaccttggggcaaagggtgccatttgaatttcatggaacaaactatgtattcaccgtcaatcaagctttgctagagggtcaagagagttctacaccattggatagaggattcttgtcaagtgatacatacatcatatttgaggctgctcctaattcaggaattaaggtgatcaaccaaaaggaagctgctagcagcaaacttttcaaacataaagagtttaacctggaaaaattggggataggtgggttaagtgctgaattcactgacatatttcgtagggcattcgcttcaagagtctttcctcctcaagttgtcagtaagttgggcatcaaacatgtaaaaggtatactgctatatggacctcctggtactggcaagactcttatggcacgacaaattggaaaattattgaacggaaaagatcccaagattgtgaatggacctgaagttctgagcaagtttgttggagaaaccgagaagaatgtgagagatttgtttgctgatgctgaaaatgagcagaggacacgaggtgatcagagtgacctccatgtaattatatttgatgaaattgatgccatctgcaagtctagaggatctacccgcgatggtacaggtgtacatgatagcattgtaaaccagctccttacaaagatggtgttgaggcgttgaataacgtattgcttattggaatgaccaatcgtaaagatttgcttgacgaagctttattgagacctggacgattggaagttcacatcgagataaacctgcctgatgaaaatggtcgtttccaaattcttcagattcatacaaataagatgaaagagaattctttcctatctccagatattaatcttcttgagctagccgcaaggacaaagaactacagtggagcagagttggaaggtgttgtcaaaagtgctgtctcgtatgctttgaaccggcagataaccatggatgacctcactaaacctttggatgaggaaagcattaaggttactatggatgactttgtgaatgcacttcatgaaattactcctgcatttggtgcttccaccgatgatctcgaaagatattgcgaggtattgttgactgtggtaaggcacataagcacatttaccagagagctatgctccttgtagagcaagttaaagttagcaaaggtagtccacttgtgacttgcctgttggaaggtcctgctggaagtggtaaaacagctatggcagcaagtgttggcattgacagtgattttgcatatgtgaaaattatatcagcagaaacaatgattggtttcagtgaaagcagtaaatgtgcacagatttgcaaggtttttgaagatgcatacaagtctcagttcagcatcatagttcttgatgatatcgaaaggttactggagtatgtagccattggaccacgtttttcaaacttgatctctcaaactcttctggtcctcctcaagagggttcctcctaagggaaaaaacctgcttgtgattggaacaacaagcgaggttggcttcctagaatctgttggaatgtgtgacgtgttctctgtgacataccatgtccccaagctgaaaaaggaggatgcgaaaaaggtattgcatcatcttgatgtgttcgatgacggggaccttgatgcagcagcagaagcactggatgatatgccaatcaagaagctgtacacgcttgttgagatggctgcacaggggccaaccggaggaagtgcagaagcaatttatgccggagaagacaagatagatatcaaccatttcttcagcatcttaagtgatattatccgttactgagcccgcatggatcctaggtatccagtgggaggttatttgcacctgtgcttcatcaccccttgtggcatccttacagcgtgttaagagtggtttgatgtgttgtttttgtttggtgcgcctactagagctgttggatttgaccagaggcgaattccacgatatagcgttttttgtattgtatgacgatgtttctacagttgataataggatccagctatagacctcagaaaagaaatgaatttcattctccttttacatatggttccagctcttctgtgctcatttttagaatacgaacaatctgttttaaggctgcaaggacg

SEQ ID NO: 60057 - DNA, 2647 bp, Zea Mays
ctgactccctcttcttcgtcttcgcgagcagcgaggcatcacacgcgcctgcacgatctcctcctgcgagcgagatctcaccaccgcagcggcgccgtggccatggcgggaaggtactaccagggccagggcggtggcgggggcacgtccatggaggtagtcagcacgccgaaccaggagctggccctcaccaactgtgcatacgtctgccccgcggacctccgtcgcttccccaacgcgctcgccgtcgtcgccgactcctgggtcttcaccctacgtgaacacaatgctgtcgcaagcgggcgcattgccttgaatgctattcaacgtcgtcaggcaaaggtttcagctggggattctgttactgttagcagttttgtcccccctgatgatttcaagttggctttgctcactttggagctagagtatgccaaggcaagagccaaccgaaatgacgagctggatgctgttgtgcttgcccaacaactccgtaagaggtttctggatcaggtcatgaccttggggcaaagggtgccatttgaatttcatggaacaaactatgtattcaccgtcaatcaagctttgctagagggtcaagagagttctacaccattggatagaggattcttgtcaagtgatacatacatcatatttgaggctgctcctaattcaggaattaaggtgatcaaccaaaaggaagctgctagcagcaaacttttcaaacataaagagtttaacctggaaaaattggggataggtgggttaagtgctgaattcactgacatatttcgtagggcattcgcttcaagagtctttcctcctcaagttgtcagttgggcatcaaacatgtaaaaggtatactgctatatggacctcctggtactggcaagactcttatggcacgacaaattggaaaattattgaacggaaaagatcccaagattgtgaatggacctgaagttctgagcaagtttgttggagaaaccgagaagaatgtgagagatttgtttgctgatgctgaaaatgagcagaggacacgaggtgatcagagtgacctccatgtaattatatttgatgaaattgatgccatctgcaagtctagaggatctacccgcgatggtacaggtgtacatgatagcattgtaaaccagctccttacaaagatagatggtgttgaggcgttgaataacgtattgcttattggaatgaccaatcgtaaagatttgcttgacgaagctttattgagacctggacgattggaagttcacatcgagataaacctgcctgatgaaaatggtcgtttccaaattcttcagattcatacaaataagatgaaagagaattctttcctatctccagatattaatcttcttgagctagccgcaaggacaaagaactacagtggagcagagttggaaggtgttgtcaaaagtgctgtctcgtatgctttgaaccggcagataaccatggatgacctcactaaacctttggatgaggaaagcattaaggttactatggatgactttgtgaatgcacttcatgaaattactcctgcatttggtgcttccaccgatgatctcgaaagatgcagattgcgaggtattgttgactgtggtaaggcacataagcacatttaccagagagctatgctccttgtagagcaagttaaagttagcaaaggtagtccacttgtgacttgcctgttggaaggtcctgctggaagtggtaaaacagctatggcagcaagtgttggcattgacagtgattttgcatatgtgaaaattatatcagcagaaacaatgattggtttcagtgaaagcagtaaatgtgcacagatttgcaaggtttttgaagatgcatacaagtctcagttcagcatcatagttcttgatgatatcgaaaggttactggagtatgtagccattggaccacgtttttcaaacttgatctctcaaactcttctggtcctcctcaagagggttcctcctaagggaaaaaacctgcttgtgattggaacaacaagcgaggttggcttcctagaatctgttggaatgtgtgacgtgttctctgtgacataccatgtccccaagctgaaaaaggaggatgcgaaaaaggtattgcatcatcttgatgtgttcgatgacggggaccttgatgcagcagcagaagcactggatgatatgccaatcaagaagctgtacacgcttgttgagatggctgcacaggggccaaccggaggaagtgcagaagcaatttatgccggagaagacaagatagatatcaaccatttcttcagcatcttaagtgatattatccgttactgagcccgcatggatcctaggtatccagtgggaggttatttgcacctgtgcttcatcaccccttgtggcatccttacagcgtgttaagagtggtttgatgtgttgtttttgtttggtgcgcctactagagctgttggatttgaccagaggcgaattccacgatatagcgttttttgtattgtatgacgatgtttctacagttgataataggatccagctatagacctcagaaaagaaatgaatttcattctccttttacatatggttccagctcttctgtgctcatttttagaatacgaacaatctgttttaaggctgcaaggacg

SEQ ID NO: 60058 - DNA, 1578 bp, Zea Mays
ctttaacagggtgccagactctcaaatacgacaagtctagaggatctacccgcgatggtacaggtgtacatgatagcattgtaaaccagctccttacaaagatagatggtgttgaggcgttgaataacgtattgcttattggaatgaccaatcgtaaagatttgcttgacgaagctttattgagacctggacgattggaagttcacatcgagataaacctgcctgatgaaaatggtcgtttccaaattcttcagattcatacaaataagatgaaagagaattctttcctatctccagatattaatcttcttgagctaggacaaagaactacagtggagcagagttggaaggtgttgtcaaaagtgctgtctcgtatgctttgaaccggcagataaccatggatgacctcactaaacctttggatgaggaaagcattaaggttactatggatgactttgtgaatgcacttcatgaaattactcctgcatttggtgcttccaccgatgatctcgaaagatgcagattgcgaggtattgttgactgtggtaaggcacataagcacatttaccagagagctatgctccttgtagagcaagttaaagttagcaaaggtagtccacttgtgacttgcctgttggaaggtcctgctggaagtggtaaaacagctatggcagcaagtgttggcattgacagtgattttgcatatgtgaaaattatatcagcagaaacaatgattggtttcagtgaaagcagtaaatgtgcacagatttgcaaggtttttgaagatgcatacaagtctcagttcagcatcatagttcttgatgatatcgaaaggttactggagtatgtagccattggaccacgtttttcaaacttgatctctcaaactcttctggtcctcctcaagagggttcctcctaagggaaaaaacctgcttgtgattggaacaacaagcgaggttggcttcctagaatctgttggaatgtgtgacgtgttctctgtgacataccatgtccccaagctgaaaaaggaggatgcgaaaaaggtattgcatcatcttgatgtgttcgatgacggggaccttgatgcagcagcagaagcactggatgatatgccaatcaagaagctgtacacgcttgttgagatggctgcacaggggccaaccggaggaagtgcagaagcaatttatgccggagaagacaagatagatatcaaccatttcttcagcatcttaagtgatattatccgttactgagcccgcatggatcctaggtatccagtgggaggttatttgcacctgtgcttcatcaccccttgtggcatccttacagcgtgttaagagtggtttgatgtgttgtttttgtttggtgcgcctactagagctgttggatttgaccagaggcgaattccacgatatagcgttttttgtattgtatgacgatgtttctacagttgataataggatccagctatagacctcagaaaagaaatgaatttcattctccttttacatatggttccagctcttctgtgctcatttttagaatacgaacaatctgttttaaggctgcaaggacg

SEQ ID NO: 60059 - DNA, 900 bp, Zea Mays
cccgttaataattaaaatccatcacaacccaccaaaacaaaaccatttcttaaacccacctaaaatacccatttgcacccaccccatttgcaggcctaactgcaagacgttaatttcagggctgagagagctcccatcggtggttaaccatatactctccttggattcacttgcgcatgtcgctgtcggagaagaagccagccgagttgcgagccatctcgatccttgtacatctacttttccgcgtagtcattcctgacaaggagagattgtattagagcaattgcacaggaaggtggcgtacaagaactccaatggatggatggatggatgcaagtgtgtaaactttcttcagtcctacgaaatcaataagctaagcgtggttttgaaataaaaggataagatagaatacaaaccaggtttagtcctagaggttataaccattaaggctcactccaacgggaggcatgtaattgggcagtcatctgtacttttgactagtgtctgaagttaccagctcagtcatacgctagatctttctaacagcacagctatccatatgttcagctggaatgaagtagacgctggagcccaatggttagtcaagaacgaagaattcagctgtagatcacagtaccagtcaatatggtttttctctctcatgccttccattttgcctagcccgtttagctgcttcgttggaagaagaattgcactgctgtagtggcttcagagcagctattttagctttgcctggccggacggctggtccattcgagtgagcctaaggccttagacgtgtcggactgtactgtactgaacagtgctgcacatcgacaaaactagtagcacgcaggtcaacagtagtagttgcagcgtctgcagaagcttccacggctt

SEQ ID NO: 60060 - DNA, 1801 bp, Zea Mays
cgagggcatccctccagactccagtgatccagtccgtggccgtggcgtgctggaccggcggctaggcgggcacgtcagccgccagctaagcgaccaactcttcaaaaccccggtctctccctcgagcagtcgagctcctccggtctctgccatgaacagcaaatgagcagagctcccaagccgttcaatctccagatcatttccctctcgtcctgctccaatccactcgccggccatctccacaggctcgcctcggctgctgcagctgggttttgctccctgagccgccggatttcgacaggggtcgggtcggccgtccgatggggagcagggtgaaggaggacgagaggaacgagaagatcatccggggtctgctcaagctccctggcaaccgccggtgcatcaactgcaacagcctggggccacaatatgtatgcacaagcttctctactttcatctgtactaattgcagcgggatacaccgagagttcagtcatcgtgtaaaatcagtatcgatggctaaattcacttcccaagaagtttcggcacttcaggaagggggcaatgagcgtgctaaggaaatctatttcaagcattgggacttgcaaggccctgttattgacagtagtgatgtacatagactcagaaatttcatcaagaatgtatatgttgaacggagatattcagaccaaagaattggcgaacatttagcgcaagcaaagaaaccatcatcttcgaggaccgacgatcccagccctgcaacattcaaagatgctaaattatatatgtcaaaaaatctgattgacttcgattcagatctggaacctcctcaaggtgttgctcagactgatattcagaagggctcttcacctcaaacagatatcgccgatttgacatcagcaccacaaattagattttcaaatgccaagtccttgtcttttgccccgtcaaatcgtggaaaccaactgaaccaacagaatttctctcctgtgaatactacacagtacagcaatactctgttgaacagagctactagtgctccagtgcatagccaggatatttttgcaatgagctatcgtccagtatcttcagcctggaactggcaaccaaatcccagtgtaaacatgcagtacggacaacatcgcacgcattatcctgttgggattgtaaatacaactcaacttgcccatccatatccagtgaatcctgttagcttggcaggagggcctgcatcggctcatgcctccaccaggtttccttctttaacttctatgcaagaagcattaccaaatctgggcagtaccgcagtgctgtcgcgtgctccagttcatcagtacatggttcagcaacatacagttcaagtaccgaattatactttcccctccggatatgaaggaaccagagggatcgccgcaactgccagcacatacggattacctccaatggatcagcgtttggctgcgcagaatctgcaggtcatgaaccacggttctttaccccgagttggtgggaacccgtttgcttagtgttgttacttcggtcacctcagttcggtcgtttgtgtatagttttagcatttgatgatacggttttgtcgtgagaagatgcgagtggaataatgtagctgatcaagcagagtggcaacaagtgcctgacaggttttgtgtatatgatttttattttcgctatggaaggtgtcgattgctccatctccgtcgtccctcccagtcccagctgcaactgcaacctctgctgttcctgttgtgccgcccgtggaatagcagctcaaaagcccccagag

SEQ ID NO: 60061 - DNA, 2213 bp, Zea Mays
cagtgatccagtccgtggccgtggcgtgctggaccggcggctaggcgggcacgtcagccgccagctaagcgaccaactcttcaaaaccccggtctctccctcgagcagtcgagctcctccggtctctgccatgaacagcaaatgagcagagctcccaagccgttcaatctccagatcatttccctctcgtcctgctccaatccactcgccggccatctccacaggctcgcctcggctgctgcagctgggttttgctccctgagccgccggatttcgacaggggtcgggtcggccgtccgatggggagcagggtgaaggaggacgagaggaacgagaagatcatccggggtctgctcaagctccctggcaaccgccggtgcatcaactgcaacagcctggggccacaatatgtatgcacaagcttctctactttcatctgtactaattgcagcgggatacaccgagagttcagtcatcgtgtaaaatcagtatcgatggctaaattcacttcccaagaagtttcggcacttcaggaagggggcaatgagcgtgctaaggaaatctatttcaagcattgggacttgcaaggccctgttattgacagtagtgatgtacatagactcagaaatttcatcaagaatgtatatgttgaacggagatattcagaccaaagaattggcgaacatttagcgcaagcaaagaaaccatcatcttcgaggaccgacgatcccagccctgcaacattcaaagatgctaaattatatatgtcaaaaaatctgattgacttcgattcagatctggaacctcctcaaggtgttgctcagactgatattcagaagggctcttcacctcaaacagatgttggttgggcaacttttgatgatgctacatccaaaaaaactacaaccatgccttcaacttccagtactaattttttggagggtccaatgctacagatcgccgatttgacatcagcaccacaaattagattttcaaatgccaagtccttgtcttttgccccgtcaaatcgtggaaaccaactgaaccaacagaatttctctcctgtgaatactacacagtacagcaatactctgttgaacagagctactagtgctccagtgcatagccaggttagtgttgtccttctattagaagacaccagcttttcagatgacaaatattttaaacttgttcctttgcgagcattttttatttatggagagctgcatcgcctacgccaactacacaatggggaagtattcttcctgctaatcaggggtcaaatatgatagtaactcacaatccggctatagtatcagcatcccagcaacctgctgctgaggccacatctaatggcggaaaggcacttccagatggagttggggggtgcctgaacaatttgtgttctgtgctcccattattctttttcttgtatgccttttgttctaaagccaggaagttttgtaggatatttttgcaatgagctatcgtccagtatcttcagcctggaactggcaaccaaatcccagtgtaaacatgcagtacggacaacatcgcacgcattatcctgttgggattgtaaatacaactcaacttgcccatccatatccagtgaatcctgttagcttggcaggagggcctgcatcggctcatgcctccaccaggtttccttctttaacttctatgcaagaagcattaccaaatctgggcagtaccgcagtgctgtcgcgtgctccagttcatcagtacatggttcagcaacatacagttcaagtaccgaattatactttcccctccggatatgaaggaaccagagggatcgccgcaactgccagcacatacggattacctccaatggatcagcgtttggctgcgcagaatctgcaggtcatgaaccacggttctttaccccgagttggtgggaacccgtttgcttagtgttgttacttcggtcacctcagttcggtcgtttgtgtatagttttagcatttgatgatacggttttgtcgtgagaagatgcgagtggaataatgtagctgatcaagcagagtggcaacaagtgcctgacaggttttgtgtatatgatttttattttcgctatggaaggtgtcgattgctccatctccgtcgtccctcccagtcccagctgcaactgcaacctctgctgttcctgttgtgccgcccgtggaatagcagctcaaaagcccccagag

SEQ ID NO: 60062 - DNA, 1657 bp, Zea Mays
cagtgatccagtccgtggccgtggcgtgctggaccggcggctaggcgggcacgtcagccgccagctaagcgaccaactcttcaaaaccccggtctctccctcgagcagtcgagctcctccggtctctgccatgaacagcaaatgagcagagctcccaagccgttcaatctccagatcatttccctctcgtcctgctccaatccactcgccggccatctccacaggctcgcctcggctgctgcagctgggttttgctccctgagccgccggatttcgacaggggtcgggtcggccgtccgatggggagcagggtgaaggaggacgagaggaacgagaagatcatccggggtctgctcaagctccctggcaaccgccggtgcatcaactgcaacagcctggggccacaatatgtatgcacaagcttctctactttcatctgtactaattgcagcgggatacaccgagagttcagtcatcgtgtaaaatcagtatcgatggctaaattcacttcccaagaagtttcggcacttcaggaagggggcaatgagcgtgctaaggaaatctatttcaagcattgggacttgcaaggccctgttattgacagtagtgatgtacatagactcagaaatttcatcaagaatgtatatgttgaacggagatattcagaccaaagaattggcgaacatttagcgcaagcaaagaaaccatcatcttcgaggaccgacgatcccagccctgcaacattcaaagatgctaaattatatatgtcaaaaaatctgattgacttcgattcagatctggaacctcctcaaggtgttgctcagactgatattcagaagggctcttcacctcaaacagatgttggttgggcaacttttgatgatgctacatccaaaaaaactacaaccatgccttcaacttccagtactaattttttggagggtccaatgctacagatcgccgatttgacatcagcaccacaaattagattttcaaatgccaagtccttgtcttttgccccgtcaaatcgtggaaaccaactgaaccaacagaatttctctcctgtgaatactacacagtacagcaatactctgttgaacagagctactagtgctccagtgcatagccaggatatttttgcaatgagctatcgtccagtatcttcagcctggaactggcaaccaaatcccagtgtaaacatgcagtacggacaacatcgcacgcattatcctgttgggattgtaaatacaactcaacttgcccatccatatccagtgaatcctgttagcttggcaggagggcctgcatcggctcatgcctccaccaggtttccttctttaacttctatgcaagaagcattaccaaatctgggcagtaccgcagtgctgtcgcgtgctccagttcatcagtacatggttcagcaacatacagttcaagtaccgaattatactttcccctccggatatgaaggaaccagagggatcgccgcaactgccagcacatacggattacctccaatggatcagcgtttggctgcgcagaatctgcaggtgtcgattgctccatctccgtcgtccctcccagtcccagctgcaactgcaacctctgctgttcctgttgtgccgcccgtggaatagcagctcaaaagcccccagag

SEQ ID NO: 60063 - DNA, 1208 bp, Zea Mays
gcaacatcatctaatacctctactgaagcacagaaaccatcatcttcgaggaccgacgatcccagccctgcaacattcaaagatgctaaattatatatgtcaaaaaatctgattgacttcgattcagatctggaacctcctcaaggtgttgctcagactgatattcagaagggctcttcacctcaaacagatgttggttgggcaacttttgatgatgctacatccaaaaaaactacaaccatgccttcaacttccagtactaattttttggagggtccaatgctacagatcgccgatttgacatcagcaccacaaattagattttcaaatgccaagtccttgtcttttgccccgtcaaatcgtggaaaccaactgaaccaacagaatttctctcctgtgaatactacacagtacagcaatactctgttgaacagagctactagtgctccagtgcatagccaggatatttttgcaatgagctatcgtccagtatcttcagcctggaactggcaaccaaatcccagtgtaaacatgcagtacggacaacatcgcacgcattatcctgttgggattgtaaatacaactcaacttgcccatccatatccagtgaatcctgttagcttggcaggagggcctgcatcggctcatgcctccaccaggtttccttctttaacttctatgcaagaagcattaccaaatctgggcagtaccgcagtgctgtcgcgtgctccagttcatcagtacatggttcagcaacatacagttcaagtaccgaattatactttcccctccggatatgaaggaaccagagggatcgccgcaactgccagcacatacggattacctccaatggatcagcgtttggctgcgcagaatctgcaggtcatgaaccacggttctttaccccgagttggtgggaacccgtttgcttagtgttgttacttcggtcacctcagttcggtcgtttgtgtatagttttagcatttgatgatacggttttgtcgtgagaagatgcgagtggaataatgtagctgatcaagcagagtggcaacaagtgcctgacaggttttgtgtatatgatttttattttcgctatggaaggtgtcgattgctccatctccgtcgtccctcccagtcccagctgcaactgcaacctctgctgttcctgttgtgccgcccgtggaatagcagctcaaaagcccccagag

SEQ ID NO: 60064 - DNA, 1614 bp, Zea Mays
cagagatgctaacaggtcaacacttgacgaatctgtgtatctacatcgcttaattagtcatcaagactagacactttcagctcctgacctacgtgatccggggatttcagccatcatagcctccaaactgagggaatttcacagcctcgacatgcctggttcaaaatccgtgctcatctgggaaagattaaggaactggctcagaactgccaagagcctgtactcctcctctgatgaaaccgaagagttctgcttggatagcatggaggaggagatcgctgcgctggagaacgagttctcaggggagtgcgagcgcgtaggattttgccataacgatctccagtatgggaacatcatgatcgacgaagagacgaggctactgaccatcattgactacgagtatgcaggttttaacccagttgcttatgacatcgcaaaccatttctgtgaaatggccgcagactaccattcagaaaagcctcacatattggactacagcaaatatccagataccgatgagcggaagcaatttgtgcggacatacctgagctcctcaggtgaggaatctgaagaggaggtagagaacctgatcaaaagcattgagaagtacaccctcgccagccacctagtttggggcctatggggaataatttcggatcatgtcaacgatatcgacttcgactataaggattacgctaggcagaggttcgagcagtactggctgaagaagccgaccatccttgcttctcagactgctgaatagaacccacccatcaggttctgcactccaccgatgtgctgcacatagcttgtccattcttctctgctcattgagacttgaggtctgtgtccctggggaacaaggctgtgaagaaaaggctggacccagaagtcagctcaggcattcaggtagatcacaggcctgttaatagtgtgaggcgacatactgttgataaaaaaaccctgactgcatgttgtatgatggtatggtcacttggtgtgtgcgtgcgcgtgagtgtgcgtgcttggtttactggctagattagtgctgcatctgcctctgtgcgcgcttcagtgtatgcaaaacatacgtattggaaatcagataaagattcctgcaggttctgtacctctgtatttggtgcatgtcgttctttaatcctgagagaatggcagaatcagtgatgccggttacatcactaataaacggctcattctccttattaccattccccttgaaaagatagtggtgttaaccatgctgagttctgcctcggatccttgtctagggttaatcattctgcaagggttggcaccccactgcctatcatcacatgaatgtcaaatgtcacgattttagttggtcactgaaaattgcatgaattatggtcttctgcgtgcaaaccctttttctgcaatattgctagatgatgttactatcaacaatgctacacatggtatttctgtatccactttatccatttcatgcctccatataggcgcaccatgtcaaaatctgcggcacttccatttaatgccaaatcatccaaaaatcactattcatccccaacaagaaaagcttgtagcttgttgccgctctgcacccagctatag

SEQ ID NO: 60065 - DNA, 2538 bp, Zea Mays
tgagcggcagcggcccagccccgtccgtacgcgcctggccacctcctccgcaggaccgcagccctaccctctatcgcagcacgcgcgcgcctgttcacctccgccgcagcactagcgcggcacgcgcctgctcgcctccatccccggccaccgcggcgtcgcccacgcacgggcacgactcactctagccgaccagctccggccgccgcccaccgccacgcaggcgtgcactccagcagtgagcggtccagcctcggccaccgctcgtgccccgtggcccacgtgcgtcgctgcatccaggatcgacccaccggcgcggtcgtccggccagccgcagctccggcccggaacccgccccgccccgcccctgccggctgtgtccagcgcggcagcgcccagtggcccagcggctggcgccccctcgattcctccacacccgctccgtctcagccccctgcccctactgccacctgcgattgtctctgcagtatgtggcaaatgttcaaatcctaggtccgccattgcacctgaagcgtagctctaggaacaagacgtgtctagttgtgtgcgttgggactgggggaggaataagggattgatggccaacagcgagtatgagtacgtgaagagggagttcgagtttgatcgctgcctcccgccctctaactggatcgttgtccgtatcgacggttgccacttccacaggttctcaaaggtccacgcctttgagaaaccaaatgatgagaacgctctaagattaatgaacgcttgtgccactgctgtgctcgagaaatttcctgacatagcctttgcttatggtgttagtgatgagtacagtttcattttcagagaggaaacagagttctatcaccggcgagaaagcaaaattctctctttatgtgtttcctacttcacttctgtgtacgtaatgaagtggaaagacttctttcctaacaaagagctgaaggagccaccatattttgatgctcgagctgtatgttacccgaatttgaagactattcgtgattatttggcttggagacaagtggactgtaagctactggaattgattcaaattatcttgtatagcaaacgccacctcatatttgttcacacaactttttttttgccctgaagtcctacaaggaaactacattatatacaccaaagttgtacaaagcatgaaccttcgtgaacataaaaagaaaagagtgatctatgtacgtgtcagaatcaaacagtaattttgttagttcactgatatgcatattctttgtttgtgccttcaggtcatataaataatcagtacaatacctgcttctggatgttggtgaaatctggaaaaagtgaacaagaggcccagctagctttgaagggaacatttgcaaaggacaagaatgagctgcttgctaaacaattccaaataaactatgatgatgaactggctatgttccgcaaaggatctagtgtttaccgagagaaggtagaaacaactgtgaagattgatgactatggggagcccataaaaagaccaagattgaaagttacagtggcacatgttgataccatagggactgcgttttgggaaaaccatccacacattcttcgagaaggaaaatttatgcacgggtttgtaaagaaatttggcatcaatcacatattttcaccttgtaattggatcattgttcgcatcattgcttgccaatttgaccaattctcaacaattcattcatttgacaagccaaatgatgagactgcactaaggctgatgaatgaatctgcatctttgatgatggagcaataccctgacattgtctttggctatggttttagcaatgagtatagttttgtgttccatgagaagagtgaactataccagagacgggaaagcctaatcctttcatcatgttcttcatatttcacttctctttacatgacgaaatggaaagagttcttcccctacacagaattaatgcagacaccacactttgaggcagatgctctatgttatccaaaactaaagatcatatgtgaatacttatcatggaggcaagcagagtgtcatgctggcaaccaatacaacacatgcttttggatgctagtgaaatctggaaaaagcgaaaaagaagcccatgagatattgaagggaacgttgtctaaagataaaaacgagttgctttttcagcaattccaaatgaactacaacaatgaacctgctatgttccgaaagggttcatgtgtctatcggcgaaaggtggaagaacttgcgggggctgaggacggcggcaatggcacatcaagagagcggtggcatgtgaaggtggaccacgttgacctagggcccggtttctggcgaaagcacccgtggttaatgactaattgcactcagtagtcccgactgatacatggtttttgtactggtttatcagtgtatgtaactcttgctgacacaggtctagaaacgaaagacggttgtttgttcacacatcgaggcttctcttcaccctctattatgttctgatggttttctgagtcgtc

SEQ ID NO: 60066 - DNA, 2249 bp, Zea Mays
tgagcggcagcggcccagccccgtccgtacgcgcctggccacctcctccgcaggaccgcagccctaccctctatcgcagcacgcgcgcgcctgttcacctccgccgcagcactagcgcggcacgcgcctgctcgcctccatccccggccaccgcggcgtcgcccacgcacgggcacgactcactctagccgaccagctccggccgccgcccaccgccacgcaggcgtgcactccagcagtgagcggtccagcctcggccaccgctcgtgccccgtggcccacgtgcgtcgctgcatccaggatcgacccaccggcgcggtcgtccggccagccgcagctccggcccggaacccgccccgccccgcccctgccggctgtgtccagcgcggcagcgcccagtggcccagcggctggcgccccctcgattcctccacacccgctccgtctcagccccctgcccctactgccacctgcgattgtctctgcagtatgtggcaaatgttcaaatcctaggtccgccattgcacctgaagcgtagctctaggaacaagacgtgtctagttgtgtgcgttgggactgggggaggaataagggattgatggccaacagcgagtatgagtacgtgaagagggagttcgagtttgatcgctgcctcccgccctctaactggatcgttgtccgtatcgacggttgccacttccacaggttctcaaaggtccacgcctttgagaaaccaaatgatgagaacgctctaagattaatgaacgcttgtgccactgctgtgctcgagaaatttcctgacatagcctttgcttatggtgttagtgatgagtacagtttcattttcagagaggaaacagagttctatcaccggcgagaaagtggaaagacttctttcctaacaaagagctgaaggagccaccatattttgatgctcgagctgtatgttacccgaatttgaagactattcgtgattatttggcttggagacaagtggactgtcatataaataatcagtacaatacctgcttctggatgttggtgaaatctggaaaaagtgaacaagaggcccagctagctttgaagggaacatttgcaaaggacaagaatgagctgcttgctaaacaattccaaataaactatgatgatgaactggctatgttccgcaaaggatctagtgtttaccgagagaaggtagaaacaactgtgaagattgatgactatggggagcccataaaaagaccaagattgaaagttacagtggcacatgttgataccatagggactgcgttttgggaaaaccatccacacattcttcgagaaggaaaatttatgcacgggtttgtaaagaaatttggcatcaatcacatattttcaccttgtaattggatcattgttcgcatcattgcttgccaatttgaccaattctcaacaattcattcatttgacaagccaaatgatgagactgcactaaggctgatgaatgaatctgcatctttgatgatggagcaataccctgacattgtctttggctatggttttagcaatgagtatagttttgtgttccatgagaagagtgaactataccagagacgggaaagcctaatcctttcatcatgttcttcatatttcacttctctttacatgacgaaatggaaagagttcttcccctacacagaattaatgcagacaccacactttgaggcagatgctctatgttatccaaaactaaagatcatatgtgaatacttatcatggaggcaagcagagtgtcatgctggcaaccaatacaacacatgcttttggatgctagtgaaatctggaaaaagcgaaaaagaagcccatgagatattgaagggaacgttgtctaaagataaaaacgagttgctttttcagcaattccaaatgaactacaacaatgaacctgctatgttccgaaagggttcatgtgtctatcggcgaaaggtggaagaacttgcgggggctgaggacggcggcaatggcacatcaagagagcggtggcatgtgaaggtggaccacgttgacctagggcccggtttctggcgaaagcacccgtggttaatgactaattgcactcagtagtcccgactgatacatggtttttgtactggtttatcagtgtatgtaactcttgctgacacaggtctagaaacgaaagacggttgtttgttcacacatcgaggcttctcttcaccctctattatgttctgatggttttctgagtcgtc

SEQ ID NO: 60067 - DNA, 2133 bp, Zea Mays
tgagcggcagcggcccagccccgtccgtacgcgcctggccacctcctccgcaggaccgcagccctaccctctatcgcagcacgcgcgcgcctgttcacctccgccgcagcactagcgcggcacgcgcctgctcgcctccatccccggccaccgcggcgtcgcccacgcacgggcacgactcactctagccgaccagctccggccgccgcccaccgccacgcaggcgtgcactccagcagtgagcggtccagcctcggccaccgctcgtgccccgtggcccacgtgcgtcgctgcatccaggatcgacccaccggcgcggtcgtccggccagccgcagctccggcccggaacccgccccgccccgcccctgccggctgtgtccagcgcggcagcgcccagtggcccagcggctggcgccccctcgattcctccacacccgctccgtctcagccccctgcccctactgccacctgcgattgtctctgcagtatgtggcaaatgttcaaatcctaggtccgccattgcacctgaagcgtagctctaggaacaagacgtgtctagttgtgtgcgttgggactgggggaggaataagggattgatggccaacagcgagtatgagtacgtgaagagggagttcgagtttgatcgctgcctcccgccctctaactggatcgttgtccgtatcgacggttgccacttccacaggttctcaaaggtccacgcctttgagaaaccaaatgatgagaacgctctaagattaatgaacgcttgtgccactgctgtgctcgagaaatttcctgacatagcctttgcttatggtgttagtgatgagtacagtttcattttcagagaggaaacagagttctatcaccggcgagaaaggtcatataaataatcagtacaatacctgcttctggatgttggtgaaatctggaaaaagtgaacaagaggcccagctagctttgaagggaacatttgcaaaggacaagaatgagctgcttgctaaacaattccaaataaactatgatgatgaactggctatgttccgcaaaggatctagtgtttaccgagagaaggtagaaacaactgtgaagattgatgactatggggagcccataaaaagaccaagattgaaagttacagtggcacatgttgataccatagggactgcgttttgggaaaaccatccacacattcttcgagaaggaaaatttatgcacgggtttgtaaagaaatttggcatcaatcacatattttcaccttgtaattggatcattgttcgcatcattgcttgccaatttgaccaattctcaacaattcattcatttgacaagccaaatgatgagactgcactaaggctgatgaatgaatctgcatctttgatgatggagcaataccctgacattgtctttggctatggttttagcaatgagtatagttttgtgttccatgagaagagtgaactataccagagacgggaaagcctaatcctttcatcatgttcttcatatttcacttctctttacatgacgaaatggaaagagttcttcccctacacagaattaatgcagacaccacactttgaggcagatgctctatgttatccaaaactaaagatcatatgtgaatacttatcatggaggcaagcagagtgtcatgctggcaaccaatacaacacatgcttttggatgctagtgaaatctggaaaaagcgaaaaagaagcccatgagatattgaagggaacgttgtctaaagataaaaacgagttgctttttcagcaattccaaatgaactacaacaatgaacctgctatgttccgaaagggttcatgtgtctatcggcgaaaggtggaagaacttgcgggggctgaggacggcggcaatggcacatcaagagagcggtggcatgtgaaggtggaccacgttgacctagggcccggtttctggcgaaagcacccgtggttaatgactaattgcactcagtagtcccgactgatacatggtttttgtactggtttatcagtgtatgtaactcttgctgacacaggtctagaaacgaaagacggttgtttgttcacacatcgaggcttctcttcaccctctattatgttctgatggttttctgaaaaaaata

SEQ ID NO: 60068 - DNA, 1741 bp, Zea Mays
atgccgccgccctccctcgtctccatcctccccgccgcgtccatctcgccacgaagacgccaagcaaagcaccccaagacccccaccgcgagccatcccttcttctcccgaagacttgtgtcccaaccgccgcgccacgcctcgatctccccctccgctgccggcgggagcgggagcgacgagctccaccttctcgagaagccgttacctgccgtcgcagaggataacgaggccgaggaggagctcgagtctgctccggtgtcatcaacagaagaagcgctcgcgccttttctcaagttcttccaggtgaagagcaccgaccccgacgtgggcgcagacaccgcggatggcgaggtgccggaggaggcgtcaaggagagatgtattgtccgccgctggtgagcgtggggttagttactacgaccccaagcccggggacttcgtcgccggcgtcgtggtccggagtgacgggaggacgctcgacgtcgacatcggttccagcggcgaaccagcgctgatgctggccaaggagtcggcgccggtgcccgcggaggagttcgggtacctagcgtgcgacgtcgcgtccaagtgtgcggcggagtttgcagcggaagggcgggtcggcgtcgtggtcaggcaattcaggggaggaggagagggggacggggaggcgatcatcgggaggaatgggaaggagaaagttgcgccggtgctgcgcgccggtacgatcgtgttcgctgaggttctcggccgaacacttggcgggcggccgctgctgtcagcgcgcagactgttccggcgcgtcgcgtggcacagagcgagataaaacagctaaatgtacccatcaagatcaaaatttatgagtggaatgctagtggcttgctatctagaattgagggccttcgggcattccttcccaaacctgagatgatgactagaccaagaaatttcactgacctaaagaacaaagttgatcaagaaatgcatgtctgcattacgaggattgatgaagagaccaacgaattgataattagtgaaaaagaggcatgggcggtgacatgccttagagaagggactctcttgcaaggcacagtacgcaagttgtttccatacggtgcacaaattaggattggcgagactaacagaggtggtttactacatatctcgaacatgacacatggcaagctgagatctgtggctgatgtgctgaaagtcggcgagacggtgaaagctcttgtcataaaatcaactccagacagaattgctctgagcacaaaggacctcgagagcgaacctggattgcttatcactaacaaagagaaggtgttttctgaggctgaagagatggcgcgaagataccgggagcaaattgcagagccacagccacctggatccattgccgcggaagactcctgtgacgatgctgtccccttcaacgacgaatcccggtcctatgctaactggaagtggctgaaatttagcaagtccgacgacgtggcaaaccccaaatctggcgtcgaatcgtaatcgtggtgcaggaactctgtagaaattttgatcaattcagatattcagtttccatgcttacttaattgtgcggcttggcgccttggccgcctgcacccgggaaggtccgcgaggggcgacgctcgggttgcttcgacttcgaagcgtggtcgccgaaggtttttgcgatctcactccaactccgagcacgccactacgccagggacttgggcttg

SEQ ID NO: 60069 - DNA, 1328 bp, Zea Mays
atgccgccgccctccctcgtctccatcctccccgccgcgtccatctcgccacgaagacgccaagcaaagcaccccaagacccccaccgcgagccatcccttcttctcccgaagacttgtgtcccaaccgccgcgccacgcctcgatctccccctccgctgccggcgggagcgggagcgacgagctccaccttctcgagaagccgttacctgccgtcgcagaggataacgaggccgaggaggagctcgagtctgctccggtgtcatcaacagaagaagcgctcgcgccttttctcaagttcttccaggtgaagagcaccgaccccgacgtgggcgcagacaccgcggatggcgaggtgccggaggaggcgtcaaggagagatgtattgtccgccgctggtgagcgtgggataaaacagctaaatgtacccatcaagatcaaaatttatgagtggaatgctagtggcttgctatctagaattgagggccttcgggcattccttcccaaacctgagatgatgactagaccaagaaatttcactgacctaaagaacaaagttgatcaagaaatgcatgtctgcattacgaggattgatgaagagaccaacgaattgataattagtgaaaaagaggcatgggcggtgacatgccttagagaagggactctcttgcaaggcacagtacgcaagttgtttccatacggtgcacaaattaggattggcgagactaacagaggtggtttactacatatctcgaacatgacacatggcaagctgagatctgtggctgatgtgctgaaagtcggcgagacggtgaaagctcttgtcataaaatcaactccagacagaattgctctgagcacaaaggacctcgagagcgaacctggattgcttatcactaacaaagagaaggtgttttctgaggctgaagagatggcgcgaagataccgggagcaaattgcagagccacagccacctggatccattgccgcggaagactcctgtgacgatgctgtccccttcaacgacgaatcccggtcctatgctaactggaagtggctgaaatttagcaagtccgacgacgtggcaaaccccaaatctggcgtcgaatcgtaatcgtggtgcaggaactctgtagaaattttgatcaattcagatattcagtttccatgcttacttaattgtgcggcttggcgccttggccgcctgcacccgggaaggtccgcgaggggcgacgctcgggttgcttcgacttcgaagcgtggtcgccgaaggtttttgcgatctcactccaactccgagcacgccactacgccagggacttgggcttg

SEQ ID NO: 60070 - DNA, 1301 bp, Zea Mays
atgccgccgccctccctcgtctccatcctccccgccgcgtccatctcgccacgaagacgccaagcaaagcaccccaagacccccaccgcgagccatcccttcttctcccgaagacttgtgtcccaaccgccgcgccacgcctcgatctccccctccgctgccggcgggagcgggagcgacgagctccaccttctcgagaagccgttacctgccgtcgcagaggataacgaggccgaggaggagctcgagtctgctccggtgtcatcaacagaagaagcgctcgcgccttttctcaagttcttccaggtgaagagcaccgaccccgacgtgggcgcagacaccgcggatggcgaggtgccggaggaggcgtcaaggagagatataaaacagctaaatgtacccatcaagatcaaaatttatgagtggaatgctagtggcttgctatctagaattgagggccttcgggcattccttcccaaacctgagatgatgactagaccaagaaatttcactgacctaaagaacaaagttgatcaagaaatgcatgtctgcattacgaggattgatgaagagaccaacgaattgataattagtgaaaaagaggcatgggcggtgacatgccttagagaagggactctcttgcaaggcacagtacgcaagttgtttccatacggtgcacaaattaggattggcgagactaacagaggtggtttactacatatctcgaacatgacacatggcaagctgagatctgtggctgatgtgctgaaagtcggcgagacggtgaaagctcttgtcataaaatcaactccagacagaattgctctgagcacaaaggacctcgagagcgaacctggattgcttatcactaacaaagagaaggtgttttctgaggctgaagagatggcgcgaagataccgggagcaaattgcagagccacagccacctggatccattgccgcggaagactcctgtgacgatgctgtccccttcaacgacgaatcccggtcctatgctaactggaagtggctgaaatttagcaagtccgacgacgtggcaaaccccaaatctggcgtcgaatcgtaatcgtggtgcaggaactctgtagaaattttgatcaattcagatattcagtttccatgcttacttaattgtgcggcttggcgccttggccgcctgcacccgggaaggtccgcgaggggcgacgctcgggttgcttcgacttcgaagcgtggtcgccgaaggtttttgcgatctcactccaactccgagcacgccactacgccagggacttgggcttg

SEQ ID NO: 60071 - DNA, 1317 bp, Zea Mays
atgccgccgccctccctcgtctccatcctccccgccgcgtccatctcgccacgaagacgccaagcaaagcaccccaagacccccaccgcgagccatcccttcttctcccgaagacttgtgtcccaaccgccgcgccacgcctcgatctccccctccgctgccggcgggagcgggagcgacgagctccaccttctcgagaagccgttacctgccgtcgcagaggataacgaggccgaggaggagctcgagtctgctccggtgtcatcaacagaagaagcgctcgcgccttttctcaagttcttccaggtgaagagcaccgaccccgacgtgggcgcagacaccgcggatggcgaggtgccggaggaggcgtcaaggagagatgtattgtccgccgctgataaaacagctaaatgtacccatcaagatcaaaatttatgagtggaatgctagtggcttgctatctagaattgagggccttcgggcattccttcccaaacctgagatgatgactagaccaagaaatttcactgacctaaagaacaaagttgatcaagaaatgcatgtctgcattacgaggattgatgaagagaccaacgaattgataattagtgaaaaagaggcatgggcggtgacatgccttagagaagggactctcttgcaaggcacagtacgcaagttgtttccatacggtgcacaaattaggattggcgagactaacagaggtggtttactacatatctcgaacatgacacatggcaagctgagatctgtggctgatgtgctgaaagtcggcgagacggtgaaagctcttgtcataaaatcaactccagacagaattgctctgagcacaaaggacctcgagagcgaacctggattgcttatcactaacaaagagaaggtgttttctgaggctgaagagatggcgcgaagataccgggagcaaattgcagagccacagccacctggatccattgccgcggaagactcctgtgacgatgctgtccccttcaacgacgaatcccggtcctatgctaactggaagtggctgaaatttagcaagtccgacgacgtggcaaaccccaaatctggcgtcgaatcgtaatcgtggtgcaggaactctgtagaaattttgatcaattcagatattcagtttccatgcttacttaattgtgcggcttggcgccttggccgcctgcacccgggaaggtccgcgaggggcgacgctcgggttgcttcgacttcgaagcgtggtcgccgaaggtttttgcgatctcactccaactccgagcacgccactacgccagggacttgggcttg

SEQ ID NO: 60072 - DNA, 1226 bp, Zea Mays
atgccgccgccctccctcgtctccatcctccccgccgcgtccatctcgccacgaagacgccaagcaaagcaccccaagacccccaccgcgagccatcccttcttctcccgaagacttgtgtcccaaccgccgcgccacgcctcgatctccccctccgctgccggcgggagcgggagcgacgagctccaccttctcgagaagccgttacctgccgtcgcagaggataacgaggccgaggaggagctcgagtctgctccggtgtcatcaacagaagaagcgctcgcgccttttctcaagttcttccagataaaacagctaaatgtacccatcaagatcaaaatttatgagtggaatgctagtggcttgctatctagaattgagggccttcgggcattccttcccaaacctgagatgatgactagaccaagaaatttcactgacctaaagaacaaagttgatcaagaaatgcatgtctgcattacgaggattgatgaagagaccaacgaattgataattagtgaaaaagaggcatgggcggtgacatgccttagagaagggactctcttgcaaggcacagtacgcaagttgtttccatacggtgcacaaattaggattggcgagactaacagaggtggtttactacatatctcgaacatgacacatggcaagctgagatctgtggctgatgtgctgaaagtcggcgagacggtgaaagctcttgtcataaaatcaactccagacagaattgctctgagcacaaaggacctcgagagcgaacctggattgcttatcactaacaaagagaaggtgttttctgaggctgaagagatggcgcgaagataccgggagcaaattgcagagccacagccacctggatccattgccgcggaagactcctgtgacgatgctgtccccttcaacgacgaatcccggtcctatgctaactggaagtggctgaaatttagcaagtccgacgacgtggcaaaccccaaatctggcgtcgaatcgtaatcgtggtgcaggaactctgtagaaattttgatcaattcagatattcagtttccatgcttacttaattgtgcggcttggcgccttggccgcctgcacccgggaaggtccgcgaggggcgacgctcgggttgcttcgacttcgaagcgtggtcgccgaaggtttttgcgatctcactccaactccgagcacgccactacgccagggacttgggcttg

SEQ ID NO: 60073 - DNA, 786 bp, Zea Mays
caaacacctcataagtaagaaaggagtatatgtacaaacctagcctgtgtttcggagatgccatttttcttcttgttcggctgaacctgaatgtacgttcagaactggtgcaccaatgcaccccatgtccccatttccttgccatttcaatatttgtcaccactcaccagtgatgctggaatttcctttctgtggtttactacatatctcgaacatgacacatggcaagctgagatctgtggctgatgtgctgaaagtcggcgagacggtgaaagctcttgtcataaaatcaactccagacagaattgctctgagcacaaaggacctcgagagcgaacctggattgcttatcactaacaaagagaaggtgttttctgaggctgaagagatggcgcgaagataccgggagcaaattgcagagccacagccacctggatccattgccgcggaagactcctgtgacgatgctgtccccttcaacgacgaatcccggtcctatgctaactggaagtggctgaaatttagcaagtccgacgacgtggcaaaccccaaatctggcgtcgaatcgtaatcgtggtgcaggaactctgtagaaattttgatcaattcagatattcagtttccatgcttacttaattgtgcggcttggcgccttggccgcctgcacccgggaaggtccgcgaggggcgacgctcgggttgcttcgacttcgaagcgtggtcgccgaaggtttttgcgatctcactccaactccgagcacgccactacgccagggacttgggcttg

SEQ ID NO: 60074 - DNA, 3077 bp, Zea Mays
ggtaacgtagcagtaaatcatccatgcaccattccaccacctgcggcagtgccggagtgcccacgagccatcctccgcaataaaccggcggcgtgcgacgtggggcccagacgtcggtgtcaccgaacccgtcccgccccactaggaggacgaagcgaagcggttacgttccgttgcacggtggggcccgacacacgagctcgtcacagtcacaccctccagtggctcgggctctttttttttcttccctttttcttttccgcgcagctgatttattttctctcgctctcgccttcgcggcgctgcctgcgcagtactacgagctagcaggctagcagcaccaggaccaggagcctcttcccacacttccgctctccctctctctctttcctctcgagaatggttgtgtaggcgggcgcaggagggaggagagagaggggagctagctagggttttgcgtcgccgccttctgttacccttaggctctgaacccctccggtccggtgcggcggcggattaggctccgatggggaagtctccggcgaagtggatcaagtccgtgctcttcgggaaaaggtcgtcgtcgaggtccggctccaccaaggccaaggatttatcgaagggtacgactaacaaagcagcagctgctgctgctgctgctgccgggaaggagcccgcgttctctgagagctctccggtcatctcggagcctgtgcttgttagcgcccacaacaatgagaccgcgcgggaggccgctaagggtgagaattccagcgtgcaagaagtgccagtgactgatgtcagtcaagacttggagaagcagggcactgttgggtctgatacgtctaatgatgctgagaggttgagggaagagcaagcggccgtgaaggcacaagctgccttccgtggttatctggcacgccgagcattccgtgccctgaaagggatcataagactacaggcactgattcggggacatcttgtaaggaggcaagctgtttcaactctccgtgccacatggttgattgtgaagtttcaagcccttgtccgtggaaggaacgttagactttctaatgtttccattcaagcaactacggaactttcccaacagaacttcgggggttctaaacctggttcctggaaggagaagttgtcttcaaatgcatttgctcggaagcttctctcttcaccaattgtggttgaggctcttcacgtccagtatgatgagatggaccctaattcggccttcaattggttagagaggtggacagtaagtcatgtctggaagcctatttcccaaccaaagagagttggcactgatgctaagcctcatacaaggaaggccagttatgcaatggaaacagagtcagcgaaattaaagcgtaatgcacggaagagccctgcagtgccatttgagccttctcaaacaaacaccaccattgaaaatgagaagacaagacggaatccaaggaaattaagtagcactcctgctgagtcagttcccgatggccagttaacagaacttgagaaggttaaacgtagccttaggaaggttactagttccacggttgaaacctcaaaggtgcctagcccaacaactgagattcctgaccgtcaagaggtacaatgtgagagaccactaagaagtgcaaagcaagctccaattcatgttgagaatcaagaacctcagaatgttaatctatcggagaatgcaaagatggatattctggtaccagatatccagcctgacgtggaagttgcttcagatctagtcacaatcacaaatgaagaaaaagttgatgagacaccgtctgttgttgctccagcggctgaaattatgccactgcaagacatcaacagcgaagaaaatgctttggtgaatgatgtggaagagagatccaaagaagaacattcatctactgataacctgaaaggcagcaagaggaggtcttcattctcagctaaacctgaatatccagaaaatggctccaaaaattctccagccctgccaagctacatggctgctacacaatctgcaaaggcgaaactgcgggggaatagttcaccaagacttagctctgattcagcagagaaaaacgggttcactcgtcgtcactcccttccgtcccctaacaatgagagaccactgaaagctgagtggagacgctgaggtggcgaatcaaaaccccaaaccctccatttggttagtgcaactatttgggtcggtggatggcgtctgcagtttgctcaacttatttacagggttttgggtcatgccttttgtgatgtatagctgaagtattttcccggtttgttttgtttcccagacccccagacttacccccccccccccccccccccccccccccctcctgcttactgagagggctgctgatgttagagagaacgagaacatgtatggattgagttgaacagaacaatcttagtcccgtttggtcaaatctgggctgcgttttgactgatggttgtgtgtcatttatggttattgcccttgaggtcgtagtattcttttccaaaggttcttgtcttcctgatctggttgtcatgcaacgcaaggcggcttgcgaaaaggaaccatgttgtaccatgcgatcaaagtagaagtaactctacgatgcttcagattgcttcaatgcacggtaactctacgatcaaaaagtagaagtaactctaggaagacatggccagatgttgttccaagtgacatgaggtcaagcacaggtcaatggccacagatgatgccatactattacatatgcatagttcttaagacgacgcctgttcccattttgtgctctcggcgaattgacgaattcaggctgagttctagatggctttgggaatagcaattggatctccattgtctatctgcagtgcttgtcagtcttggagcctaccagctcaatgaatgacaattatggtaggtgagcttggtcatcccatggatgcagattaaaggtggttggatgatcaatgaaccagggctacttttttactattattattgtgactgtcctgtagcttaggaccagatgaggtcgacctcggaagtgctt

SEQ ID NO: 60075 - DNA, 2926 bp, Zea Mays
gcgcatccttcggtcgccgccgtcgtctagatctgtgccgtttggggccgtaggggggcgctgtttcgcgctcctccgtgacggtttggggtgcattgcagcgtggattcggttttcttcgtgcggcatttgtcggcgttcgccgcgcgctctttcaagcgtcgttttttattcgttctgtggttctaatttagcccttcgcaaggttgcttcccatgggggcgtagctctgaacccctccggtccggtgcggcggcggattaggctccgatggggaagtctccggcgaagtggatcaagtccgtgctcttcgggaaaaggtcgtcgtcgaggtccggctccaccaaggccaaggatttatcgaagggtacgactaacaaagcagcagctgctgctgctgctgctgccgggaaggagcccgcgttctctgagagctctccggtcatctcggagcctgtgcttgttagcgcccacaacaatgagaccgcgcgggaggccgctaagggtgagaattccagcgtgcaagaagtgccagtgactgatgtcagtcaagacttggagaagcagggcactgttgggtctgatacgtctaatgatgctgagaggttgagggaagagcaagcggccgtgaaggcacaagctgccttccgtggttatctggcacgccgagcattccgtgccctgaaagggatcataagactacaggcactgattcggggacatcttgtaaggaggcaagctgtttcaactctccgtgccacatggttgattgtgaagtttcaagcccttgtccgtggaaggaacgttagactttctaatgtttccattcaagcaactacggaactttcccaacagaacttcgggggttctaaacctggttcctggaaggagaagttgtcttcaaatgcatttgctcggaagcttctctcttcaccaattgtggttgaggctcttcacgtccagtatgatgagatggaccctaattcggccttcaattggttagagaggtggacagtaagtcatgtctggaagcctatttcccaaccaaagagagttggcactgatgctaagcctcatacaaggaaggccagttatgcaatggaaacagagtcagcgaaattaaagcgtaatgcacggaagagccctgcagtgccatttgagccttctcaaacaaacaccaccattgaaaatgagaagacaagacggaatccaaggaaattaagtagcactcctgctgagtcagttcccgatggccagttaacagaacttgagaaggttaaacgtagccttaggaaggttactagttccacggttgaaacctcaaaggtgcctagcccaacaactgagattcctgaccgtcaagaggtacaatgtgagagaccactaagaagtgcaaagcaagctccaattcatgttgagaatcaagaacctcagaatgttaatctatcggagaatgcaaagatggatattctggtaccagatatccagcctgacgtggaagttgcttcagatctagtcacaatcacaaatgaagaaaaagttgatgagacaccgtctgttgttgctccagcggctgaaattatgccactgcaagacatcaacagcgaagaaaatgctttggtgaatgatgtggaagagagatccaaagaagaacattcatctactgataacctgaaaggcagcaagaggaggtcttcattctcagctaaacctgaatatccagaaaatggctccaaaaattctccagccctgccaagctacatggctgctacacaatctgcaaaggcgaaactgcgggggaatagttcaccaagacttagctctgattcagcagagaaaaacgggttcactcgtcgtcactcccttccgtcccctaacaatggtaagataatttcacattctccacgtacgcaaaggccaacccatgctggtggcaaggacggagcaaaaggcgacaaggctatgctgtcatcaagagatgcgagcgagagaccactgaaagctgagtggagacgctgaggtggcgaatcaaaaccccaaaccctccatttggttagtgcaactatttgggtcggtggatggcgtctgcagtttgctcaacttatttacagggttttgggtcatgccttttgtgatgtatagctgaagtattttcccggtttgttttgtttcccagacccccagacttacccccccccccccccccccccccccccccctcctgcttactgagagggctgctgatgttagagagaacgagaacatgtatggattgagttgaacagaacaatcttagtcccgtttggtcaaatctgggctgcgttttgactgatggttgtgtgtcatttatggttattgcccttgaggtcgtagtattcttttccaaaggttcttgtcttcctgatctggttgtcatgcaacgcaaggcggcttgcgaaaaggaaccatgttgtaccatgcgatcaaagtagaagtaactctacgatgcttcagattgcttcaatgcacggtaactctacgatcaaaaagtagaagtaactctaggaagacatggccagatgttgttccaagtgacatgaggtcaagcacaggtcaatggccacagatgatgccatactattacatatgcatagttcttaagacgacgcctgttcccattttgtgctctcggcgaattgacgaattcaggctgagttctagatggctttgggaatagcaattggatctccattgtctatctgcagtgcttgtcagtcttggagcctaccagctcaatgaatgacaattatggtaggtgagcttggtcatcccatggatgcagattaaaggtggttggatgatcaatgaaccagggctacttttttactattattattgtgactgtcctgtagcttaggaccagatgaggtcgacctcggaagtgctt

SEQ ID NO: 60076 - DNA, 2714 bp, Zea Mays
ttcggttttcttcgtgcggcatttgtcggcgttcgccgcgcgctctttcaagcgtcgttttttattcgttctgtggttctaatttagcccttcgcaaggttgcttcccatgggggcgtagctctgaacccctccggtccggtgcggcggcggattaggctccgatggggaagtctccggcgaagtggatcaagtccgtgctcttcgggaaaaggtcgtcgtcgaggtccggctccaccaaggccaaggatttatcgaagggtacgactaacaaagcagcagctgctgctgctgctgctgccgggaaggagcccgcgttctctgagagctctccggtcatctcggagcctgtgcttgttagcgcccacaacaatgagaccgcgcgggaggccgctaagggtgagaattccagcgtgcaagaagtgccagtgactgatgtcagtcaagacttggagaagcagggcactgttgggtctgatacgtctaatgatgctgagaggttgagggaagagcaagcggccgtgaaggcacaagctgccttccgtggttatctggcacgccgagcattccgtgccctgaaagggatcataagactacaggcactgattcggggacatcttgtaaggaggcaagctgtttcaactctccgtgccacatggttgattgtgaagtttcaagcccttgtccgtggaaggaacgttagactttctaatgtttccattcaagcaactacggaactttcccaacagaacttcgggggttctaaacctggttcctggaaggagaagttgtcttcaaatgcatttgctcggaagcttctctcttcaccaattgtggttgaggctcttcacgtccagtatgatgagatggaccctaattcggccttcaattggttagagaggtggacagtaagtcatgtctggaagcctatttcccaaccaaagagagttggcactgatgctaagcctcatacaaggaaggccagttatgcaatggaaacagagtcagcgaaattaaagcgtaatgcacggaagagccctgcagtgccatttgagccttctcaaacaaacaccaccattgaaaatgagaagacaagacggaatccaaggaaattaagtagcactcctgctgagtcagttcccgatggccagttaacagaacttgagaaggttaaacgtagccttaggaaggttactagttccacggttgaaacctcaaaggtgcctagcccaacaactgagattcctgaccgtcaagaggtacaatgtgagagaccactaagaagtgcaaagcaagctccaattcatgttgagaatcaagaacctcagaatgttaatctatcggagaatgcaaagatggatattctggtaccagatatccagcctgacgtggaagttgcttcagatctagtcacaatcacaaatgaagaaaaagttgatgagacaccgtctgttgttgctccagcggctgaaattatgccactgcaagacatcaacagcgaagaaaatgctttggtgaatgatgtggaagagagatccaaagaagaacattcatctactgataacctgaaaggcagcaagaggaggtcttcattctcagctaaacctgaatatccagaaaatggctccaaaaattctccagccctgccaagctacatggctgctacacaatctgcaaaggcgaaactgcgggggaatagttcaccaagacttagctctgattcagcagagaaaaacgggttcactcgtcgtcactcccttccgtcccctaacaatgagagaccactgaaagctgagtggagacgctgaggtggcgaatcaaaaccccaaaccctccatttggttagtgcaactatttgggtcggtggatggcgtctgcagtttgctcaacttatttacagggttttgggtcatgccttttgtgatgtatagctgaagtattttcccggtttgttttgtttcccagacccccagacttacccccccccccccccccccccccccccccctcctgcttactgagagggctgctgatgttagagagaacgagaacatgtatggattgagttgaacagaacaatcttagtcccgtttggtcaaatctgggctgcgttttgactgatggttgtgtgtcatttatggttattgcccttgaggtcgtagtattcttttccaaaggttcttgtcttcctgatctggttgtcatgcaacgcaaggcggcttgcgaaaaggaaccatgttgtaccatgcgatcaaagtagaagtaactctacgatgcttcagattgcttcaatgcacggtaactctacgatcaaaaagtagaagtaactctaggaagacatggccagatgttgttccaagtgacatgaggtcaagcacaggtcaatggccacagatgatgccatactattacatatgcatagttcttaagacgacgcctgttcccattttgtgctctcggcgaattgacgaattcaggctgagttctagatggctttgggaatagcaattggatctccattgtctatctgcagtgcttgtcagtcttggagcctaccagctcaatgaatgacaattatggtaggtgagcttggtcatcccatggatgcagattaaaggtggttggatgatcaatgaaccagggctacttttttactattattattgtgactgtcctgtagcttaggaccagatgaggtcgacctcggaagtgctt

SEQ ID NO: 60077 - DNA, 1839 bp, Zea Mays
ctaatttagcccttcgcaaggttgcttcccatgggggcgtagctctgaacccctccggtccggtgcggcggcggattaggctccgatggggaagtctccggcgaagtggatcaagtccgtgctcttcgggaaaaggtcgtcgtcgaggtccggctccaccaaggccaaggatttatcgaagggtacgactaacaaagcagcagctgctgctgctgctgctgccgggaaggagcccgcgttctctgagagctctccggtcatctcggagcctgtgcttgttagcgcccacaacaatgagaccgcgcgggaggccgctaagggtgagaattccagcgtgcaagaagtgccagtgactgatgtcagtcaagacttggagaagcagggcactgttgggtctgatacgtctaatgatgctgagaggttgagggaagagcaagcggccgtgaaggcacaagctgccttccgtggttatctggcacgccgagcattccgtgccctgaaagggatcataagactacaggcactgattcggggacatcttgtaaggaggcaagctgtttcaactctccgtgccacatggttgattgtgaagtttcaagcccttgtccgtggaaggaacgttagactttctaatgtttccattcaagcaactacggaactttcccaacagaacttcgggggttctaaacctggttcctggaaggagaagttgtcttcaaatgcatttgctcggaagcttctctcttcaccaattgtggttgaggctcttcacgtccagtatgatgagatggaccctaattcggccttcaattggttagagaggtggacagtaagtcatgtctggaagcctatttcccaaccaaagagagttggcactgatgctaagcctcatacaaggaaggccagttatgcaatggaaacagagtcagcgaaattaaagcgtaatgcacggaagagccctgcagtgccatttgagccttctcaaacaaacaccaccattgaaaatgagaagacaagacggaatccaaggaaattaagtagcactcctgctgagtcagttcccgatggccagttaacagaacttgagaaggttaaacgtagccttaggaaggttactagttccacggttgaaacctcaaaggtgcctagcccaacaactgagattcctgaccgtcaagaggtacaatgtgagagaccactaagaagtgcaaagcaagctccaattcatgttgagaatcaagaacctcagaatgttaatctatcggagaatgcaaagatggatattctggtaccagatatccagcctgacgtggaagttgcttcagatctagtcacaatcacaaatgaagaaaaagttgatgagacaccgtctgttgttgctccagcggctgaaattatgccactgcaagacatcaacagcgaagaaaatgctttggtgaatgatgtggaagagagatccaaagaagaacattcatctactgataacctgaaaggcagcaagaggaggtcttcattctcagctaaacctgaatatccagaaaatggctccaaaaattctccagccctgccaagctacatggctgctacacaatctgcaaaggcgaaactgcgggggaatagttcaccaagacttagctctgattcagcagagaaaaacgggttcactcgtcgtcactcccttccgtcccctaacaatggtaagataatttcacattctccacgtacgcaaaggccaacccatgctggtggcaaggacggagcaaaaggcgacaaggctatgctgtcatcaagagatgcgagcggtattaaaacatggtagtttggaagctaatggatgag

SEQ ID NO: 60078 - DNA, 1061 bp, Zea Mays
agcctgcccggtggaagatagagcatttctcgctgcttctttctcttcaagaaaacgtcaaaaaaacgtcagcaccaggctcctccctctaataaatagcggcgggcctctgtcagctcacagctcagtcctcttcaaccccgtttcgccgcccctagcccaaatcccccacctactcgccgccggcgccgtctcagcctcatccttctccgctagccatggccgccgcgggtcccgggctctactccgagatcgggaagaaggccagagatctcctatataaggactaccacacggaccagaagttcacgctcaccacctacgccgccaacggagctgccattactgctgcaagcacgaggaaagatgaagctatctttaatgaaatccagagccagctgaagcacaacaatgtgactgtggatgtgaaagcaacttcagaatcaaatgtgataactacaatcacagttcatgagctgggcacaccaggcttgaaggcaattttatgtgttcctttcccgtaccagaaatctgcaaaggctgaactccagtatttgcaccaccatgctggtgttgctgcaagtgttggcctaaatgcaaaccctgttgttaacctttctggtgtattcggaactaaagctattgctgttggcgctgatgctgcatttgatacttcttctggggacttaaccaaatacaatgctggactgagctacacgacgcctgactttgttgctgcagcgactttgaacaacaaaggagacaacattgccgcttcctactaccactcggtgagtccaaccacagccgtcggaggagaactgagccacagcttctcgaccaacgggaacaccatcacctttgggacgcagcatgccctggaccctctgaccactgtgaaggcacgcttcaacaactacggcatggcaagtgcactgatccaacacgagtggaggcccaagtcactggtcaccatctccacggaggtggacaccaaggccatcgagaagagctctaagagccggtccagtctgatttgtcagataaggcaccgaacaaac

SEQ ID NO: 60079 - DNA, 7708 bp, Zea Mays
cccgcagcagctccgaaccttctcccagccggcgcaggaagctcaccgggaagccggtgcaaaacccccaagatcacacacacacacaccccagctacaaatccgtccgccagcccccgtcgacatccctcactcccccatgcgcaccggcagctcaccgatccccggagccgctactgctataaatacaaagcttccccggcggtggtctagccggccatggcggcagtcggagcgcacccagtgctgtaccaccacccggcgccggcgggcgacgcctcctccatgtcctcctacttctcccacggaggcagctccaccacctccagctctgcgtccagcttcaccgccgcgctcgcgccgacgacgacggcgctcgccgagcatttcgacatctccgagttcctcttcgacgacgctgcgggcgctggggtcgccggcgcgccaggtgtgttcgccgatggcgcggcccgccccgtcgtcctgccggtgccggatgccgctggtggtggtgcaattatcggcgcagccgctgggggcgcggctgcggcgtcggaggtgccagagcggccgcggacgacgcggatcgcgttccggacgaggtcggagatcgagatcctggacgacggctacaagtggaggaagtacggcaagaagtccgtcaagaacagccccaacccaaggaactactaccggtgctcgacggaagggtgcaacgtgaagaagcgggtggagcgggacaaggacgaccccagctacgtggtgacgacgtacgaggggatgcacaaccacgtcagccccagtacggtgtactacgccagccaggacgccgcctccggccgcttcttcgtcgccggcacgcagccaccgggctccctcaactgatccccggcggcccatcgcgacgctgccacattaaagattgttgtaggctctcatatatggctggaggataaagatttagtttggattgatggcgaggttttccgaactgaaggtcaaaatgtccatgtccacactaccaatggaaagacggttactgtgagcatatcagacattcatccaaaggacacagaagtgccatctgatggcattgatgacatgacaaggctatcatacttgcatgaacctggtgttctaaataatcttgctgttcgatatgcaaaaaatataatttatacctatactggcaatattctgattgcaattaatccattccaaagtctgccccatctttctgaaccccgtaccatggagaagtacaaaggtgcaaattttggtgagctcgaccctcacgtgtttgcaattgccgatgtttcttacaggcagatgatgaatgagggaaagagcaactccattttggtgagcggtgaaagcggtgctggtaaaactgaaaccacaaagatgctaatgagatatcttgcttttttgggcggacggtctaaaacaggggggaggacagttgaacaacaagttttagaatctaatccagtccttgaagcttttggcaatgcaaagactgtccgtaacaacaactcaagtcgatttggaaaatttgttgaaatccaatttgacaagagtgggaagatatcaggtgctgccattagaacatatttgcttgaaagatctcgtgtttgccaaatcaatagtccagagagaaactaccattgcttttactttctatgtgcagcaccgttggaggatatcaaaagttataagcttggtgacccatcatcattccactatctcaaccaatctacgtgcattaaacttgacgaaattagtgatgctaaggagtatcttgcaacacgaagtgcaatgaatacagttggcattactgagcaggaacaggaggctatattccgggtagttgctgctgtgcttcatctcgggaacatcagttttgtgaaagggagagaggcagattcatctgtaataaaggacgagaaagctaggttccatcttaatgcaacagcagagctcttgatgtgcgattgtggaaatctggagaacgcattaataaagaggaaaataaatacaccagaaggagttataaccacaacagttgatcctaattctgctactgttagcagggatggcttagcaaagcaaatatattctcagctatttgactggctcgtaaacagactaaatgcctccataggacacgatacatcctctgaccgattgattggagtacttgatatctatggtttcgaaagttttaagactaatagctttgaacaattatgcatcaatttcaccaatgaaaaacttcaacagcattttaatcagaatgtcttcaaaatggagcaggaagagtataacagggagcagattgactggagctacatagaatttgttgacaaccaagatgttctagacttgattgagaagaagcctggtggaattattgcacttcttgatgaagcttgtatgtttcctaagtgcacacacgaatcattttctcagaagttgtatgagaaattcaggaataacaaaagattttgcaaaccaaagctttctcgcactgcatttaccatacagcattatgcaggagaagtaacttaccaatctgatcagttcctggacaaaaacagagactatgtagttgtagaacatcaagaattactgaatgcttccaagtgctcttttgtgtcagggttattcccatcagtactagagaacacaaaagcatcgaagtcctccattgctactcgcttcaagtggcaactccaagaactaatggagactttgagttctacagaaccacattacatcagatgtattaagcccaataatcatcttaagcctgctacttttgagaacatcaatgttctgcagcaacttcggtgttcaggtgttcttgaagctattagaatcagctgtgctggatatcctacaagaaaaatatttcatgattttctctgtcgattttgcattcttgctcctgaagttttcacagaaagaaacaatgaaaagttaatatgccaaaagattttggacaatattggactccatggttatcagattggaagaacaaaggtgtttctgagagctggtcagatggctgaattagatgctagaagaactgaagtgcggaataaagcagctataaccgttcagagtagatttcgcactcatgttgctcgtgagcaattccttgcattacgcatgacatcaatatcttttcaatcttttgttagagtgatattggcctgtaagttacatgttttcctcagaaaacaagctgcagtactgcatatacagaaaagttaccgctgctattttgcttggaagacttactcggagctatgttcttcagccattacattgcagacaggtttaagggcctttggtgcttataacgagtacattatcagaaaacaaaataaagcttctatttgtgtccaggcttgttggcgttgccatagagatcatttgaattaccttaaaatgaaaagatcagtgttaatttatcagtgtgcatggagaagacggattgctagagaagaactcagaaagctcaaaatggctgcgagggacacagaagccctgaaggtggagaaggagaaacttgaggagcacgtggaagagctgactagccgtttgagcttcgaaaagaatcttaggattgatctagagaagagcaaggcaagagaaatttgcaaactacaggccactcttcgtgagatggaacagcgggttgaagaagccatagagatgcatgaaagagaattagccaaaaaggctattgaggaagctttagctcaagaaagggaaaagatcaccgtattgactaatgaagtcgatgagttgaaggtattactatcaagagaacgagaagaaaacagtgcaactaagagtgcactcgttgttgttcgtgaagaaaatgatgtgctgaataagaaaattgtggttgcagatgcaagcatggagcagcttagagatactgtaacgagggttgaagaattaatgagacaaattgcaaatgccaagggaaaatccactgagcttcagattgctgtgcaaaggttgcaagaaagtttaattgagggagaagctactttgcttgcagaaagaaaagaaagtgatgcagccaagaaatcactcactgaagctcatgtaaaaaacgaggaactattcaataaaattgaagtagctgagcataacgttagtatcttccaagacgacatccaaagacttgaagaaactgcagctacattggagacttcattgttatctgagaaacaacagagtactgcaatcatttcacaattaactgaagcacaacaggacatccaagtactgcagaagaaatttgcagatgccaataagacaattgagctgcttcaagattctttgaaaaggtgtgaggacagcacaaccacaagggatgccttatatgtagcagaaagacaggagcatggtcaaaccaaacaagcactttccaaagctcaggaaagaaatttggaattgcttaggaaagttgatgatagtgagaaaactttaaacaagatgctggagaatgctcagagacttgagaaacatgcaacagcaagggaatccttgcttcttaagacaaagcagaatcttgactgcactacaaaagcgctaactgaagcacgagggagaaaccgagacttattgacaagttttgaggattcagctaaaaaaatcaatatgcttgaggattcacttaacagagaaagactctttgttggcagtagaaagaaaacaaaacaaaacgaccaaagaagaactggccaatgcccagaaaacaatcgatgaattagtacatgagtcacagcagtcccaggaaataagaaatcaattggaagataccatcaagaggtttaaagcagaatcgactgccagagacacaatattattatcagagaaacaggcacatgagacgaccaagaaagttctaactgaaattcagtcgagaaatgaagagttaatcaagaaaattcaggattgtgataaaaatattcttgagcttcagctaactgtggagaggcttcaggaaaacacatctactacagaggctttactgttgagagaacgagaacaaaacaatgcaaccatgaaggcacaagctgaaactcaagaaataaatttgcagttactgaacaagcttgaggacgttgagacaaaaattggtcttcttcaaggaagtgtacaaaggcttggtgataatacagcgaaagacactttgctgctatctgagaaacgtgagaaggatgccctgaaggaagcacttactgagtctgaatacaaaaatgaagagttactgataaaaactgaagaagccaacaaaaaagcttaaggagaacatggcagcttctttggaagctgaaagacaagaaaatgaagcaatcaagaggtcccttgttgaagctcaggagagaaacgatgcattatttaagaaagttagggatagcgaatacagggcccaccagcttcaagatactgtccaaaagcttcaagtagatgccatatctagactgtctagctttgtaatggagagacaagatggtgatggtgtcaagaatgcacatactgaggttcatggaacaaatgaagatctaatgaggagaaatgaaaacctcctaaaaaggaatgatgacttggtgaagaagattgaagattctgctatacttgttactgagcttagagggaacttggaaaggttagaagggaaagctgctaatttagaggctgaaaatcaattgcttcgtcaacaagcaattgcaactcctccatcaacagcaaagtcttctcaagctgcatgctctaaaatcaagatgtcaagaaagtggtcatattttaaatggcaacgtagcatatgctgaaatgaagtcctcaaccggtcaaacagaaatgagaccctcgatgggcagttcccttgatttgattaaccacaaggtttatgaaaatgggcaaagcttgtttaatgatgtatatcagcaccagcaaccccagaatcatcaacagttattgctgaaatatattacccaatatcttggattctctgggagaaaacctattgctgcgtctcttatatactactgtcttcttcattggagatcttttgaagaagcaaagacaactgtctttgacagtattatacaaattgtaaactcagcaactgaggctcaacatgatacgagaagcttggcctactggctgtccaacttatccacattgtcagttctcctgcaacgttcatttaaagccaccagggcaactgcctcaactccacatagacgaagaatttcctgtgaaaggatttttcaagccaatcaaacttcaagcagtggacttgcttgtctcagtgctcaatcagtggatggaggtaccgtgtttcaccaaattgaagcaaggtatccggcttcgctcttcaagcagcagctagtggatcaggttgaaaaggtgtatggagtgataagcgataaaataaaaaaggagctaaacccattacttgagttgtgcatacaggatccaagaacttactcaaatcaagcaaaggccttgatgtctccttctagtggcttgggccaacaggatcaactcatgcattggctgagcatcgtgaaaatcttcaacagctatttgcatgtcctcagagccaatcatgttccctcaattttggtccacaaattgcttacccaaatattttctgtggtcaatgtgcaattgtttaacaggtaagttttgggtcgtcctatcatattttcttcttggaaatgacagttttcacttctgttcctggggcgttctcttccttatttgaaaacaggctcctcttgaggcgtgaatgctgttcctttagcaatgggcaatacatcaaagatgggctaactcaactaagatattggtgcaatgacgtcagtcaagagtttgcagactcagcatgggtagcactgaggcatataagacaagctgttgactttgtggtaatttctctgaagccgataaggacatgggaagagatatgcaatgatatttgcccggctctcagtttgcagcagctagagcggatagtcggtatgtattgggatgatttaaagggaacaaatgtaacttcagccgagttcatgtcaagcatgagagctatgctgcgcgaagaatcaaatagcgtctccagcttttcggtcctgctggatgatgattccagcatacccttttcgcttgaagatatttcgaagtcaatgccaaacattgaggagacgtcagttaatgacctgctgcctttcatccgcgagaaccaaagctttgcgtttttattgtagtggagaggacacgaatccttagatttgttgtatgagattgcaggccagtctgtgtggagttactatccgtctgatgggtatgcgttgactttacacgtgctactgtttgattacctagcttacctgcatccacaggaactctcaaaactgacgtatccattcggccaccctcacgggagcctgcaggtatccaatcagaccgtatccgtgtgatggatgactgtgtctgtgtaggtgtgctcgcatgagcctggccctgacagcagatatgtgatttttacctgtatcggcgtatgtaggcaaaaagctaccgcaaatacgtgagttgcatcatgcatgtctaatcgagtgcgtgcagttaacccaacatgctctcggagctagtcaacgcatacaaagagccatgttag

SEQ ID NO: 60080 - DNA, 7390 bp, Zea Mays
cccgcagcagctccgaaccttctcccagccggcgcaggaagctcaccgggaagccggtgcaaaacccccaagatcacacacacacacaccccagctacaaatccgtccgccagcccccgtcgacatccctcactcccccatgcgcaccggcagctcaccgatccccggagccgctactgctataaatacaaagcttccccggcggtggtctagccggccatggcggcagtcggagcgcacccagtgctgtaccaccacccggcgccggcgggcgacgcctcctccatgtcctcctacttctcccacggaggcagctccaccacctccagctctgcgtccagcttcaccgccgcgctcgcgccgacgacgacggcgctcgccgagcatttcgacatctccgagttcctcttcgacgacgctgcgggcgctggggtcgccggcgcgccaggtgtgttcgccgatggcgcggcccgccccgtcgtcctgccggtgccggatgccgctggtggtggtgcaattatcggcgcagccgctgggggcgcggctgcggcgtcggaggtgccagagcggccgcggacgacgcggatcgcgttccggacgaggtcggagatcgagatcctggacgacggctacaagtggaggaagtacggcaagaagtccgtcaagaacagccccaacccaaggaactactaccggtgctcgacggaagggtgcaacgtgaagaagcgggtggagcgggacaaggacgaccccagctacgtggtgacgacgtacgaggggatgcacaaccacgtcagccccagtacggtgtactacgccagccaggacgccgcctccggccgcttcttcgtcgccggcacgcagccaccgggctccctcaactgatccccggcggcccatcgcgacgctgccacattaaagattgttgtaggctctcatatatggctggaggataaagatttagtttggattgatggcgaggttttccgaactgaaggtcaaaatgtccatgtccacactaccaatggaaagacggttactgtgagcatatcagacattcatccaaaggacacagaagtgccatctgatggcattgatgacatgacaaggctatcatacttgcatgaacctggtgttctaaataatcttgctgttcgatatgcaaaaaatataatttatacctatactggcaatattctgattgcaattaatccattccaaagtctgccccatctttctgaaccccgtaccatggagaagtacaaaggtgcaaattttggtgagctcgaccctcacgtgtttgcaattgccgatgtttcttacaggcagatgatgaatgagggaaagagcaactccattttggtgagcggtgaaagcggtgctggtaaaactgaaaccacaaagatgctaatgagatatcttgcttttttgggcggacggtctaaaacaggggggaggacagttgaacaacaagttttagaatctaatccagtccttgaagcttttggcaatgcaaagactgtccgtaacaacaactcaagtcgatttggaaaatttgttgaaatccaatttgacaagagtgggaagatatcaggtgctgccattagaacatatttgcttgaaagatctcgtgtttgccaaatcaatagtccagagagaaactaccattgcttttactttctatgtgcagcaccgttggaggatatcaaaagttataagcttggtgacccatcatcattccactatctcaaccaatctacgtgcattaaacttgacgaaattagtgatgctaaggagtatcttgcaacacgaagtgcaatgaatacagttggcattactgagcaggaacaggaggctatattccgggtagttgctgctgtgcttcatctcgggaacatcagttttgtgaaagggagagaggcagattcatctgtaataaaggacgagaaagctaggttccatcttaatgcaacagcagagctcttgatgtgcgattgtggaaatctggagaacgcattaataaagaggaaaataaatacaccagaaggagttataaccacaacagttgatcctaattctgctactgttagcagggatggcttagcaaagcaaatatattctcagctatttgactggctcgtaaacagactaaatgcctccataggacacgatacatcctctgaccgattgattggagtacttgatatctatggtttcgaaagttttaagactaatagctttgaacaattatgcatcaatttcaccaatgaaaaacttcaacagcattttaatcagaatgtcttcaaaatggagcaggaagagtataacagggagcagattgactggagctacatagaatttgttgacaaccaagatgttctagacttgattgagaagaagcctggtggaattattgcacttcttgatgaagcttgtatgtttcctaagtgcacacacgaatcattttctcagaagttgtatgagaaattcaggaataacaaaagattttgcaaaccaaagctttctcgcactgcatttaccatacagcattatgcaggagaagtaacttaccaatctgatcagttcctggacaaaaacagagactatgtagttgtagaacatcaagaattactgaatgcttccaagtgctcttttgtgtcagggttattcccatcagtactagagaacacaaaagcatcgaagtcctccattgctactcgcttcaagtggcaactccaagaactaatggagactttgagttctacagaaccacattacatcagatgtattaagcccaataatcatcttaagcctgctacttttgagaacatcaatgttctgcagcaacttcggtgttcaggtgttcttgaagctattagaatcagctgtgctggatatcctacaagaaaaatatttcatgattttctctgtcgattttgcattcttgctcctgaagttttcacagaaagaaacaatgaaaagttaatatgccaaaagattttggacaatattggactccatggttatcagattggaagaacaaaggtgtttctgagagctggtcagatggctgaattagatgctagaagaactgaagtgcggaataaagcagctataaccgttcagagtagatttcgcactcatgttgctcgtgagcaattccttgcattacgcatgacatcaatatcttttcaatcttttgttagagtgatattggcctccattacattgcagacaggtttaagggcctttggtgcttataacgagtacattatcagaaaacaaaataaagcttctatttgtgtccaggcttgttggcgttgccatagagatcatttgaattaccttaaaatgaaaagatcagtgttaatttatcagtgtgcatggagaagacggattgctagagaagaactcagaaagctcaaaatggctgcgagggacacagaagccctgaaggtggagaaggagaaacttgaggagcacgtggaagagctgactagccgtttgagcttcgaaaagaatcttaggattgatctagagaagagcaaggcaagagaaatttgcaaactacaggccactcttcgtgagatggaacagcgggttgaagaagccatagagatgcatgaaagagaattagccaaaaaggctattgaggaagctttagctcaagaaagggaaaagatcaccgtattgactaatgaagtcgatgagttgaaggtattactatcaagagaacgagaagaaaacagtgcaactaagagtgcactcgttgttgttcgtgaagaaaatgatgtgctgaataagaaaattgtggttgcagatgcaagcatggagcagcttagagatactgtaacgaggttgcaagaaagtttaattgagggagaagctactttgcttgcagaaagaaaagaaagtgatgcagccaagaaatcactcactgaagctcatgtaaaaaacgaggaactattcaataaaattgaagtagctgagcataacgttagtatcttccaagacgacatccaaagacttgaagaaactgcagctacattggagacttcattgttatctgagaaacaacagagtactgcaatcatttcacaattaactgaagcacaacaggacatccaagtactgcagaagaaatttgcagatgccaataagacaattgagctgcttcaagattctttgaaaaggtgtgaggacagcacaaccacaagggatgccttatatgtagcagaaagacaggagcatggtcaaaccaaacaagcactttccaaagctcaggaaagaaatttggaattgcttaggaaagttgatgatagtgagaaaactttaaacaagatgctggagaatgctcagagacttgagaaacatgcaacagcaagggaatccttgcttcttaagacaaagcagaatcttgactgcactacaaaagcgctaactgaagcacgagggagaaaccgagacttattgacaagttttgaggattcagctaaaaaaatcaatatgcttgaggattcacttaacagactagaagaatgcacagcagagaaagactctttgttggcagtagaaagaaaacaaaacaaaacgaccaaagaagaactggccaatgcccagaaaacaatcgatgaattagtacatgagtcacagcagtcccaggaaataagaaatcaattggaagataccatcaagaggtttaaagcagaatcgactgccagagacacaatattattatcagagaaacaggcacatgagacgaccaagaaagttctaactgaaattcagtcgagaaatgaagagttaatcaagaaaattcaggattgtgataaaaatattcttgagcttcagctaactgtggagaggcttcaggaaaacacatctactacagaggctttactgttgagagaacgagaacaaaacaatgcaaccatgaaggcacaagctgaaactcaagaaataaatttgcagttactgaacaagcttgaggacgttgagacaaaaattggtcttcttcaaggaagtgtacaaaggcttggtgataatacagcgaaagacactttgctgctatctgagaaacgtgagaaggatgccctgaaggaagcacttactgagtctgaatacaaaaatgaagagttactgataaaaactgaagaagccaacaaaaaagttgagcatcttcaaaacactataaattcgcttaaggagaacatggcagcttctttggaagctgaaagacaagaaaatgaagcaatcaagaggtcccttgttgaagctcaggagagaaacgatgcattatttaagaaagttagggatagcgaatacagggcccaccagcttcaagatactgtccaaaagcttcaagtagatgccatatctagactgtctagctttgtaatggagagacaagatggtgatggtgtcaagaatgcacatactgaggttcatggaacaaatgaagatctaatgaggagaaatgaaaacctcctaaaaaggaatgatgacttggtgaagaagattgaagattctgctatacttgttactgagcttagagggaacttggaaaggttagaagggaaagctgctaatttagaggctgaaaatcaattgcttcgtcaacaagcaattgcaactcctccatcaacagcaaagtcttctcaagctgcatgctctaaaatcagtatgatccatagatgtcaagaaagtggtcatattttaaatggcaacgtagcatatgctgaaatgaagtcctcaaccggtcaaacagaaatgagaccctcgatgggcagttcccttgatttgattaaccacaaggtttatgaaaatgggcaaagcttgtttaatgatgtatatcagcaccagcaaccccagaatcatcaacagttattgctgaaatatattacccaatatcttggattctctgggagaaaacctattgctgcgtctcttatatactactgtcttcttcattggagatcttttgaagaagcaaagacaactgtctttgacagtattatacaaattgtaaactcagcaactgaggctcaacatgatacgagaagcttggcctactggctgtccaacttatccacattgtcagttctcctgcaacgttcatttaaagccaccagggcaactgcctcaactccacatagacgaagaatttcctgtgaaaggatttttcaagccaatcaaacttcaagcagtggacttgcttgtctcagtgctcaatcagtggatggaggtaccgtgtttcaccaaattgaagcaaggtatccggcttcgctcttcaagcagcagctagtggatcaggttgaaaaggtgtatggagtgataagcgataaaataaaaaaggagctaaacccattacttgagttgtgcatacaggatccaagaacttactcaaatcaagcaaaggccttgatgtctccttctagtggcttgggccaacaggatcaactcatgcattggctgagcatcgtgaaaatcttcaacagctatttgcatgtcctcagagccaatcatgttccctcaattttggtccacaaattgcttacccaaatattttctgtggtcaatgtgcaattgtttaacaggctcctcttgaggcgtgaatgctgttcctttagcaatgggcaatacatcaaagatgggctaactcaactaagatattggtgcaatgacgtcagtcaagagtttgcagactcagcatgggtagcactgaggcatataagacaagctgttgactttgtggtaatttctctgaagccgataaggacatgggaagagatatgcaatgatatttgcccggctctcagtttgcagcagctagagcggatagtcggtatgtattgggatgatttaaagggaacaaatgtaacttcagccgagttcatgtcaagcatgagagctatgctgcgcgaagaatcaaatagcgtctccagcttttcggtcctgctggatgatgattccagcatacccttttcgcttgaagatatttcgaagtcaatgccaaacattgaggagacgtcagttaatgacctgctgcctttcatccgcgagaaccaaagctttgcgtttttattgtagtggagaggacacgaatccttagatttgttgtatgagattgcaggccagtctgtgtggagttactatccgtctgatgggtatccaatcagaccgtatccgtgtgatggatgactgtgtctgtgtaggtgtgctcgcatgagcctggccctgacagcagatatgtgatttttacctgtatcggcgtatgtaggcaaaaagctaccgcaaatacgtgagttgcatcatgcatgtctaatcgagtgcgtgcagttaacccaacatgctctcggagctagtcaacgcatacaaagagccatgttag

SEQ ID NO: 60081 - DNA, 6994 bp, Zea Mays
gcaaccatcccgctgctctccgttccatcaccttgcgtcttgcgctcggcagcctcgtctcccccctctttcggcgaatgccacgccgcctcgaatcgcgcgctcatggcccgagcgatcagcctcttaccacctctccacccccaatccatcagcgccaaaaatagataggggatgaggaatcgcctctggtgcctggttcgcaccccattcccctccgcctcccggttcgatgctggtatcgcgcgcctctgcacgcgctcgagtcggaccacacggcgtgcctacttggcggcgaggcaaccggcgaccggcgcaagggagggagccgacgccgctgccgaacctgattcgacctcgccgacgacagccgtcgcgttttggtgatcgcattacgcatggctgccacattaaagattgttgtaggctctcatatatggctggaggataaagatttagtttggattgatggcgaggttttccgaactgaaggtcaaaatgtccatgtccacactaccaatggaaagacggttactgtgagcatatcagacattcatccaaaggacacagaagtgccatctgatggcattgatgacatgacaaggctatcatacttgcatgaacctggtgttctaaataatcttgctgttcgatatgcaaaaaatataatttatacctatactggcaatattctgattgcaattaatccattccaaagtctgccccatctttctgaaccccgtaccatggagaagtacaaaggtgcaaattttggtgagctcgaccctcacgtgtttgcaattgccgatgtttcttacaggcagatgatgaatgagggaaagagcaactccattttggtgagcggtgaaagcggtgctggtaaaactgaaaccacaaagatgctaatgagatatcttgcttttttgggcggacggtctaaaacaggggggaggacagttgaacaacaagttttagaatctaatccagtccttgaagcttttggcaatgcaaagactgtccgtaacaacaactcaagtcgatttggaaaatttgttgaaatccaatttgacaagagtgggaagatatcaggtgctgccattagaacatatttgcttgaaagatctcgtgtttgccaaatcaatagtccagagagaaactaccattgcttttactttctatgtgcagcaccgttggaggatatcaaaagttataagcttggtgacccatcatcattccactatctcaaccaatctacgtgcattaaacttgacgaaattagtgatgctaaggagtatcttgcaacacgaagtgcaatgaatacagttggcattactgagcaggaacaggaggctatattccgggtagttgctgctgtgcttcatctcgggaacatcagttttgtgaaagggagagaggcagattcatctgtaataaaggacgagaaagctaggttccatcttaatgcaacagcagagctcttgatgtgcgattgtggaaatctggagaacgcattaataaagaggaaaataaatacaccagaaggagttataaccacaacagttgatcctaattctgctactgttagcagggatggcttagcaaagcaaatatattctcagctatttgactggctcgtaaacagactaaatgcctccataggacacgatacatcctctgaccgattgattggagtacttgatatctatggtttcgaaagttttaagactaatagctttgaacaattatgcatcaatttcaccaatgaaaaacttcaacagcattttaatcagaatgtcttcaaaatggagcaggaagagtataacagggagcagattgactggagctacatagaatttgttgacaaccaagatgttctagacttgattgagaagaagcctggtggaattattgcacttcttgatgaagcttgtatgtttcctaagtgcacacacgaatcattttctcagaagttgtatgagaaattcaggaataacaaaagattttgcaaaccaaagctttctcgcactgcatttaccatacagcattatgcaggagaagtaacttaccaatctgatcagttcctggacaaaaacagagactatgtagttgtagaacatcaagaattactgaatgcttccaagtgctcttttgtgtcagggttattcccatcagtactagagaacacaaaagcatcgaagtcctccattgctactcgcttcaagtggcaactccaagaactaatggagactttgagttctacagaaccacattacatcagatgtattaagcccaataatcatcttaagcctgctacttttgagaacatcaatgttctgcagcaacttcggtgttcaggtgttcttgaagctattagaatcagctgtgctggatatcctacaagaaaaatatttcatgattttctctgtcgattttgcattcttgctcctgaagttttcacagaaagaaacaatgaaaagttaatatgccaaaagattttggacaatattggactccatggttatcagattggaagaacaaaggtgtttctgagagctggtcagatggctgaattagatgctagaagaactgaagtgcggaataaagcagctataaccgttcagagtagatttcgcactcatgttgctcgtgagcaattccttgcattacgcatgacatcaatatcttttcaatcttttgttagagtgatattggcctccattacattgcagacaggtttaagggcctttggtgcttataacgagtacattatcagaaaacaaaataaagcttctatttgtgtccaggcttgttggcgttgccatagagatcatttgaattaccttaaaatgaaaagatcagtgttaatttatcagtgtgcatggagaagacggattgctagagaagaactcagaaagctcaaaatggctgcgagggacacagaagccctgaaggtggagaaggagaaacttgaggagcacgtggaagagctgactagccgtttgagcttcgaaaagaatcttaggattgatctagagaagagcaaggcaagagaaatttgcaaactacaggccactcttcgtgagatggaacagcgggttgaagaagccatagagatgcatgaaagagaattagccaaaaaggctattgaggaagctttagctcaagaaagggaaaagatcaccgtattgactaatgaagtcgatgagttgaaggtattactatcaagagaacgagaagaaaacagtgcaactaagagtgcactcgttgttgttcgtgaagaaaatgatgtgctgaataagaaaattgtggttgcagatgcaagcatggagcagcttagagatactgtaacgaggttgcaagaaagtttaattgagggagaagctactttgcttgcagaaagaaaagaaagtgatgcagccaagaaatcactcactgaagctcatgtaaaaaacgaggaactattcaataaaattgaagtagctgagcataacgttagtatcttccaagacgacatccaaagacttgaagaaactgcagctacattggagacttcattgttatctgagaaacaacagagtactgcaatcatttcacaattaactgaagcacaacaggacatccaagtactgcagaagaaatttgcagatgccaataagacaattgagctgcttcaagattctttgaaaaggtgtgaggacagcacaaccacaagggatgccttatatgtagcagaaagacaggagcatggtcaaaccaaacaagcactttccaaagctcaggaaagaaatttggaattgcttaggaaagttgatgatagtgagaaaactttaaacaagatgctggagaatgctcagagacttgagaaacatgcaacagcaagggaatccttgcttcttaagacaaagcagaatcttgactgcactacaaaagcgctaactgaagcacgagggagaaaccgagacttattgacaagttttgaggattcagctaaaaaaatcaatatgcttgaggattcacttaacagactagaagaatgcacagcagagaaagactctttgttggcagtagaaagaaaacaaaacaaaacgaccaaagaagaactggccaatgcccagaaaacaatcgatgaattagtacatgagtcacagcagtcccaggaaataagaaatcaattggaagataccatcaagaggtttaaagcagaatcgactgccagagacacaatattattatcagagaaacaggcacatgagacgaccaagaaagttctaactgaaattcagtcgagaaatgaagagttaatcaagaaaattcaggattgtgataaaaatattcttgagcttcagctaactgtggagaggcttcaggaaaacacatctactacagaggctttactgttgagagaacgagaacaaaacaatgcaaccatgaaggcacaagctgaaactcaagaaataaatttgcagttactgaacaagcttgaggacgttgagacaaaaattggtcttcttcaaggaagtgtacaaaggcttggtgataatacagcgaaagacactttgctgctatctgagaaacgtgagaaggatgccctgaaggaagcacttactgagtctgaatacaaaaatgaagagttactgataaaaactgaagaagccaacaaaaaagttgagcatcttcaaaacactataaattcgcttaaggagaacatggcagcttctttggaagctgaaagacaagaaaatgaagcaatcaagaggtcccttgttgaagctcaggagagaaacgatgcattatttaagaaagttagggatagcgaatacagggcccaccagcttcaagatactgtccaaaagcttcaagtagatgccatatctagactgtctagctttgtaatggagagacaagatggtgatggtgtcaagaatgcacatactgaggttcatggaacaaatgaagatctaatgaggagaaatgaaaacctcctaaaaaggaatgatgacttggtgaagaagattgaagattctgctatacttgttactgagcttagagggaacttggaaaggttagaagggaaagctgctaatttagaggctgaaaatcaattgcttcgtcaacaagcaattgcaactcctccatcaacagcaaagtcttctcaagctgcatgctctaaaatcagtatgatccatagatgtcaagaaagtggtcatattttaaatggcaacgtagcatatgctgaaatgaagtcctcaaccggtcaaacagaaatgagaccctcgatgggcagttcccttgatttgattaaccacaaggtttatgaaaatgggcaaagcttgtttaatgatgtatatcagcaccagcaaccccagaatcatcaacagttattgctgaaatatattacccaatatcttggattctctgggagaaaacctattgctgcgtctcttatatactactgtcttcttcattggagatcttttgaagaagcaaagacaactgtctttgacagtattatacaaattgtaaactcagcaactgaggctcaacatgatacgagaagcttggcctactggctgtccaacttatccacattgtcagttctcctgcaacgttcatttaaagccaccagggcaactgcctcaactccacatagacgaagaatttcctgtgaaaggatttttcaagccaatcaaacttcaagcagtggacttgcttgtctcagtgctcaatcagtggatggaggtaccgtgtttcaccaaattgaagcaaggtatccggcttcgctcttcaagcagcagctagtggatcaggttgaaaaggtgtatggagtgataagcgataaaataaaaaaggagctaaacccattacttgagttgtgcatacaggatccaagaacttactcaaatcaagcaaaggccttgatgtctccttctagtggcttgggccaacaggatcaactcatgcattggctgagcatcgtgaaaatcttcaacagctatttgcatgtcctcagagccaatcatgttccctcaattttggtccacaaattgcttacccaaatattttctgtggtcaatgtgcaattgtttaacaggctcctcttgaggcgtgaatgctgttcctttagcaatgggcaatacatcaaagatgggctaactcaactaagatattggtgcaatgacgtcagtcaagagtttgcagactcagcatgggtagcactgaggcatataagacaagctgttgactttgtggtaatttctctgaagccgataaggacatgggaagagatatgcaatgatatttgcccggctctcagtttgcagcagctagagcggatagtcggtatgtattgggatgatttaaagggaacaaatgtaacttcagccgagttcatgtcaagcatgagagctatgctgcgcgaagaatcaaatagcgtctccagcttttcggtcctgctggatgatgattccagcatacccttttcgcttgaagatatttcgaagtcaatgccaaacattgaggagacgtcagttaatgacctgctgcctttcatccgcgagaaccaaagctttgcgtttttattgtagtggagaggacacgaatccttagatttgttgtatgagattgcaggccagtctgtgtggagttactatccgtctgatgggtatgcgttgactttacacgtgctactgtttgattacctagcttacctgcatccacaggaactctcaaaactgacgtatccattcggccaccctcacgggagcctgcaggtatccaatcagaccgtatccgtgtgatggatgactgtgtctgtgtaggtgtgctcgcatgagcctggccctgacagcagatatgtgatttttacctgtatcggcgtatgtaggcaaaaagctaccgcaaatacgtgagttgcatcatgcatgtctaatcgagtgcgtgcagttaacccaacatgctctcggagctagtcaacgcatacaaagagccatgttag

SEQ ID NO: 60082 - DNA, 7151 bp, Zea Mays
gcaaccatcccgctgctctccgttccatcaccttgcgtcttgcgctcggcagcctcgtctcccccctctttcggcgaatgccacgccgcctcgaatcgcgcgctcatggcccgagcgatcagcctcttaccacctctccacccccaatccatcagcgccaaaaatagataggggatgaggaatcgcctctggtgcctggttcgcaccccattcccctccgcctcccggttcgatgctggtatcgcgcgcctctgcacgcgctcgagtcggaccacacggcgtgcctacttggcggcgaggcaaccggcgaccggcgcaagggagggagccgacgccgctgccgaacctgattcgacctcgccgacgacagccgtcgcgttttggtgatcgcattacgcatggctgccacattaaagattgttgtaggctctcatatatggctggaggataaagatttagtttggattgatggcgaggttttccgaactgaaggtcaaaatgtccatgtccacactaccaatggaaagacggttactgtgagcatatcagacattcatccaaaggacacagaagtgccatctgatggcattgatgacatgacaaggctatcatacttgcatgaacctggtgttctaaataatcttgctgttcgatatgcaaaaaatataatttatacctatactggcaatattctgattgcaattaatccattccaaagtctgccccatctttctgaaccccgtaccatggagaagtacaaaggtgcaaattttggtgagctcgaccctcacgtgtttgcaattgccgatgtttcttacaggcagatgatgaatgagggaaagagcaactccattttggtgagcggtgaaagcggtgctggtaaaactgaaaccacaaagatgctaatgagatatcttgcttttttgggcggacggtctaaaacaggggggaggacagttgaacaacaagttttagaatctaatccagtccttgaagcttttggcaatgcaaagactgtccgtaacaacaactcaagtcgatttggaaaatttgttgaaatccaatttgacaagagtgggaagatatcaggtgctgccattagaacatatttgcttgaaagatctcgtgtttgccaaatcaatagtccagagagaaactaccattgcttttactttctatgtgcagcaccgttggaggatatcaaaagttataagcttggtgacccatcatcattccactatctcaaccaatctacgtgcattaaacttgacgaaattagtgatgctaaggagtatcttgcaacacgaagtgcaatgaatacagttggcattactgagcaggaacaggaggctatattccgggtagttgctgctgtgcttcatctcgggaacatcagttttgtgaaagggagagaggcagattcatctgtaataaaggacgagaaagctaggttccatcttaatgcaacagcagagctcttgatgtgcgattgtggaaatctggagaacgcattaataaagaggaaaataaatacaccagaaggagttataaccacaacagttgatcctaattctgctactgttagcagggatggcttagcaaagcaaatatattctcagctatttgactggctcgtaaacagactaaatgcctccataggacacgatacatcctctgaccgattgattggagtacttgatatctatggtttcgaaagttttaagactaatagctttgaacaattatgcatcaatttcaccaatgaaaaacttcaacagcattttaatcagaatgtcttcaaaatggagcaggaagagtataacagggagcagattgactggagctacatagaatttgttgacaaccaagatgttctagacttgattgagaagaagcctggtggaattattgcacttcttgatgaagcttgtatgtttcctaagtgcacacacgaatcattttctcagaagttgtatgagaaattcaggaataacaaaagattttgcaaaccaaagctttctcgcactgcatttaccatacagcattatgcaggagaagtaacttaccaatctgatcagttcctggacaaaaacagagactatgtagttgtagaacatcaagaattactgaatgcttccaagtgctcttttgtgtcagggttattcccatcagtactagagaacacaaaagcatcgaagtcctccattgctactcgcttcaagtggcaactccaagaactaatggagactttgagttctacagaaccacattacatcagatgtattaagcccaataatcatcttaagcctgctacttttgagaacatcaatgttctgcagcaacttcggtgttcaggtgttcttgaagctattagaatcagctgtgctggatatcctacaagaaaaatatttcatgattttctctgtcgattttgcattcttgctcctgaagttttcacagaaagaaacaatgaaaagttaatatgccaaaagattttggacaatattggactccatggttatcagattggaagaacaaaggtgtttctgagagctggtcagatggctgaattagatgctagaagaactgaagtgcggaataaagcagctataaccgttcagagtagatttcgcactcatgttgctcgtgagcaattccttgcattacgcatgacatcaatatcttttcaatcttttgttagagtgatattggcctgtaagttacatgttttcctcagaaaacaagctgcagtactgcatatacagaaaagttaccgctgctattttgcttggaagacttactcggagctatgttcttcagccattacattgcagacaggtttaagggcctttggtgcttataacgagtacattatcagaaaacaaaataaagcttctatttgtgtccaggcttgttggcgttgccatagagatcatttgaattaccttaaaatgaaaagatcagtgttaatttatcagtgtgcatggagaagacggattgctagagaagaactcagaaagctcaaaatggctgcgagggacacagaagccctgaaggtggagaaggagaaacttgaggagcacgtggaagagctgactagccgtttgagcttcgaaaagaatcttaggattgatctagagaagagcaaggcaagagaaatttgcaaactacaggccactcttcgtgagatggaacagcgggttgaagaagccatagagatgcatgaaagagaattagccaaaaaggctattgaggaagctttagctcaagaaagggaaaagatcaccgtattgactaatgaagtcgatgagttgaaggtattactatcaagagaacgagaagaaaacagtgcaactaagagtgcactcgttgttgttcgtgaagaaaatgatgtgctgaataagaaaattgtggttgcagatgcaagcatggagcagcttagagatactgtaacgaggttgcaagaaagtttaattgagggagaagctactttgcttgcagaaagaaaagaaagtgatgcagccaagaaatcactcactgaagctcatgtaaaaaacgaggaactattcaataaaattgaagtagctgagcataacgttagtatcttccaagacgacatccaaagacttgaagaaactgcagctacattggagacttcattgttatctgagaaacaacagagtactgcaatcatttcacaattaactgaagcacaacaggacatccaagtactgcagaagaaatttgcagatgccaataagacaattgagctgcttcaagattctttgaaaaggtgtgaggacagcacaaccacaagggatgccttatatgtagcagaaagacaggagcatggtcaaaccaaacaagcactttccaaagctcaggaaagaaatttggaattgcttaggaaagttgatgatagtgagaaaactttaaacaagatgctggagaatgctcagagacttgagaaacatgcaacagcaagggaatccttgcttcttaagacaaagcagaatcttgactgcactacaaaagcgctaactgaagcacgagggagaaaccgagacttattgacaagttttgaggattcagctaaaaaaatcaatatgcttgaggattcacttaacagactagaagaatgcacagcagagaaagactctttgttggcagtagaaagaaaacaaaacaaaacgaccaaagaagaactggccaatgcccagaaaacaatcgatgaattagtacatgagtcacagcagtcccaggaaataagaaatcaattggaagataccatcaagaggtttaaagcagaatcgactgccagagacacaatattattatcagagaaacaggcacatgagacgaccaagaaagttctaactgaaattcagtcgagaaatgaagagttaatcaagaaaattcaggattgtgataaaaatattcttgagcttcagctaactgtggagaggcttcaggaaaacacatctactacagaggctttactgttgagagaacgagaacaaaacaatgcaaccatgaaggcacaagctgaaactcaagaaataaatttgcagttactgaacaagcttgaggacgttgagacaaaaattggtcttcttcaaggaagtgtacaaaggcttggtgataatacagcgaaagacactttgctgctatctgagaaacgtgagaaggatgccctgaaggaagcacttactgagtctgaatacaaaaatgaagagttactgataaaaactgaagaagccaacaaaaaagcttaaggagaacatggcagcttctttggaagctgaaagacaagaaaatgaagcaatcaagaggtcccttgttgaagctcaggagagaaacgatgcattatttaagaaagttagggatagcgaatacagggcccaccagcttcaagatactgtccaaaagcttcaagtagatgccatatctagactgtctagctttgtaatggagagacaagatggtgatggtgtcaagaatgcacatactgaggttcatggaacaaatgaagatctaatgaggagaaatgaaaacctcctaaaaaggaatgatgacttggtgaagaagattgaagattctgctatacttgttactgagcttagagggaacttggaaaggttagaagggaaagctgctaatttagaggctgaaaatcaattgcttcgtcaacaagcaattgcaactcctccatcaacagcaaagtcttctcaagctgcatgctctaaaatcaagatgtcaagaaagtggtcatattttaaatggcaacgtagcatatgctgaaatgaagtcctcaaccggtcaaacagaaatgagaccctcgatgggcagttcccttgatttgattaaccacaaggtttatgaaaatgggcaaagcttgtttaatgatgtatatcagcaccagcaaccccagaatcatcaacagttattgctgaaatatattacccaatatcttggattctctgggagaaaacctattgctgcgtctcttatatactactgtcttcttcattggagatcttttgaagaagcaaagacaactgtctttgacagtattatacaaattgtaaactcagcaactgaggctcaacatgatacgagaagcttggcctactggctgtccaacttatccacattgtcagttctcctgcaacgttcatttaaagccaccagggcaactgcctcaactccacatagacgaagaatttcctgtgaaaggatttttcaagccaatcaaacttcaagcagtggacttgcttgtctcagtgctcaatcagtggatggaggtaccgtgtttcaccaaattgaagcaaggtatccggcttcgctcttcaagcagcagctagtggatcaggttgaaaaggtgtatggagtgataagcgataaaataaaaaaggagctaaacccattacttgagttgtgcatacaggatccaagaacttactcaaatcaagcaaaggccttgatgtctccttctagtggcttgggccaacaggatcaactcatgcattggctgagcatcgtgaaaatcttcaacagctatttgcatgtcctcagagccaatcatgttccctcaattttggtccacaaattgcttacccaaatattttctgtggtcaatgtgcaattgtttaacaggtaagttttgggtcgtcctatcatattttcttcttggaaatgacagttttcacttctgttcctggggcgttctcttccttatttgaaaacaggctcctcttgaggcgtgaatgctgttcctttagcaatgggcaatacatcaaagatgggctaactcaactaagatattggtgcaatgacgtcagtcaagagtttgcagactcagcatgggtagcactgaggcatataagacaagctgttgactttgtggtaatttctctgaagccgataaggacatgggaagagatatgcaatgatatttgcccggctctcagtttgcagcagctagagcggatagtcggtatgtattgggatgatttaaagggaacaaatgtaacttcagccgagttcatgtcaagcatgagagctatgctgcgcgaagaatcaaatagcgtctccagcttttcggtcctgctggatgatgattccagcatacccttttcgcttgaagatatttcgaagtcaatgccaaacattgaggagacgtcagttaatgacctgctgcctttcatccgcgagaaccaaagctttgcgtttttattgtagtggagaggacacgaatccttagatttgttgtatgagattgcaggccagtctgtgtggagttactatccgtctgatgggtatgcgttgactttacacgtgctactgtttgattacctagcttacctgcatccacaggaactctcaaaactgacgtatccattcggccaccctcacgggagcctgcaggtatccaatcagaccgtatccgtgtgatggatgactgtgtctgtgtaggtgtgctcgcatgagcctggccctgacagcagatatgtgatttttacctgtatcggcgtatgtaggcaaaaagctaccgcaaatacgtgagttgcatcatgcatgtctaatcgagtgcgtgcagttaacccaacatgctctcggagctagtcaacgcatacaaagagccatgttag

SEQ ID NO: 60083 - DNA, 7062 bp, Zea Mays
gcaaccatcccgctgctctccgttccatcaccttgcgtcttgcgctcggcagcctcgtctcccccctctttcggcgaatgccacgccgcctcgaatcgcgcgctcatggcccgagcgatcagcctcttaccacctctccacccccaatccatcagcgccaaaaatagataggggatgaggaatcgcctctggtgcctggttcgcaccccattcccctccgcctcccggttcgatgctggtatcgcgcgcctctgcacgcgctcgagtcggaccacacggcgtgcctacttggcggcgaggcaaccggcgaccggcgcaagggagggagccgacgccgctgccgaacctgattcgacctcgccgacgacagccgtcgcgttttggtgatcgcattacgcatggctgccacattaaagattgttgtaggctctcatatatggctggaggataaagatttagtttggattgatggcgaggttttccgaactgaaggtcaaaatgtccatgtccacactaccaatggaaagacggttactgtgagcatatcagacattcatccaaaggacacagaagtgccatctgatggcattgatgacatgacaaggctatcatacttgcatgaacctggtgttctaaataatcttgctgttcgatatgcaaaaaatataatttatacctatactggcaatattctgattgcaattaatccattccaaagtctgccccatctttctgaaccccgtaccatggagaagtacaaaggtgcaaattttggtgagctcgaccctcacgtgtttgcaattgccgatgtttcttacaggcagatgatgaatgagggaaagagcaactccattttggtgagcggtgaaagcggtgctggtaaaactgaaaccacaaagatgctaatgagatatcttgcttttttgggcggacggtctaaaacaggggggaggacagttgaacaacaagttttagaatctaatccagtccttgaagcttttggcaatgcaaagactgtccgtaacaacaactcaagtcgatttggaaaatttgttgaaatccaatttgacaagagtgggaagatatcaggtgctgccattagaacatatttgcttgaaagatctcgtgtttgccaaatcaatagtccagagagaaactaccattgcttttactttctatgtgcagcaccgttggaggatatcaaaagttataagcttggtgacccatcatcattccactatctcaaccaatctacgtgcattaaacttgacgaaattagtgatgctaaggagtatcttgcaacacgaagtgcaatgaatacagttggcattactgagcaggaacaggaggctatattccgggtagttgctgctgtgcttcatctcgggaacatcagttttgtgaaagggagagaggcagattcatctgtaataaaggacgagaaagctaggttccatcttaatgcaacagcagagctcttgatgtgcgattgtggaaatctggagaacgcattaataaagaggaaaataaatacaccagaaggagttataaccacaacagttgatcctaattctgctactgttagcagggatggcttagcaaagcaaatatattctcagctatttgactggctcgtaaacagactaaatgcctccataggacacgatacatcctctgaccgattgattggagtacttgatatctatggtttcgaaagttttaagactaatagctttgaacaattatgcatcaatttcaccaatgaaaaacttcaacagcattttaatcagaatgtcttcaaaatggagcaggaagagtataacagggagcagattgactggagctacatagaatttgttgacaaccaagatgttctagacttgattgagaagaagcctggtggaattattgcacttcttgatgaagcttgtatgtttcctaagtgcacacacgaatcattttctcagaagttgtatgagaaattcaggaataacaaaagattttgcaaaccaaagctttctcgcactgcatttaccatacagcattatgcaggagaagtaacttaccaatctgatcagttcctggacaaaaacagagactatgtagttgtagaacatcaagaattactgaatgcttccaagtgctcttttgtgtcagggttattcccatcagtactagagaacacaaaagcatcgaagtcctccattgctactcgcttcaagtggcaactccaagaactaatggagactttgagttctacagaaccacattacatcagatgtattaagcccaataatcatcttaagcctgctacttttgagaacatcaatgttctgcagcaacttcggtgttcaggtgttcttgaagctattagaatcagctgtgctggatatcctacaagaaaaatatttcatgattttctctgtcgattttgcattcttgctcctgaagttttcacagaaagaaacaatgaaaagttaatatgccaaaagattttggacaatattggactccatggttatcagattggaagaacaaaggtgtttctgagagctggtcagatggctgaattagatgctagaagaactgaagtgcggaataaagcagctataaccgttcagagtagatttcgcactcatgttgctcgtgagcaattccttgcattacgcatgacatcaatatcttttcaatcttttgttagagtgatattggcctgtaagttacatgttttcctcagaaaacaagctgcagtactgcatatacagaaaagttaccgctgctattttgcttggaagacttactcggagctatgttcttcagccattacattgcagacaggtttaagggcctttggtgcttataacgagtacattatcagaaaacaaaataaagcttctatttgtgtccaggcttgttggcgttgccatagagatcatttgaattaccttaaaatgaaaagatcagtgttaatttatcagtgtgcatggagaagacggattgctagagaagaactcagaaagctcaaaatggctgcgagggacacagaagccctgaaggtggagaaggagaaacttgaggagcacgtggaagagctgactagccgtttgagcttcgaaaagaatcttaggattgatctagagaagagcaaggcaagagaaatttgcaaactacaggccactcttcgtgagatggaacagcgggttgaagaagccatagagatgcatgaaagagaattagccaaaaaggctattgaggaagctttagctcaagaaagggaaaagatcaccgtattgactaatgaagtcgatgagttgaaggtattactatcaagagaacgagaagaaaacagtgcaactaagagtgcactcgttgttgttcgtgaagaaaatgatgtgctgaataagaaaattgtggttgcagatgcaagcatggagcagcttagagatactgtaacgaggttgcaagaaagtttaattgagggagaagctactttgcttgcagaaagaaaagaaagtgatgcagccaagaaatcactcactgaagctcatgtaaaaaacgaggaactattcaataaaattgaagtagctgagcataacgttagtatcttccaagacgacatccaaagacttgaagaaactgcagctacattggagacttcattgttatctgagaaacaacagagtactgcaatcatttcacaattaactgaagcacaacaggacatccaagtactgcagaagaaatttgcagatgccaataagacaattgagctgcttcaagattctttgaaaaggtgtgaggacagcacaaccacaagggatgccttatatgtagcagaaagacaggagcatggtcaaaccaaacaagcactttccaaagctcaggaaagaaatttggaattgcttaggaaagttgatgatagtgagaaaactttaaacaagatgctggagaatgctcagagacttgagaaacatgcaacagcaagggaatccttgcttcttaagacaaagcagaatcttgactgcactacaaaagcgctaactgaagcacgagggagaaaccgagacttattgacaagttttgaggattcagctaaaaaaatcaatatgcttgaggattcacttaacagactagaagaatgcacagcagagaaagactctttgttggcagtagaaagaaaacaaaacaaaacgaccaaagaagaactggccaatgcccagaaaacaatcgatgaattagtacatgagtcacagcagtcccaggaaataagaaatcaattggaagataccatcaagaggtttaaagcagaatcgactgccagagacacaatattattatcagagaaacaggcacatgagacgaccaagaaagttctaactgaaattcagtcgagaaatgaagagttaatcaagaaaattcaggattgtgataaaaatattcttgagcttcagctaactgtggagaggcttcaggaaaacacatctactacagaggctttactgttgagagaacgagaacaaaacaatgcaaccatgaaggcacaagctgaaactcaagaaataaatttgcagttactgaacaagcttgaggacgttgagacaaaaattggtcttcttcaaggaagtgtacaaaggcttggtgataatacagcgaaagacactttgctgctatctgagaaacgtgagaaggatgccctgaaggaagcacttactgagtctgaatacaaaaatgaagagttactgataaaaactgaagaagccaacaaaaaagcttaaggagaacatggcagcttctttggaagctgaaagacaagaaaatgaagcaatcaagaggtcccttgttgaagctcaggagagaaacgatgcattatttaagaaagttagggatagcgaatacagggcccaccagcttcaagatactgtccaaaagcttcaagtagatgccatatctagactgtctagctttgtaatggagagacaagatggtgatggtgtcaagaatgcacatactgaggttcatggaacaaatgaagatctaatgaggagaaatgaaaacctcctaaaaaggaatgatgacttggtgaagaagattgaagattctgctatacttgttactgagcttagagggaacttggaaaggttagaagggaaagctgctaatttagaggctgaaaatcaattgcttcgtcaacaagcaattgcaactcctccatcaacagcaaagtcttctcaagctgcatgctctaaaatcagtatgatccatagatgtcaagaaagtggtcatattttaaatggcaacgtagcatatgctgaaatgaagtcctcaaccggtcaaacagaaatgagaccctcgatgggcagttcccttgatttgattaaccacaaggtttatgaaaatgggcaaagcttgtttaatgatgtatatcagcaccagcaaccccagaatcatcaacagttattgctgaaatatattacccaatatcttggattctctgggagaaaacctattgctgcgtctcttatatactactgtcttcttcattggagatcttttgaagaagcaaagacaactgtctttgacagtattatacaaattgtaaactcagcaactgaggctcaacatgatacgagaagcttggcctactggctgtccaacttatccacattgtcagttctcctgcaacgttcatttaaagccaccagggcaactgcctcaactccacatagacgaagaatttcctgtgaaaggatttttcaagccaatcaaacttcaagcagtggacttgcttgtctcagtgctcaatcagtggatggaggtaccgtgtttcaccaaattgaagcaaggtatccggcttcgctcttcaagcagcagctagtggatcaggttgaaaaggtgtatggagtgataagcgataaaataaaaaaggagctaaacccattacttgagttgtgcatacaggatccaagaacttactcaaatcaagcaaaggccttgatgtctccttctagtggcttgggccaacaggatcaactcatgcattggctgagcatcgtgaaaatcttcaacagctatttgcatgtcctcagagccaatcatgttccctcaattttggtccacaaattgcttacccaaatattttctgtggtcaatgtgcaattgtttaacaggctcctcttgaggcgtgaatgctgttcctttagcaatgggcaatacatcaaagatgggctaactcaactaagatattggtgcaatgacgtcagtcaagagtttgcagactcagcatgggtagcactgaggcatataagacaagctgttgactttgtggtaatttctctgaagccgataaggacatgggaagagatatgcaatgatatttgcccgtttgcagcagctagagcggatagtcggtatgtattgggatgatttaaagggaacaaatgtaacttcagccgagttcatgtcaagcatgagagctatgctgcgcgaagaatcaaatagcgtctccagcttttcggtcctgctggatgatgattccagcatacccttttcgcttgaagatatttcgaagtcaatgccaaacattgaggagacgtcagttaatgacctgctgcctttcatccgcgagaaccaaagctttgcgtttttattgtagtggagaggacacgaatccttagatttgttgtatgagattgcaggccagtctgtgtggagttactatccgtctgatgggtatgcgttgactttacacgtgctactgtttgattacctagcttacctgcatccacaggaactctcaaaactgacgtatccattcggccaccctcacgggagcctgcaggtatccaatcagaccgtatccgtgtgatggatgactgtgtctgtgtaggtgtgctcgcatgagcctggccctgacagcagatatgtgatttttacctgtatcggcgtatgtaggcaaaaagctaccgcaaatacgtgagttgcatcatgcatgtctaatcgagtgcgtgcagttaacccaacatgctctcggagctagtcaacgcatacaaagagccatgttag

SEQ ID NO: 60084 - DNA, 6969 bp, Zea Mays
caaccatcccgctgctctccgttccatcaccttgcgtcttgcgctcggcagcctcgtctcccccctctttcggcgaatgccacgccgcctcgaatcgcgcgctcatggcccgagcgatcagcctcttaccacctctccacccccaatccatcagcgccaaaaatagataggggatgaggaatcgcctctggtgcctggttcgcaccccattcccctccgcctcccggttcgatgctggtatcgcgcgcctctgcacgcgctcgagtcggaccacacggcgtgcctacttggcggcgaggcaaccggcgaccggcgcaagggagggagccgacgccgctgccgaacctgattcgacctcgccgacgacagccgtcgcgttttggtgatcgcattacgcatggctgccacattaaagattgttgtaggctctcatatatggctggaggataaagatttagtttggattgatggcgaggttttccgaactgaaggtcaaaatgtccatgtccacactaccaatggaaagacggttactgtgagcatatcagacattcatccaaaggacacagaagtgccatctgatggcattgatgacatgacaaggctatcatacttgcatgaacctggtgttctaaataatcttgctgttcgatatgcaaaaaatataatttatacctatactggcaatattctgattgcaattaatccattccaaagtctgccccatctttctgaaccccgtaccatggagaagtacaaaggtgcaaattttggtgagctcgaccctcacgtgtttgcaattgccgatgtttcttacaggcagatgatgaatgagggaaagagcaactccattttggtgagcggtgaaagcggtgctggtaaaactgaaaccacaaagatgctaatgagatatcttgcttttttgggcggacggtctaaaacaggggggaggacagttgaacaacaagttttagaatctaatccagtccttgaagcttttggcaatgcaaagactgtccgtaacaacaactcaagtcgatttggaaaatttgttgaaatccaatttgacaagagtgggaagatatcaggtgctgccattagaacatatttgcttgaaagatctcgtgtttgccaaatcaatagtccagagagaaactaccattgcttttactttctatgtgcagcaccgttggaggatatcaaaagttataagcttggtgacccatcatcattccactatctcaaccaatctacgtgcattaaacttgacgaaattagtgatgctaaggagtatcttgcaacacgaagtgcaatgaatacagttggcattactgagcaggaacaggaggctatattccgggtagttgctgctgtgcttcatctcgggaacatcagttttgtgaaagggagagaggcagattcatctgtaataaaggacgagaaagctaggttccatcttaatgcaacagcagagctcttgatgtgcgattgtggaaatctggagaacgcattaataaagaggaaaataaatacaccagaaggagttataaccacaacagttgatcctaattctgctactgttagcagggatggcttagcaaagcaaatatattctcagctatttgactggctcgtaaacagactaaatgcctccataggacacgatacatcctctgaccgattgattggagtacttgatatctatggtttcgaaagttttaagactaatagctttgaacaattatgcatcaatttcaccaatgaaaaacttcaacagcattttaatcagaatgtcttcaaaatggagcaggaagagtataacagggagcagattgactggagctacatagaatttgttgacaaccaagatgttctagacttgattgagaagaagcctggtggaattattgcacttcttgatgaagcttgtatgtttcctaagtgcacacacgaatcattttctcagaagttgtatgagaaattcaggaataacaaaagattttgcaaaccaaagctttctcgcactgcatttaccatacagcattatgcaggagaagtaacttaccaatctgatcagttcctggacaaaaacagagactatgtagttgtagaacatcaagaattactgaatgcttccaagtgctcttttgtgtcagggttattcccatcagtactagagaacacaaaagcatcgaagtcctccattgctactcgcttcaagtggcaactccaagaactaatggagactttgagttctacagaaccacattacatcagatgtattaagcccaataatcatcttaagcctgctacttttgagaacatcaatgttctgcagcaacttcggtgttcaggtgttcttgaagctattagaatcagctgtgctggatatcctacaagaaaaatatttcatgattttctctgtcgattttgcattcttgctcctgaagttttcacagaaagaaacaatgaaaagttaatatgccaaaagattttggacaatattggactccatggttatcagattggaagaacaaaggtgtttctgagagctggtcagatggctgaattagatgctagaagaactgaagtgcggaataaagcagctataaccgttcagagtagatttcgcactcatgttgctcgtgagcaattccttgcattacgcatgacatcaatatcttttcaatcttttgttagagtgatattggcctgtaagttacatgttttcctcagaaaacaagctgcagtactgcatatacagaaaagttaccgctgctattttgcttggaagacttactcggagctatgttcttcagccattacattgcagacaggtttaagggcctttggtgcttataacgagtacattatcagaaaacaaaataaagcttctatttgtgtccaggcttgttggcgttgccatagagatcatttgaattaccttaaaatgaaaagatcagtgttaatttatcagtgtgcatggagaagacggattgctagagaagaactcagaaagctcaaaatggctgcgagggacacagaagccctgaaggtggagaaggagaaacttgaggagcacgtggaagagctgactagccgtttgagcttcgaaaagaatcttaggattgatctagagaagagcaaggcaagagaaatttgcaaactacaggccactcttcgtgagatggaacagcgggttgaagaagccatagagatgcatgaaagagaattagccaaaaaggctattgaggaagctttagctcaagaaagggaaaagatcaccgtattgactaatgaagtcgatgagttgaaggtattactatcaagagaacgagaagaaaacagtgcaactaagagtgcactcgttgttgttcgtgaagaaaatgatgtgctgaataagaaaattgtggttgcagatgcaagcatggagcagcttagagatactgtaacgaggttgcaagaaagtttaattgagggagaagctactttgcttgcagaaagaaaagaaagtgatgcagccaagaaatcactcactgaagctcatgtaaaaaacgaggaactattcaataaaattgaagtagctgagcataacgttagtatcttccaagacgacatccaaagacttgaagaaactgcagctacattggagacttcattgttatctgagaaacaacagagtactgcaatcatttcacaattaactgaagcacaacaggacatccaagtactgcagaagaaatttgcagatgccaataagacaattgagctgcttcaagattctttgaaaaggtgtgaggacagcacaaccacaagggatgccttatatgtagcagaaagacaggagcatggtcaaaccaaacaagcactttccaaagctcaggaaagaaatttggaattgcttaggaaagttgatgatagtgagaaaactttaaacaagatgctggagaatgctcagagacttgagaaacatgcaacagcaagggaatccttgcttcttaagacaaagcagaatcttgactgcactacaaaagcgctaactgaagcacgagggagaaaccgagacttattgacaagttttgaggattcagctaaaaaaatcaatatgcttgaggattcacttaacagagaaagactctttgttggcagtagaaagaaaacaaaacaaaacgaccaaagaagaactggccaatgcccagaaaacaatcgatgaattagtacatgagtcacagcagtcccaggaaataagaaatcaattggaagataccatcaagaggtttaaagcagaatcgactgccagagacacaatattattatcagagaaacaggcacatgagacgaccaagaaagttctaactgaaattcagtcgagaaatgaagagttaatcaagaaaattcaggattgtgataaaaatattcttgagcttcagctaactgtggagaggcttcaggaaaacacatctactacagaggctttactgttgagagaacgagaacaaaacaatgcaaccatgaaggcacaagctgaaactcaagaaataaatttgcagttactgaacaagcttgaggacgttgagacaaaaattggtcttcttcaaggaagtgtacaaaggcttggtgataatacagcgaaagacactttgctgctatctgagaaacgtgagaaggatgccctgaaggaagcacttactgagtctgaatacaaaaatgaagagttactgataaaaactgaagaagccaacaaaaaagttgagcatcttcaaaacactataaattcgcttaaggagaacatggcagcttctttggaagctgaaagacaagaaaatgaagcaatcaagaggtcccttgttgaagctcaggagagaaacgatgcattatttaagaaagttagggatagcgaatacagggcccaccagcttcaagatactgtccaaaagcttcaagtagatgccatatctagactgtctagctttgtaatggagagacaagatggtgatggtgtcaagaatgcacatactgaggttcatggaacaaatgaagatctaatgaggagaaatgaaaacctcctaaaaaggaatgatgacttggtgaagaagattgaagattctgctatacttgttactgagcttagagggaacttggaaaggttagaagggaaagctgctaatttagaggctgaaaatcaattgcttcgtcaacaagcaattgcaactcctccatcaacagcaaagtcttctcaagctgcatgctctaaaatcagtatgatccatagatgtcaagaaagtggtcatattttaaatggcaacgtagcatatgctgaaatgaagtcctcaaccggtcaaacagaaatgagaccctcgatgggcagttcccttgatttgattaaccacaaggtttatgaaaatgggcaaagcttgtttaatgatgtatatcagcaccagcaaccccagaatcatcaacagttattgctgaaatatattacccaatatcttggattctctgggagaaaacctattgctgcgtctcttatatactactgtcttcttcattggagatcttttgaagaagcaaagacaactgtctttgacagtattatacaaattgtaaactcagcaactgaggctcaacatgatacgagaagcttggcctactggctgtccaacttatccacattgtcagttctcctgcaacgttcatttaaagccaccagggcaactgcctcaactccacatagacgaagaatttcctgtgaaaggatttttcaagccaatcaaacttcaagcagtggacttgcttgtctcagtgctcaatcagtggatggaggtaccgtgtttcaccaaattgaagcaaggtatccggcttcgctcttcaagcagcagctagtggatcaggttgaaaaggtgtatggagtgataagcgataaaataaaaaaggagctaaacccattacttgagttgtgcatacaggatccaagaacttactcaaatcaagcaaaggccttgatgtctccttctagtggcttgggccaacaggatcaactcatgcattggctgagcatcgtgaaaatcttcaacagctatttgcatgtcctcagagccaatcatgttccctcaattttggtccacaaattgcttacccaaatattttctgtggtcaatgtgcaattgtttaacaggctcctcttgaggcgtgaatgctgttcctttagcaatgggcaatacatcaaagatgggctaactcaactaagatattggtgcaatgacgtcagtcaagagtttgcagactcagcatgggtagcactgaggcatataagacaagctgttgactttgtggtaatttctctgaagccgataaggacatgggaagagatatgcaatgatatttgcccggctctcagtttgcagcagctagagcggatagtcggtatgtattgggatgatttaaagggaacaaatgtaacttcagccgagttcatgtcaagcatgagagctatgctgcgcgaagaatcaaatagcgtctccagcttttcggtcctgctggatgatgattccagcatacccttttcgcttgaagatatttcgaagtcaatgccaaacattgaggagacgtcagttaatgacctgctgcctttcatccgcgagaaccaaagctttgcgtttttattgtagtggagaggacacgaatccttagatttgttgtatgagattgcaggccagtctgtgtggagttactatccgtctgatgggtatccaatcagaccgtatccgtgtgatggatgactgtgtctgtgtaggtgtgctcgcatgagcctggccctgacagcagatatgtgatttttacctgtatcggcgtatgtaggcaaaaagctaccgcaaatacgtgagttgcatcatgcatgtctaatcgagtgcgtgcagttaacccaacatgctctcggagctagtcaacgcatacaaagagccatgttag

SEQ ID NO: 60085 - DNA, 7087 bp, Zea Mays
caaccatcccgctgctctccgttccatcaccttgcgtcttgcgctcggcagcctcgtctcccccctctttcggcgaatgccacgccgcctcgaatcgcgcgctcatggcccgagcgatcagcctcttaccacctctccacccccaatccatcagcgccaaaaatagataggggatgaggaatcgcctctggtgcctggttcgcaccccattcccctccgcctcccggttcgatgctggtatcgcgcgcctctgcacgcgctcgagtcggaccacacggcgtgcctacttggcggcgaggcaaccggcgaccggcgcaagggagggagccgacgccgctgccgaacctgattcgacctcgccgacgacagccgtcgcgttttggtgatcgcattacgcatggctgccacattaaagattgttgtaggctctcatatatggctggaggataaagatttagtttggattgatggcgaggttttccgaactgaaggtcaaaatgtccatgtccacactaccaatggaaagacggttactgtgagcatatcagacattcatccaaaggacacagaagtgccatctgatggcattgatgacatgacaaggctatcatacttgcatgaacctggtgttctaaataatcttgctgttcgatatgcaaaaaatataatttatacctatactggcaatattctgattgcaattaatccattccaaagtctgccccatctttctgaaccccgtaccatggagaagtacaaaggtgcaaattttggtgagctcgaccctcacgtgtttgcaattgccgatgtttcttacaggcagatgatgaatgagggaaagagcaactccattttggtgagcggtgaaagcggtgctggtaaaactgaaaccacaaagatgctaatgagatatcttgcttttttgggcggacggtctaaaacaggggggaggacagttgaacaacaagttttagaatctaatccagtccttgaagcttttggcaatgcaaagactgtccgtaacaacaactcaagtcgatttggaaaatttgttgaaatccaatttgacaagagtgggaagatatcaggtgctgccattagaacatatttgcttgaaagatctcgtgtttgccaaatcaatagtccagagagaaactaccattgcttttactttctatgtgcagcaccgttggaggatatcaaaagttataagcttggtgacccatcatcattccactatctcaaccaatctacgtgcattaaacttgacgaaattagtgatgctaaggagtatcttgcaacacgaagtgcaatgaatacagttggcattactgagcaggaacaggaggctatattccgggtagttgctgctgtgcttcatctcgggaacatcagttttgtgaaagggagagaggcagattcatctgtaataaaggacgagaaagctaggttccatcttaatgcaacagcagagctcttgatgtgcgattgtggaaatctggagaacgcattaataaagaggaaaataaatacaccagaaggagttataaccacaacagttgatcctaattctgctactgttagcagggatggcttagcaaagcaaatatattctcagctatttgactggctcgtaaacagactaaatgcctccataggacacgatacatcctctgaccgattgattggagtacttgatatctatggtttcgaaagttttaagactaatagctttgaacaattatgcatcaatttcaccaatgaaaaacttcaacagcattttaatcagaatgtcttcaaaatggagcaggaagagtataacagggagcagattgactggagctacatagaatttgttgacaaccaagatgttctagacttgattgagaagaagcctggtggaattattgcacttcttgatgaagcttgtatgtttcctaagtgcacacacgaatcattttctcagaagttgtatgagaaattcaggaataacaaaagattttgcaaaccaaagctttctcgcactgcatttaccatacagcattatgcaggagaagtaacttaccaatctgatcagttcctggacaaaaacagagactatgtagttgtagaacatcaagaattactgaatgcttccaagtgctcttttgtgtcagggttattcccatcagtactagagaacacaaaagcatcgaagtcctccattgctactcgcttcaagtggcaactccaagaactaatggagactttgagttctacagaaccacattacatcagatgtattaagcccaataatcatcttaagcctgctacttttgagaacatcaatgttctgcagcaacttcggtgttcaggtgttcttgaagctattagaatcagctgtgctggatatcctacaagaaaaatatttcatgattttctctgtcgattttgcattcttgctcctgaagttttcacagaaagaaacaatgaaaagttaatatgccaaaagattttggacaatattggactccatggttatcagattggaagaacaaaggtgtttctgagagctggtcagatggctgaattagatgctagaagaactgaagtgcggaataaagcagctataaccgttcagagtagatttcgcactcatgttgctcgtgagcaattccttgcattacgcatgacatcaatatcttttcaatcttttgttagagtgatattggcctgtaagttacatgttttcctcagaaaacaagctgcagtactgcatatacagaaaagttaccgctgctattttgcttggaagacttactcggagctatgttcttcagccattacattgcagacaggtttaagggcctttggtgcttataacgagtacattatcagaaaacaaaataaagcttctatttgtgtccaggcttgttggcgttgccatagagatcatttgaattaccttaaaatgaaaagatcagtgttaatttatcagtgtgcatggagaagacggattgctagagaagaactcagaaagctcaaaatggctgcgagggacacagaagccctgaaggtggagaaggagaaacttgaggagcacgtggaagagctgactagccgtttgagcttcgaaaagaatcttaggattgatctagagaagagcaaggcaagagaaatttgcaaactacaggccactcttcgtgagatggaacagcgggttgaagaagccatagagatgcatgaaagagaattagccaaaaaggctattgaggaagctttagctcaagaaagggaaaagatcaccgtattgactaatgaagtcgatgagttgaaggtattactatcaagagaacgagaagaaaacagtgcaactaagagtgcactcgttgttgttcgtgaagaaaatgatgtgctgaataagaaaattgtggttgcagatgcaagcatggagcagcttagagatactgtaacgaggttgcaagaaagtttaattgagggagaagctactttgcttgcagaaagaaaagaaagtgatgcagccaagaaatcactcactgaagctcatgtaaaaaacgaggaactattcaataaaattgaagtagctgagcataacgttagtatcttccaagacgacatccaaagacttgaagaaactgcagctacattggagacttcattgttatctgagaaacaacagagtactgcaatcatttcacaattaactgaagcacaacaggacatccaagtactgcagaagaaatttgcagatgccaataagacaattgagctgcttcaagattctttgaaaaggtgtgaggacagcacaaccacaagggatgccttatatgtagcagaaagacaggagcatggtcaaaccaaacaagcactttccaaagctcaggaaagaaatttggaattgcttaggaaagttgatgatagtgagaaaactttaaacaagatgctggagaatgctcagagacttgagaaacatgcaacagcaagggaatccttgcttcttaagacaaagcagaatcttgactgcactacaaaagcgctaactgaagcacgagggagaaaccgagacttattgacaagttttgaggattcagctaaaaaaatcaatatgcttgaggattcacttaacagactagaagaatgcacagcagagaaagactctttgttggcagtagaaagaaaacaaaacaaaacgaccaaagaagaactggccaatgcccagaaaacaatcgatgaattagtacatgagtcacagcagtcccaggaaataagaaatcaattggaagataccatcaagaggtttaaagcagaatcgactgccagagacacaatattattatcagagaaacaggcacatgagacgaccaagaaagttctaactgaaattcagtcgagaaatgaagagttaatcaagaaaattcaggattgtgataaaaatattcttgagcttcagctaactgtggagaggcttcaggaaaacacatctactacagaggctttactgttgagagaacgagaacaaaacaatgcaaccatgaaggcacaagctgaaactcaagaaataaatttgcagttactgaacaagcttgaggacgttgagacaaaaattggtcttcttcaaggaagtgtacaaaggcttggtgataatacagcgaaagacactttgctgctatctgagaaacgtgagaaggatgccctgaaggaagcacttactgagtctgaatacaaaaatgaagagttactgataaaaactgaagaagccaacaaaaaagttgagcatcttcaaaacactataaattcgcttaaggagaacatggcagcttctttggaagctgaaagacaagaaaatgaagcaatcaagaggtcccttgttgaagctcaggagagaaacgatgcattatttaagaaagttagggatagcgaatacagggcccaccagcttcaagatactgtccaaaagcttcaagtagatgccatatctagactgtctagctttgtaatggagagacaagatggtgatggtgtcaagaatgcacatactgaggttcatggaacaaatgaagatctaatgaggagaaatgaaaacctcctaaaaaggaatgatgacttggtgaagaagattgaagattctgctatacttgttactgagcttagagggaacttggaaaggttagaagggaaagctgctaatttagaggctgaaaatcaattgcttcgtcaacaagcaattgcaactcctccatcaacagcaaagtcttctcaagctgcatgctctaaaatcaagatgtcaagaaagtggtcatattttaaatggcaacgtagcatatgctgaaatgaagtcctcaaccggtcaaacagaaatgagaccctcgatgggcagttcccttgatttgattaaccacaaggtttatgaaaatgggcaaagcttgtttaatgatgtatatcagcaccagcaaccccagaatcatcaacagttattgctgaaatatattacccaatatcttggattctctgggagaaaacctattgctgcgtctcttatatactactgtcttcttcattggagatcttttgaagaagcaaagacaactgtctttgacagtattatacaaattgtaaactcagcaactgaggctcaacatgatacgagaagcttggcctactggctgtccaacttatccacattgtcagttctcctgcaacgttcatttaaagccaccagggcaactgcctcaactccacatagacgaagaatttcctgtgaaaggatttttcaagccaatcaaacttcaagcagtggacttgcttgtctcagtgctcaatcagtggatggaggtaccgtgtttcaccaaattgaagcaaggtatccggcttcgctcttcaagcagcagctagtggatcaggttgaaaaggtgtatggagtgataagcgataaaataaaaaaggagctaaacccattacttgagttgtgcatacaggatccaagaacttactcaaatcaagcaaaggccttgatgtctccttctagtggcttgggccaacaggatcaactcatgcattggctgagcatcgtgaaaatcttcaacagctatttgcatgtcctcagagccaatcatgttccctcaattttggtccacaaattgcttacccaaatattttctgtggtcaatgtgcaattgtttaacaggctcctcttgaggcgtgaatgctgttcctttagcaatgggcaatacatcaaagatgggctaactcaactaagatattggtgcaatgacgtcagtcaagagtttgcagactcagcatgggtagcactgaggcatataagacaagctgttgactttgtggtaatttctctgaagccgataaggacatgggaagagatatgcaatgatatttgcccggctctcagtttgcagcagctagagcggatagtcggtatgtattgggatgatttaaagggaacaaatgtaacttcagccgagttcatgtcaagcatgagagctatgctgcgcgaagaatcaaatagcgtctccagcttttcggtcctgctggatgatgattccagcatacccttttcgcttgaagatatttcgaagtcaatgccaaacattgaggagacgtcagttaatgacctgctgcctttcatccgcgagaaccaaagctttgcgtttttattgtagtggagaggacacgaatccttagatttgttgtatgagattgcaggccagtctgtgtggagttactatccgtctgatgggtatgcgttgactttacacgtgctactgtttgattacctagcttacctgcatccacaggaactctcaaaactgacgtatccattcggccaccctcacgggagcctgcaggtatccaatcagaccgtatccgtgtgatggatgactgtgtctgtgtaggtgtgctcgcatgagcctggccctgacagcagatatgtgatttttacctgtatcggcgtatgtaggcaaaaagctaccgcaaatacgtgagttgcatcatgcatgtctaatcgagtgcgtgcagttaacccaacatgctctcggagctagtcaacgcatacaaagagccatgttag

SEQ ID NO: 60086 - DNA, 7288 bp, Zea Mays
gttccatcaccttgcgtcttgcgctcggcagcctcgtctcccccctctttcggcgaatgccacgccgcctcgaatcgcgcgctcatggcccgagcgatcagcctcttaccacctctccacccccaatccatcagcgccaaaaatagataggggatgaggaatcgcctctggtgcctggttcgcaccccattcccctccgcctcccggttcgatgctggtatcgcgcgcctctgcacgcgctcgagtcggaccacacggcgtgcctacttggcggcgaggcaaccggcgaccggcgcaagggagggagccgacgccgctgccgaacctgattcgacctcgccgacgacagccgtcgcgttttggtgatcgcattacgcatggctgccacattaaagattgttgtaggctctcatatatggctggaggataaagatttagtttggattgatggcgaggttttccgaactgaaggtcaaaatgtccatgtccacactaccaatggaaagacggttactgtgagcatatcagacattcatccaaaggacacagaagtgccatctgatggcattgatgacatgacaaggctatcatacttgcatgaacctggtgttctaaataatcttgctgttcgatatgcaaaaaatataatttatacctatactggcaatattctgattgcaattaatccattccaaagtctgccccatctttctgaaccccgtaccatggagaagtacaaaggtgcaaattttggtgagctcgaccctcacgtgtttgcaattgccgatgtttcttacaggcagatgatgaatgagggaaagagcaactccattttggtgagcggtgaaagcggtgctggtaaaactgaaaccacaaagatgctaatgagatatcttgcttttttgggcggacggtctaaaacaggggggaggacagttgaacaacaagttttagaatctaatccagtccttgaagcttttggcaatgcaaagactgtccgtaacaacaactcaagtcgatttggaaaatttgttgaaatccaatttgacaagagtgggaagatatcaggtgctgccattagaacatatttgcttgaaagatctcgtgtttgccaaatcaatagtccagagagaaactaccattgcttttactttctatgtgcagcaccgttggaggatatcaaaagttataagcttggtgacccatcatcattccactatctcaaccaatctacgtgcattaaacttgacgaaattagtgatgctaaggagtatcttgcaacacgaagtgcaatgaatacagttggcattactgagcaggaacaggaggctatattccgggtagttgctgctgtgcttcatctcgggaacatcagttttgtgaaagggagagaggcagattcatctgtaataaaggacgagaaagctaggttccatcttaatgcaacagcagagctcttgatgtgcgattgtggaaatctggagaacgcattaataaagaggaaaataaatacaccagaaggagttataaccacaacagttgatcctaattctgctactgttagcagggatggcttagcaaagcaaatatattctcagctatttgactggctcgtaaacagactaaatgcctccataggacacgatacatcctctgaccgattgattggagtacttgatatctatggtttcgaaagttttaagactaatagctttgaacaattatgcatcaatttcaccaatgaaaaacttcaacagcattttaatcagaatgtcttcaaaatggagcaggaagagtataacagggagcagattgactggagctacatagaatttgttgacaaccaagatgttctagacttgattgagaagaagcctggtggaattattgcacttcttgatgaagcttgtatgtttcctaagtgcacacacgaatcattttctcagaagttgtatgagaaattcaggaataacaaaagattttgcaaaccaaagctttctcgcactgcatttaccatacagcattatgcaggagaagtaacttaccaatctgatcagttcctggacaaaaacagagactatgtagttgtagaacatcaagaattactgaatgcttccaagtgctcttttgtgtcagggttattcccatcagtactagagaacacaaaagcatcgaagtcctccattgctactcgcttcaagtggcaactccaagaactaatggagactttgagttctacagaaccacattacatcagatgtattaagcccaataatcatcttaagcctgctacttttgagaacatcaatgttctgcagcaacttcggtgttcaggtgttcttgaagctattagaatcagctgtgctggatatcctacaagaaaaatatttcatgattttctctgtcgattttgcattcttgctcctgaagttttcacagaaagaaacaatgaaaagttaatatgccaaaagattttggacaatattggactccatggttatcagattggaagaacaaaggtgtttctgagagctggtcagatggctgaattagatgctagaagaactgaagtgcggaataaagcagctataaccgttcagagtagatttcgcactcatgttgctcgtgagcaattccttgcattacgcatgacatcaatatcttttcaatcttttgttagagtgatattggcctgtaagttacatgttttcctcagaaaacaagctgcagtactgcatatacagaaaagttaccgctgctattttgcttggaagacttactcggagctatgttcttcagccattacattgcagacaggtttaagggcctttggtgcttataacgagtacattatcagaaaacaaaataaagcttctatttgtgtccaggcttgttggcgttgccatagagatcatttgaattaccttaaaatgaaaagatcagtgttaatttatcagtgtgcatggagaagacggattgctagagaagaactcagaaagctcaaaatggctgcgagggacacagaagccctgaaggtggagaaggagaaacttgaggagcacgtggaagagctgactagccgtttgagcttcgaaaagaatcttaggattgatctagagaagagcaaggcaagagaaatttgcaaactacaggccactcttcgtgagatggaacagcgggttgaagaagccatagagatgcatgaaagagaattagccaaaaaggctattgaggaagctttagctcaagaaagggaaaagatcaccgtattgactaatgaagtcgatgagttgaaggtattactatcaagagaacgagaagaaaacagtgcaactaagagtgcactcgttgttgttcgtgaagaaaatgatgtgctgaataagaaaattgtggttgcagatgcaagcatggagcagcttagagatactgtaacgagggttgaagaattaatgagacaaattgcaaatgccaagggaaaatccactgagcttcagattgctgtgcaaaggttgcaagaaagtttaattgagggagaagctactttgcttgcagaaagaaaagaaagtgatgcagccaagaaatcactcactgaagctcatgtaaaaaacgaggaactattcaataaaattgaagtagctgagcataacgttagtatcttccaagacgacatccaaagacttgaagaaactgcagctacattggagacttcattgttatctgagaaacaacagagtactgcaatcatttcacaattaactgaagcacaacaggacatccaagtactgcagaagaaatttgcagatgccaataagacaattgagctgcttcaagattctttgaaaaggttgagttttcatgttacgttgattacttgatgataccatactttaacaatggtgtgaggacagcacaaccacaagggatgccttatatgtagcagaaagacaggagcatggtcaaaccaaacaagcactttccaaagctcaggaaagaaatttggaattgcttaggaaagttgatgatagtgagaaaactttaaacaagatgctggagaatgctcagagacttgagaaacatgcaacagcaagggaatccttgcttcttaagacaaagcagaatcttgactgcactacaaaagcgctaactgaagcacgagggagaaaccgagacttattgacaagttttgaggattcagctaaaaaaatcaatatgcttgaggattcacttaacagactagaagaatgcacagcagagaaagactctttgttggcagtagaaagaaaacaaaacaaaacgaccaaagaagaactggccaatgcccagaaaacaatcgatgaattagtacatgagtcacagcagtcccaggaaataagaaatcaattggaagataccatcaagaggtttaaagcagaatcgactgccagagacacaatattattatcagagaaacaggcacatgagacgaccaagaaagttctaactgaaattcagtcgagaaatgaagagttaatcaagaaaattcaggattgtgataaaaatattcttgagcttcagctaactgtggagaggcttcaggaaaacacatctactacagaggctttactgttgagagaacgagaacaaaacaatgcaaccatgaaggcacaagctgaaactcaagaaataaatttgcagttactgaacaagcttgaggacgttgagacaaaaattggtcttcttcaaggaagtgtacaaaggcttggtgataatacagcgaaagacactttgctgctatctgagaaacgtgagaaggatgccctgaaggaagcacttactgagtctgaatacaaaaatgaagagttactgataaaaactgaagaagccaacaaaaaagttgagcatcttcaaaacactataaattcgcttaaggagaacatggcagcttctttggaagctgaaagacaagaaaatgaagcaatcaagaggtcccttgttgaagctcaggagagaaacgatgcattatttaagaaagttagggatagcgaatacagggcccaccagcttcaagatactgtccaaaagcttcaagtagatgccatatctagactgtctagctttgtaatggagagacaagatggtgatggtgtcaagaatgcacatactgaggttcatggaacaaatgaagatctaatgaggagaaatgaaaacctcctaaaaaggaatgatgacttggtgaagaagattgaagattctgctatacttgttactgagcttagagggaacttggaaaggttagaagggaaagctgctaatttagaggctgaaaatcaattgcttcgtcaacaagcaattgcaactcctccatcaacagcaaagtcttctcaagctgcatgctctaaaatcaagatgtcaagaaagtggtcatattttaaatggcaacgtagcatatgctgaaatgaagtcctcaaccggtcaaacagaaatgagaccctcgatggtagtttaaccaaggcagttcccttgatttgattaaccacaaggtttatgaaaatgggcaaagcttgtttaatgatgtatatcagcaccagcaaccccagaatcatcaacagttattgctgaaatatattacccaatatcttggattctctgggagaaaacctattgctgcgtctcttatatactactgtcttcttcattggagatcttttgaagaagcaaagacaactgtctttgacagtattatacaaattgtaaactcagcaactgaggctcaacatgatacgagaagcttggcctactggctgtccaacttatccacattgtcagttctcctgcaacgttcatttaaagccaccagggcaactgcctcaactccacatagacgaagaatttcctgtgaaaggatttttcaagccaatcaaacttcaagcagtggacttgcttgtctcagtgctcaatcagtggatggaggtaccgtgtttcaccaaattgaagcaaggtatccggcttcgctcttcaagcagcagctagtggatcaggttgaaaaggtgtatggagtgataagcgataaaataaaaaaggagctaaacccattacttgagttgtgcatacaggatccaagaacttactcaaatcaagcaaaggccttgatgtctccttctagtggcttgggccaacaggatcaactcatgcattggctgagcatcgtgaaaatcttcaacagctatttgcatgtcctcagagccaatcatgttccctcaattttggtccacaaattgcttacccaaatattttctgtggtcaatgtgcaattgtttaacaggtaagttttgggtcgtcctatcatattttcttcttggaaatgacagttttcacttctgttcctggggcgttctcttccttatttgaaaacaggctcctcttgaggcgtgaatgctgttcctttagcaatgggcaatacatcaaagatgggctaactcaactaagatattggtgcaatgacgtcagtcaagagtttgcagactcagcatgggtagcactgaggcatataagacaagctgttgactttgtggtaatttctctgaagccgataaggacatgggaagagatatgcaatgatatttgcccgtttgcagcagctagagcggatagtcggtatgtattgggatgatttaaagggaacaaatgtaacttcagccgagttcatgtcaagcatgagagctatgctgcgcgaagaatcaaatagcgtctccagcttttcggtcctgctggatgatgattccagcatacccttttcgcttgaagatatttcgaagtcaatgccaaacattgaggagacgtcagttaatgacctgctgcctttcatccgcgagaaccaaagctttgcgtttttattgtagtggagaggacacgaatccttagatttgttgtatgagattgcaggccagtctgtgtggagttactatccgtctgatgggtatgcgttgactttacacgtgctactgtttgattacctagcttacctgcatccacaggaactctcaaaactgacgtatccattcggccaccctcacgggagcctgcaggtatccaatcagaccgtatccgtgtgatggatgactgtgtctgtgtaggtgtgctcgcatgagcctggccctgacagcagatatgtgatttttacctgtatcggcgtatgtaggcaaaaagctaccgcaaatacgtgagttgcatcatgcatgtctaatcgagtgcgtgcagttaacccaacatgctctcggagctagtcaacgcatacaaagagccatgttag

SEQ ID NO: 60087 - DNA, 6947 bp, Zea Mays
gttccatcaccttgcgtcttgcgctcggcagcctcgtctcccccctctttcggcgaatgccacgccgcctcgaatcgcgcgctcatggcccgagcgatcagcctcttaccacctctccacccccaatccatcagcgccaaaaatagataggggatgaggaatcgcctctggtgcctggttcgcaccccattcccctccgcctcccggttcgatgctggtatcgcgcgcctctgcacgcgctcgagtcggaccacacggcgtgcctacttggcggcgaggcaaccggcgaccggcgcaagggagggagccgacgccgctgccgaacctgattcgacctcgccgacgacagccgtcgcgttttggtgatcgcattacgcatggctgccacattaaagattgttgtaggctctcatatatggctggaggataaagatttagtttggattgatggcgaggttttccgaactgaaggtcaaaatgtccatgtccacactaccaatggaaagacggttactgtgagcatatcagacattcatccaaaggacacagaagtgccatctgatggcattgatgacatgacaaggctatcatacttgcatgaacctggtgttctaaataatcttgctgttcgatatgcaaaaaatataatttatacctatactggcaatattctgattgcaattaatccattccaaagtctgccccatctttctgaaccccgtaccatggagaagtacaaaggtgcaaattttggtgagctcgaccctcacgtgtttgcaattgccgatgtttcttacaggaaacaggcagatgatgaatgagggaaagagcaactccattttggtgagcggtgaaagcggtgctggtaaaactgaaaccacaaagatgctaatgagatatcttgcttttttgggcggacggtctaaaacaggggggaggacagttgaacaacaagttttagaatctaatccagtccttgaagcttttggcaatgcaaagactgtccgtaacaacaactcaagtcgatttggaaaatttgttgaaatccaatttgacaagagtgggaagatatcaggtgctgccattagaacatatttgcttgaaagatctcgtgtttgccaaatcaatagtccagagagaaactaccattgcttttactttctatgtgcagcaccgttggaggatatcaaaagttataagcttggtgacccatcatcattccactatctcaaccaatctacgtgcattaaacttgacgaaattagtgatgctaaggagtatcttgcaacacgaagtgcaatgaatacagttggcattactgagcaggaacaggaggctatattccgggtagttgctgctgtgcttcatctcgggaacatcagttttgtgaaagggagagaggcagattcatctgtaataaaggacgagaaagctaggttccatcttaatgcaacagcagagctcttgatgtgcgattgtggaaatctggagaacgcattaataaagaggaaaataaatacaccagaaggagttataaccacaacagttgatcctaattctgctactgttagcagggatggcttagcaaagcaaatatattctcagctatttgactggctcgtaaacagactaaatgcctccataggacacgatacatcctctgaccgattgattggagtacttgatatctatggtttcgaaagttttaagactaatagctttgaacaattatgcatcaatttcaccaatgaaaaacttcaacagcattttaatcagaatgtcttcaaaatggagcaggaagagtataacagggagcagattgactggagctacatagaatttgttgacaaccaagatgttctagacttgattgagaagaagcctggtggaattattgcacttcttgatgaagcttgtatgtttcctaagtgcacacacgaatcattttctcagaagttgtatgagaaattcaggaataacaaaagattttgcaaaccaaagctttctcgcactgcatttaccatacagcattatgcaggagaagtaacttaccaatctgatcagttcctggacaaaaacagagactatgtagttgtagaacatcaagaattactgaatgcttccaagtgctcttttgtgtcagggttattcccatcagtactagagaacacaaaagcatcgaagtcctccattgctactcgcttcaagtggcaactccaagaactaatggagactttgagttctacagaaccacattacatcagatgtattaagcccaataatcatcttaagcctgctacttttgagaacatcaatgttctgcagcaacttcggtgttcaggtgttcttgaagctattagaatcagctgtgctggatatcctacaagaaaaatatttcatgattttctctgtcgattttgcattcttgctcctgaagttttcacagaaagaaacaatgaaaagttaatatgccaaaagattttggacaatattggactccatggttatcagattggaagaacaaaggtgtttctgagagctggtcagatggctgaattagatgctagaagaactgaagtgcggaataaagcagctataaccgttcagagtagatttcgcactcatgttgctcgtgagcaattccttgcattacgcatgacatcaatatcttttcaatcttttgttagagtgatattggcctgtaagttacatgttttcctcagaaaacaagctgcagtactgcatatacagaaaagttaccgctgctattttgcttggaagacttactcggagctatgttcttcagccattacattgcagacaggtttaagggcctttggtgcttataacgagtacattatcagaaaacaaaataaagcttctatttgtgtccaggcttgttggcgttgccatagagatcatttgaattaccttaaaatgaaaagatcagtgttaatttatcagtgtgcatggagaagacggattgctagagaagaactcagaaagctcaaaatggctgcgagggacacagaagccctgaaggtggagaaggagaaacttgaggagcacgtggaagagctgactagccgtttgagcttcgaaaagaatcttaggattgatctagagaagagcaaggcaagagaaatttgcaaactacaggccactcttcgtgagatggaacagcgggttgaagaagccatagagatgcatgaaagagaattagccaaaaaggctattgaggaagctttagctcaagaaagggaaaagatcaccgtattgactaatgaagtcgatgagttgaaggtattactatcaagagaacgagaagaaaacagtgcaactaagagtgcactcgttgttgttcgtgaagaaaatgatgtgctgaataagaaaattgtggttgcagatgcaagcatggagcagcttagagatactgtaacgaggttgcaagaaagtttaattgagggagaagctactttgcttgcagaaagaaaagaaagtgatgcagccaagaaatcactcactgaagctcatgtaaaaaacgaggaactattcaataaaattgaagtagctgagcataacgttagtatcttccaagacgacatccaaagacttgaagaaactgcagctacattggagacttcattgttatctgagaaacaacagagtactgcaatcatttcacaattaactgaagcacaacaggacatccaagtactgcagaagaaatttgcagatgccaataagacaattgagctgcttcaagattctttgaaaaggtgtgaggacagcacaaccacaagggatgccttatatgtagcagaaagacaggagcatggtcaaaccaaacaagcactttccaaagctcaggaaagaaatttggaattgcttaggaaagttgatgatagtgagaaaactttaaacaagatgctggagaatgctcagagacttgagaaacatgcaacagcaagggaatccttgcttcttaagacaaagcagaatcttgactgcactacaaaagcgctaactgaagcacgagggagaaaccgagacttattgacaagttttgaggattcagctaaaaaaatcaatatgcttgaggattcacttaacagactagaagaatgcacagcagagaaagactctttgttggcagtagaaagaaaacaaaacaaaacgaccaaagaagaactggccaatgcccagaaaacaatcgatgaattagtacatgagtcacagcagtcccaggaaataagaaatcaattggaagataccatcaagaggtttaaagcagaatcgactgccagagacacaatattattatcagagaaacaggcacatgagacgaccaagaaagttctaactgaaattcagtcgagaaatgaagagttaatcaagaaaattcaggattgtgataaaaatattcttgagcttcagctaactgtggagaggcttcaggaaaacacatctactacagaggctttactgttgagagaacgagaacaaaacaatgcaaccatgaaggcacaagctgaaactcaagaaataaatttgcagttactgaacaagcttgaggacgttgagacaaaaattggtcttcttcaaggaagtgtacaaaggcttggtgataatacagcgaaagacactttgctgctatctgagaaacgtgagaaggatgccctgaaggaagcacttactgagtctgaatacaaaaatgaagagttactgataaaaactgaagaagccaacaaaaaagcttaaggagaacatggcagcttctttggaagctgaaagacaagaaaatgaagcaatcaagaggtcccttgttgaagctcaggagagaaacgatgcattatttaagaaagttagggatagcgaatacagggcccaccagcttcaagatactgtccaaaagcttcaagtagatgccatatctagactgtctagctttgtaatggagagacaagatggtgatggtgtcaagaatgcacatactgaggttcatggaacaaatgaagatctaatgaggagaaatgaaaacctcctaaaaaggaatgatgacttggtgaagaagattgaagattctgctatacttgttactgagcttagagggaacttggaaaggttagaagggaaagctgctaatttagaggctgaaaatcaattgcttcgtcaacaagcaattgcaactcctccatcaacagcaaagtcttctcaagctgcatgctctaaaatcagtatgatccatagatgtcaagaaagtggtcatattttaaatggcaacgtagcatatgctgaaatgaagtcctcaaccggtcaaacagaaatgagaccctcgatgggcagttcccttgatttgattaaccacaaggtttatgaaaatgggcaaagcttgtttaatgatgtatatcagcaccagcaaccccagaatcatcaacagttattgctgaaatatattacccaatatcttggattctctgggagaaaacctattgctgcgtctcttatatactactgtcttcttcattggagatcttttgaagaagcaaagacaactgtctttgacagtattatacaaattgtaaactcagcaactgaggctcaacatgatacgagaagcttggcctactggctgtccaacttatccacattgtcagttctcctgcaacgttcatttaaagccaccagggcaactgcctcaactccacatagacgaagaatttcctgtgaaaggatttttcaagccaatcaaacttcaagcagtggacttgcttgtctcagtgctcaatcagtggatggaggtaccgtgtttcaccaaattgaagcaaggtatccggcttcgctcttcaagcagcagctagtggatcaggttgaaaaggtgtatggagtgataagcgataaaataaaaaaggagctaaacccattacttgagttgtgcatacaggatccaagaacttactcaaatcaagcaaaggccttgatgtctccttctagtggcttgggccaacaggatcaactcatgcattggctgagcatcgtgaaaatcttcaacagctatttgcatgtcctcagagccaatcatgttccctcaattttggtccacaaattgcttacccaaatattttctgtggtcaatgtgcaattgtttaacaggctcctcttgaggcgtgaatgctgttcctttagcaatgggcaatacatcaaagatgggctaactcaactaagatattggtgcaatgacgtcagtcaagagtttgcagactcagcatgggtagcactgaggcatataagacaagctgttgactttgtggtaatttctctgaagccgataaggacatgggaagagatatgcaatgatatttgcccggctctcagtttgcagcagctagagcggatagtcggtatgtattgggatgatttaaagggaacaaatgtaacttcagccgagttcatgtcaagcatgagagctatgctgcgcgaagaatcaaatagcgtctccagcttttcggtcctgctggatgatgattccagcatacccttttcgcttgaagatatttcgaagtcaatgccaaacattgaggagacgtcagttaatgacctgctgcctttcatccgcgagaaccaaagctttgcgtttttattgtagtggagaggacacgaatccttagatttgttgtatgagattgcaggccagtctgtgtggagttactatccgtctgatgggtatccaatcagaccgtatccgtgtgatggatgactgtgtctgtgtaggtgtgctcgcatgagcctggccctgacagcagatatgtgatttttacctgtatcggcgtatgtaggcaaaaagctaccgcaaatacgtgagttgcatcatgcatgtctaatcgagtgcgtgcagttaacccaacatgctctcggagctagtcaacgcatacaaagagccatgttag

SEQ ID NO: 60088 - DNA, 6993 bp, Zea Mays
gttccatcaccttgcgtcttgcgctcggcagcctcgtctcccccctctttcggcgaatgccacgccgcctcgaatcgcgcgctcatggcccgagcgatcagcctcttaccacctctccacccccaatccatcagcgccaaaaatagataggggatgaggaatcgcctctggtgcctggttcgcaccccattcccctccgcctcccggttcgatgctggtatcgcgcgcctctgcacgcgctcgagtcggaccacacggcgtgcctacttggcggcgaggcaaccggcgaccggcgcaagggagggagccgacgccgctgccgaacctgattcgacctcgccgacgacagccgtcgcgttttggtgatcgcattacgcatggctgccacattaaagattgttgtaggctctcatatatggctggaggataaagatttagtttggattgatggcgaggttttccgaactgaaggtcaaaatgtccatgtccacactaccaatggaaagacggttactgtgagcatatcagacattcatccaaaggacacagaagtgccatctgatggcattgatgacatgacaaggctatcatacttgcatgaacctggtgttctaaataatcttgctgttcgatatgcaaaaaatataatttatacctatactggcaatattctgattgcaattaatccattccaaagtctgccccatctttctgaaccccgtaccatggagaagtacaaaggtgcaaattttggtgagctcgaccctcacgtgtttgcaattgccgatgtttcttacaggcagatgatgaatgagggaaagagcaactccattttggtgagcggtgaaagcggtgctggtaaaactgaaaccacaaagatgctaatgagatatcttgcttttttgggcggacggtctaaaacaggggggaggacagttgaacaacaagttttagaatctaatccagtccttgaagcttttggcaatgcaaagactgtccgtaacaacaactcaagtcgatttggaaaatttgttgaaatccaatttgacaagagtgggaagatatcaggtgctgccattagaacatatttgcttgaaagatctcgtgtttgccaaatcaatagtccagagagaaactaccattgcttttactttctatgtgcagcaccgttggaggatatcaaaagttataagcttggtgacccatcatcattccactatctcaaccaatctacgtgcattaaacttgacgaaattagtgatgctaaggagtatcttgcaacacgaagtgcaatgaatacagttggcattactgagcaggaacagttgctgctgtgcttcatctcgggaacatcagttttgtgaaagggagagaggcagattcatctgtaataaaggacgagaaagctaggttccatcttaatgcaacagcagagctcttgatgtgcgattgtggaaatctggagaacgcattaataaagaggaaaataaatacaccagaaggagttataaccacaacagttgatcctaattctgctactgttagcagggatggcttagcaaagcaaatatattctcagctatttgactggctcgtaaacagactaaatgcctccataggacacgatacatcctctgaccgattgattggagtacttgatatctatggtttcgaaagttttaagactaatagctttgaacaattatgcatcaatttcaccaatgaaaaacttcaacagcattttaatcaggaagagtataacagggagcagattgactggagctacatagaatttgttgacaaccaagatgttctagacttgattgagaagaagcctggtggaattattgcacttcttgatgaagcttgtatgtttcctaagtgcacacacgaatcattttctcagaagttgtatgagaaattcaggaataacaaaagattttgcaaaccaaagctttctcgcactgcatttaccatacagcattatgcaggagaagtaacttaccaatctgatcagttcctggacaaaaacagagactatgtagttgtagaacatcaagaattactgaatgcttccaagtgctcttttgtgtcagggttattcccatcagtactagagaacacaaaagcatcgaagtcctccattgctactcgcttcaagattggaagaacaaaggtgtttctgagagctggtcagatggctgaattagatgctagaagaactgaagtgcggaataaagcagctataaccgttcagagtagatttcgcactcatgttgctcgtgagcaattccttgcattacgcatgacatcaatatcttttcaatcttttgttagaggtaaggtgttgctagttggtatcgcaagtggaaacaatgctcatgtcaggtggaattatatactgagagtaccattatatattgcagtgatattggcctccattacattgcagacaggtttaagggcctttggtgcttataacgagtacattatcagaaaacaaaataaagcttctatttgtgtccaggcttgttggcgttgccatagagatcatttgaattaccttaaaatgaaaagatcagtgttaatttatcagtgtgcatggagaagacggattgctagagaagaactcagaaagctcaaaatggctgcgagggacacagaagccctgaaggtggagaaggagaaacttgaggagcacgtggaagagctgactagccgtttgagcttcgaaaagaatcttaggattgatctagagaagagcaaggcaagagaaatttgcaaactacaggccactcttcgtgagatggaacagcgggttgaagaagccatagagatgcatgaaagagaattagccaaaaaggctattgaggaagctttagctcaagaaagggaaaagatcaccgtattgactaatgaagtcgatgagttgaaggtattactatcaagagaacgagaagaaaacagtgcaactaagagtgcactcgttgttgttcgtgaagaaaatgatgtgctgaataagaaaattgtggttgcagatgcaagcatggagcagcttagagatactgtaacgagggttgaagaattaatgagacaaattgcaaatgccaagggaaaatccactgagcttcagattgctgtgcaaaggttgcaagaaagtttaattgagggagaagctactttgcttgcagaaagaaaagaaagtgatgcagccaagaaatcactcactgaagctcatgtaaaaaacgaggaactattcaataaaattgaagtagctgagcataacgttagtatcttccaagacgacatccaaagacttgaagaaactgcagctacattggagacttcattgttatctgagaaacaacagagtactgcaatcatttcacaattaactgaagcacaacaggacatccaagtactgcagaagaaatttgcagatgccaataagacaattgagctgcttcaagattctttgaaaaggtgtgaggacagcacaaccacaagggatgccttatatgtagcagaaagacaggagcatggtcaaaccaaacaagcactttccaaagctcaggaaagaaatttggaattgcttaggaaagttgatgatagtgagaaaactttaaacaagatgctggagaatgctcagagacttgagaaacatgcaacagcaagggaatccttgcttcttaagacaaagcagaatcttgactgcactacaaaagcgctaactgaagcacgagggagaaaccgagacttattgacaagttttgaggattcagctaaaaaaatcaatatgcttgaggattcacttaacagactagaagaatgcacagcagagaaagactctttgttggcagtagaaagaaaacaaaacaaaacgaccaaagaagaactggccaatgcccagaaaacaatcgatgaattagtacatgagtcacagcagtcccaggaaataagaaatcaattggaagataccatcaagaggtttaaagcagaatcgactgccagagacacaatattattatcagagaaacaggcacatgagacgaccaagaaagttctaactgaaattcagtcgagaaatgaagagttaatcaagaaaattcaggattgtgataaaaatattcttgagcttcagctaactgtggagaggcttcaggaaaacacatctactacagaggctttactgttgagagaacgagaacaaaacaatgcaaccatgaaggcacaagctgaaactcaagaaataaatttgcagttactgaacaagcttgaggacgttgagacaaaaattggtcttcttcaaggaagtgtacaaaggcttggtgataatacagcgaaagacactttgctgctatctgagaaacgtgagaaggatgccctgaaggaagcacttactgagtctgaatacaaaaatgaagagttactgataaaaactgaagaagccaacaaaaaagttgagcatcttcaaaacactataaattcgcttaaggagaacatggcagcttctttggaagctgaaagacaagaaaatgaagcaatcaagaggtcccttgttgaagctcaggagagaaacgatgcattatttaagaaagttagggatagcgaatacagggcccaccagcttcaagatactgtccaaaagcttcaagtagatgccatatctagactgtctagctttgtaatggagagacaagatggtgatggtgtcaagaatgcacatactgaggttcatggaacaaatgaagatctaatgaggagaaatgaaaacctcctaaaaaggaatgatgacttggtgaagaagattgaagattctgctatacttgttactgagcttagagggaacttggaaaggttagaagggaaagctgctaatttagaggctgaaaatcaattgcttcgtcaacaagcaattgcaactcctccatcaacagcaaagtcttctcaagctgcatgctctaaaatcaagatgtcaagaaagtggtcatattttaaatggcaacgtagcatatgctgaaatgaagtcctcaaccggtcaaacagaaatgagaccctcgatggtagtttaaccaaggcagttcccttgatttgattaaccacaaggtttatgaaaatgggcaaagcttgtttaatgatgtatatcagcaccagcaaccccagaatcatcaacagttattgctgaaatatattacccaatatcttggattctctgggagaaaacctattgctgcgtctcttatatactactgtcttcttcattggagatcttttgaagaagcaaagacaactgtctttgacagtattatacaaattgtaaactcagcaactgaggctcaacatgatacgagaagcttggcctactggctgtccaacttatccacattgtcagttctcctgcaacgttcatttaaagccaccagggcaactgcctcaactccacatagacgaagaatttcctgtgaaaggatttttcaagccaatcaaacttcaagcagtggacttgcttgtctcagtgctcaatcagtggatggaggtaccgtgtttcaccaaattgaagcaaggtatccggcttcgctcttcaagcagcagctagtggatcaggttgaaaaggtgtatggagtgataagcgataaaataaaaaaggagctaaacccattacttgagttgtgcatacaggatccaagaacttactcaaatcaagcaaaggccttgatgtctccttctagtggcttgggccaacaggatcaactcatgcattggctgagcatcgtgaaaatcttcaacagctatttgcatgtcctcagagccaatcatgttccctcaattttggtccacaaattgcttacccaaatattttctgtggtcaatgtgcaattgtttaacaggtaagttttgggtcgtcctatcatattttcttcttggaaatgacagttttcacttctgttcctggggcgttctcttccttatttgaaaacaggctcctcttgaggcgtgaatgctgttcctttagcaatgggcaatacatcaaagatgggctaactcaactaagatattggtgcaatgacgtcagtcaagagtttgcagactcagcatgggtagcactgaggcatataagacaagctgttgactttgtggtttgaatcattttcccttaagaaacaaacttttgtggctcttgtacacaaactgaactatacgaaactttgatagtttttttctcaaatatacctcttccattcatcaggtaatttctctgaagccgataaggacatgggaagagatatgcaatgatatttgcccggctctcagtttgcagcagctagagcggatagtcggtatgtattgggatgatttaaagggaacaaatgtaacttcagccgagttcatgtcaagcatgagagctatgctgcgcgaagaatcaaatagcgtctccagcttttcggtcctgctggatgatgattccagcatacccttttcgcttgaagatatttcgaagtcaatgccaaacattgaggagacgtcagttaatgacctgctgcctttcatccgcgagaaccaaagctttgcgtttttattgtagtggagaggacacgaatccttagatttgttgtatgagattgcaggccagtctgtgtggagttactatccgtctgatgggtatgcgttgactttacacgtgctactgtttgattacctagcttacctgcatccacaggaactctcaaaactgacgtatccattcggccaccctcacgggagcctgcaggtatccaatcagaccgtatccgtgtgatggatgactgtgtctgtgtaggtgtgctcgcatgagcctggccctgacagcagatatgtgatttttacctgtatcggcgtatgtaggcaaaaagctaccgcaaatacgtgagttgcatcatgcatgtctaatcgagtgcgtgcagttaacccaacatgctctcggagctagtcaacgcatacaaagagccatgttag

SEQ ID NO: 60089 - DNA, 4371 bp, Zea Mays
cgtattgttcacctatttatagattggaagaacaaaggtgtttctgagagctggtcagatggctgaattagatgctagaagaactgaagtgcggaataaagcagctataaccgttcagagtagatttcgcactcatgttgctcgtgagcaattccttgcattacgcatgacatcaatatcttttcaatcttttgttagagtgatattggcctccattacattgcagacaggtttaagggcctttggtgcttataacgagtacattatcagaaaacaaaataaagcttctatttgtgtccaggcttgttggcgttgccatagagatcatttgaattaccttaaaatgaaaagatcagtgttaatttatcagtgtgcatggagaagacggattgctagagaagaactcagaaagctcaaaatggctgcgagggacacagaagccctgaaggtggagaaggagaaacttgaggagcacgtggaagagctgactagccgtttgagcttcgaaaagaatcttaggattgatctagagaagagcaaggcaagagaaatttgcaaactacaggccactcttcgtgagatggaacagcgggttgaagaagccatagagatgcatgaaagagaattagccaaaaaggctattgaggaagctttagctcaagaaagggaaaagatcaccgtattgactaatgaagtcgatgagttgaaggtattactatcaagagaacgagaagaaaacagtgcaactaagagtgcactcgttgttgttcgtgaagaaaatgatgtgctgaataagaaaattgtggttgcagatgcaagcatggagcagcttagagatactgtaacgaggttgcaagaaagtttaattgagggagaagctactttgcttgcagaaagaaaagaaagtgatgcagccaagaaatcactcactgaagctcatgtaaaaaacgaggaactattcaataaaattgaagtagctgagcataacgttagtatcttccaagacgacatccaaagacttgaagaaactgcagctacattggagacttcattgttatctgagaaacaacagagtactgcaatcatttcacaattaactgaagcacaacaggacatccaagtactgcagaagaaatttgcagatgccaataagacaattgagctgcttcaagattctttgaaaaggtgtgaggacagcacaaccacaagggatgccttatatgtagcagaaagacaggagcatggtcaaaccaaacaagcactttccaaagctcaggaaagaaatttggaattgcttaggaaagttgatgatagtgagaaaactttaaacaagatgctggagaatgctcagagacttgagaaacatgcaacagcaagggaatccttgcttcttaagacaaagcagaatcttgactgcactacaaaagcgctaactgaagcacgagggagaaaccgagacttattgacaagttttgaggattcagctaaaaaaatcaatatgcttgaggattcacttaacagactagaagaatgcacagcagagaaagactctttgttggcagtagaaagaaaacaaaacaaaacgaccaaagaagaactggccaatgcccagaaaacaatcgatgaattagtacatgagtcacagcagtcccaggaaataagaaatcaattggaagataccatcaagaggtttaaagcagaatcgactgccagagacacaatattattatcagagaaacaggcacatgagacgaccaagaaagttctaactgaaattcagtcgagaaatgaagagttaatcaagaaaattcaggattgtgataaaaatattcttgagcttcagctaactgtggagaggcttcaggaaaacacatctactacagaggctttactgttgagagaacgagaacaaaacaatgcaaccatgaaggcacaagctgaaactcaagaaataaatttgcagttactgaacaagcttgaggacgttgagacaaaaattggtcttcttcaaggaagtgtacaaaggcttggtgataatacagcgaaagacactttgctgctatctgagaaacgtgagaaggatgccctgaaggaagcacttactgagtctgaatacaaaaatgaagagttactgataaaaactgaagaagccaacaaaaaagttgagcatcttcaaaacactataaattcgcttaaggagaacatggcagcttctttggaagctgaaagacaagaaaatgaagcaatcaagaggtcccttgttgaagctcaggagagaaacgatgcattatttaagaaagttagggatagcgaatacagggcccaccagcttcaagatactgtccaaaagcttcaagtagatgccatatctagactgtctagctttgtaatggagagacaagatggtgatggtgtcaagaatgcacatactgaggttcatggaacaaatgaagatctaatgaggagaaatgaaaacctcctaaaaaggaatgatgacttggtgaagaagattgaagattctgctatacttgttactgagcttagagggaacttggaaaggttagaagggaaagctgctaatttagaggctgaaaatcaattgcttcgtcaacaagcaattgcaactcctccatcaacagcaaagtcttctcaagctgcatgctctaaaatcaagatgtcaagaaagtggtcatattttaaatggcaacgtagcatatgctgaaatgaagtcctcaaccggtcaaacagaaatgagaccctcgatgggcagttcccttgatttgattaaccacaaggtttatgaaaatgggcaaagcttgtttaatgatgtatatcagcaccagcaaccccagaatcatcaacagttattgctgaaatatattacccaatatcttggattctctgggagaaaacctattgctgcgtctcttatatactactgtcttcttcattggagatcttttgaagaagcaaagacaactgtctttgacagtattatacaaattgtaaactcagcaactgaggctcaacatgatacgagaagcttggcctactggctgtccaacttatccacattgtcagttctcctgcaacgttcatttaaagccaccagggcaactgcctcaactccacatagacgaagaatttcctgtgaaaggatttttcaagccaatcaaacttcaagcagtggacttgcttgtctcagtgctcaatcagtggatggaggtaccgtgtttcaccaaattgaagcaaggtatccggcttcgctcttcaagcagcagctagtggatcaggttgaaaaggtgtatggagtgataagcgataaaataaaaaaggagctaaacccattacttgagttgtgcatacaggatccaagaacttactcaaatcaagcaaaggccttgatgtctccttctagtggcttgggccaacaggatcaactcatgcattggctgagcatcgtgaaaatcttcaacagctatttgcatgtcctcagagccaatcatgttccctcaattttggtccacaaattgcttacccaaatattttctgtggtcaatgtgcaattgtttaacaggctcctcttgaggcgtgaatgctgttcctttagcaatgggcaatacatcaaagatgggctaactcaactaagatattggtgcaatgacgtcagtcaagagtttgcagactcagcatgggtagcactgaggcatataagacaagctgttgactttgtggtaatttctctgaagccgataaggacatgggaagagatatgcaatgatatttgcccggctctcagtttgcagcagctagagcggatagtcggtatgtattgggatgatttaaagggaacaaatgtaacttcagccgagttcatgtcaagcatgagagctatgctgcgcgaagaatcaaatagcgtctccagcttttcggtcctgctggatgatgattccagcatacccttttcgcttgaagatatttcgaagtcaatgccaaacattgaggagacgtcagttaatgacctgctgcctttcatccgcgagaaccaaagctttgcgtttttattgtagtggagaggacacgaatccttagatttgttgtatgagattgcaggccagtctgtgtggagttactatccgtctgatgggtatccaatcagaccgtatccgtgtgatggatgactgtgtctgtgtaggtgtgctcgcatgagcctggccctgacagcagatatgtgatttttacctgtatcggcgtatgtaggcaaaaagctaccgcaaatacgtgagttgcatcatgcatgtctaatcgagtgcgtgcagttaacccaacatgctctcggagctagtcaacgcatacaaagagccatgttag

SEQ ID NO: 60090 - DNA, 897 bp, Zea Mays
gttcagtgtcatttacattgtcttgttggaggcaatctaacgtcgagcatctcgcgtgcgtcgtgcccgggcatcgccgccacggccgtgtccgtcgtcgtaacggacagccgttccccgtgcataggaatccacatcgtgctgcacccccgcagggcgtagcggagctcggtgtggcttgccaaaatggagaagtgactgctgggcccccatttggacagggagcaaagtggagaattcacgatctgtccctgatattttattttttctttggtacccaacagcaaatccagctatcaaaggtacacaattgagcagtgtccagtagccaataccacgtttatagagtagtgtcctagagcagatttacccattctataccagcaccgacgtagaaaagcaagaggaaggacagaacactgcactgtactgctatgtaacagtatgtacaccacgtccacgtgcaaccctttttcactgttctggaccgcacgtgaaatccggatccgtggtaaaatcgatagtgagctcatgatttggagcatgcagttcaaagattacctgaagaaaacaaagataatgttgcgtatgttagtttcctcctccacctacccaacacctaacgacaagtaatcttctggaaaatagatctgctaaggcgttaacacatatgttcctaaagttcgctgagcgtttcttttcctccttttgttttgacatgatgggtcagaacaggaaaagtaagtattcaggtccaggtacgctacagttttgtcaaagaaaacttcctctgcatggaaagctggatcaatgctatttcttcacaatttggagttttggacccaaaaaaatgtacagcaaaagctgaaaagtatcataaccagacagcatattaac

SEQ ID NO: 60091 - DNA, 918 bp, Zea Mays
cttttttaatgttagcaggaagtggatggagaggagtcccagtacactcatgtattactcttcttagcgctgcttgataattgtaatgataaatcaaaatatagaaataaaacactgcttaaaaaacaagttataggcatataaagttctttttgggaatttgccagagattcaaatgaagtcattcctgcatccactaatgactaatctacattggcacacactatgcacaggttaggatctaccactaaaaatccattgactattccatttttatcagatgctaaattttgcaggccgagacacagtgagcaaaaaaagatattttttgttccaagttagtgaatatctaaattggatgcatcatagaactggttttctttacttgtggtcaaggtcgtgtttgttgtataaaaaagacatgtatgtttgcaaagaaaccaagtgtgttgtgctcccccgttcttatttatttgtcgcggtttagtgtaaaaatgaactagcggacgacaaatatttaagaacggaagtagtaacgtgtaacggttcttgtccattttttctttttaatataaagatacagaagtctcttgcatgttcgagaaaaaaagattaggagtcagggagtttttttcttttctgatttaggcttttttttacttgtgatgtactgcaaaggtttcttgtctcagagttgagatggggaggttgtgtgaaggggatcattatttcttctctccataatataaaggcacgctgttagtgtatatggattaggcccatgaggcccatgtatgaatattgtatagccaccctctagggttggtccagtaatgtattctctctccaacaggtttctccctcccctccagccgcagccgccgccgccgccgtcccctgccgcgcgcgccaggactg

SEQ ID NO: 60092 - DNA, 878 bp, Zea Mays
ctcacttgttcttgtgatcaaaactccattgtaatcaaggcaagaggcaccaattgtgtggtggcccttgcgggggaagttttgttcccgactttgatttgagaagtgaagctcactcggtccgagggaccgtttgagagagggaagggttgaaagagacccagcctttgtggcctcctcaacggggagtaggtttgcgagaaccgaacctcggtaaaacaaattcgcgtgtcacactcttcatttgcttgcgatttgtttttcaccctctctcgcggactcgtttatatttctaacgctaacccggcttgtagttgtgtttacatttgtaaatttcaatttcgccctatttacccccccccccctctaggcgactatcaagttgtgactgcgggggggtgttagactacccgtctagggtttggggtgttccccctgtaattaccatctcaccctctctgtattgggcctggcccatttactgcgtctattaatatcactcctagccctgtttagggtttaggttcgcattccaacgcatcaaaatgcttttatttactatttgagaaaactaacatttcaatattgtcaaatttctggttgtctttctcttttttcttcttgttttcctctctttttctcacccctctttttgtatagccgatgttcttggtcttctttagacctttctctctacttaatataatgatgcgcagttctcctgcgtgttcgagaagagaaagaaaaatattgccaaatttcttatattaaatgtcaagcatgtgaatcgtagcattccagccaaattcttatatcatccccactatcgaccccacacattggcacaatggtataaattacacttgtgtagtaaatac

SEQ ID NO: 60093 - DNA, 1974 bp, Zea Mays
gcgccggcccacacttcaacggatccactcggcaccggaccatttgctattgggcttccttgttcgccggcccatcacttcatcagttcctgctctcctgtcgtcccccaattccaggtcgcctacaggaatactgacacgctgtcgcccccgtcgtgcgacgccgccggctgggcatcgccccggaactcctcctgaaggcccctcatcacgctcttgcaggttctggacggacgtgggaggccccgcggcgcccgtacgtatatctagcggcgagacggcaagctcccgccccatctccgccgcctccgctccccgtcgtccggctgcgctgttgctgctcatacggatcaagctcggctacacccgtttctgcgagcagatcagaggacgccatcgtcgggtcggtagggatgggacatgttcactccgatcaaaaggcgaagaaattggcgagtgagtctttctctctctctcctatcccgcgcctctgcttcgtcctcagccagccttggaagagtggccaagggtggggatcagcgactcgaagcacttgaagacgagatcaatggagcagaagggccgaaacgctaactgggatcgctggaacccaagagggggcggcaaccttctcctgtttgggggagaaatcgcaatctaagctggcgcctaaggactccacatgcttcgtcggaagcaaaagtggaccagctgggatcttcttctggagacggtagcactccagttatttgcgaacaaagagttataattccaaacgggcatggggagaagcttgttggtttattacatcgaacaagttcaaagaatcttgtgatcctttgtcatggattccaagccacaaaggatgacagcatcttggttgaccttgctgatgccatcacaaaggaaggaattagtgcttttcggtttgatttttctggaaatggggaaagtgatggtgaattccagtatggaagctacagaaaagaggcagctgatttgcgctctgtagtattacatttctcagaacagaaatatgacataattgctcttatcgggcatagcaaaggaggaaatgctgttcttctttatgcttccaagtaccatgatgtccctgccattgtgaacatttctggccgctttgcattagagcgaggtatggagggacgccttgggaagaatttcatgaggagaataaacgaagatggatacattgatgtgaagaataaaaaaggtctagcctttctttacttgattaataatacgtcatttttttcatgttaatcttattatgagtctgattcaatggactatcccttagttttctaatcaattagcacagggtcatcaaacaaatgcatgcgtctgatctggtgtcaatcttgaaactgtcaaaaactaaactataggctcggtgtttctgctcactctttccaagccaggacacatggcaatgcgattgtaaagaggatcatgcatcgcgttgttttggtggttgtgcaggggagttgcagtaccgggtgtcgaaagcgagtctggatgaccggctgagcactgataccctattctccagccgtgccataagcgaaggctgcagacgagatcgtcccggcggaggacgcccggcagttcgcggcgaacatccgcaaccacgagctgcgcatcgtcgcagatgccaaccaccgttacaccgggcacagggaggagctggcctcgctggtgctgggcttcctcagctcccatccctaccagatcacgtcgcgcttgcgtccgagactctagatagagtagagcacacccacttgaccgtttgcgaacaaaaaaaaatcccctgtaccaatctaagagttgtgggtgtggtgatgtgtttatccagaaccagaacacgagcacctgccgtccaaatcagcgtgactcgctctcgctctagaatttcaaaaaaagtcagtgccaggcatctaacagcaatctcct

SEQ ID NO: 60094 - DNA, 1881 bp, Zea Mays
gcgccggcccacacttcaacggatccactcggcaccggaccatttgctattgggcttccttgttcgccggcccatcacttcatcagttcctgctctcctgtcgtcccccaattccaggtcgcctacaggaatactgacacgctgtcgcccccgtcgtgcgacgccgccggctgggcatcgccccggaactcctcctgaaggcccctcatcacgctcttgcaggttctggacggacgtgggaggccccgcggcgcccgtacgtatatctagcggcgagacggcaagctcccgccccatctccgccgcctccgctccccgtcgtccggctgcgctgttgctgctcatacggatcaagctcggctacacccgtttctgcgagcagatcagaggacgccatcgtcgggtcggtagggatgggacatgttcactccgatcaaaaggcgaagaaattggcgagtgagtctttctctctctctcctatcccgcgcctctgcttcgtcctcagccagccttggaagagtggccaagggtggggatcagcgactcgaagcacttgaagacgagatcaatggagcagaagggccgaaacgctaactgggatcgctggaacccaagagggggcggcaaccttctcctgtttgggggagaaatcgcaatctaagctggcgcctaaggactccacatgcttcgtcggaagcaaaagtggaccagctgggatcttcttctggagacggtagcactccaggatgacagcatcttggttgaccttgctgatgccatcacaaaggaaggaattagtgcttttcggtttgatttttctggaaatggggaaagtgatggtgaattccagtatggaagctacagaaaagaggcagctgatttgcgctctgtagtattacatttctcagaacagaaatatgacataattgctcttatcgggcatagcaaaggaggaaatgctgttcttctttatgcttccaagtaccatgatgtccctgccattgtgaacatttctggccgctttgcattagagcgaggtatggagggacgccttgggaagaatttcatgaggagaataaacgaagatggatacattgatgtgaagaataaaaaaggtctagcctttctttacttgattaataatacgtcatttttttcatgttaatcttattatgagtctgattcaatggactatcccttagttttctaatcaattagcacagggtcatcaaacaaatgcatgcgtctgatctggtgtcaatcttgaaactgtcaaaaactaaactataggctcggtgtttctgctcactctttccaagccaggacacatggcaatgcgattgtaaagaggatcatgcatcgcgttgttttggtggttgtgcaggggagttgcagtaccgggtgtcgaaagcgagtctggatgaccggctgagcactgataccctattctccagccgtgccataagcgaaggctgcagggttctcacgatccacggcgccaaagacgagatcgtcccggcggaggacgcccggcagttcgcggcgaacatccgcaaccacgagctgcgcatcgtcgcagatgccaaccaccgttacaccgggcacagggaggagctggcctcgctggtgctgggcttcctcagctcccatccctaccagatcacgtcgcgcttgcgtccgagactctagatagagtagagcacacccacttgaccgtttgcgaacaaaaaaaaatcccctgtaccaatctaagagttgtgggtgtggtgatgtgtttatccagaaccagaacacgagcacctgccgtccaaatcagcgtgactcgctctcgctctagaatttcaaaaaaagtcagtgccaggcatctaacagcaatctcct

SEQ ID NO: 60095 - DNA, 1711 bp, Zea Mays
gcgccggcccacacttcaacggatccactcggcaccggaccatttgctattgggcttccttgttcgccggcccatcacttcatcagttcctgctctcctgtcgtcccccaattccaggtcgcctacaggaatactgacacgctgtcgcccccgtcgtgcgacgccgccggctgggcatcgccccggaactcctcctgaaggcccctcatcacgctcttgcaggttctggacggacgtgggaggccccgcggcgcccgtacgtatatctagcggcgagacggcaagctcccgccccatctccgccgcctccgctccccgtcgtccggctgcgctgttgctgctcatacggatcaagctcggctacacccgtttctgcgagcagatcagaggacgccatcgtcgggtcggtagggatgggacatgttcactccgatcaaaaggcgaagaaattggcgattatttgcgaacaaagagttataattccaaacgggcatggggagaagcttgttggtttattacatcgaacaagttcaaagaatcttgtgatcctttgtcatggattccaagccacaaaggatgacagcatcttggttgaccttgctgatgccatcacaaaggaaggaattagtgcttttcggtttgatttttctggaaatggggaaagtgatggtgaattccagtatggaagctacagaaaagaggcagctgatttgcgctctgtagtattacatttctcagaacagaaatatgacataattgctcttatcgggcatagcaaaggaggaaatgctgttcttctttatgcttccaagtaccatgatgtccctgccattgtgaacatttctggccgctttgcattagagcgaggtatggagggacgccttgggaagaatttcatgaggagaataaacgaagatggatacattgatgtgaagaataaaaaaggtctagcctttctttacttgattaataatacgtcatttttttcatgttaatcttattatgagtctgattcaatggactatcccttagttttctaatcaattagcacagggtcatcaaacaaatgcatgcgtctgatctggtgtcaatcttgaaactgtcaaaaactaaactataggctcggtgtttctgctcactctttccaagccaggacacatggcaatgcgattgtaaagaggatcatgcatcgcgttgttttggtggttgtgcaggggagttgcagtaccgggtgtcgaaagcgagtctggatgaccggctgagcactgataccctattctccagccgtgccataagcgaaggctgcagggttctcacgatccacggcgccaaagacgagatcgtcccggcggaggacgcccggcagttcgcggcgaacatccgcaaccacgagctgcgcatcgtcgcagatgccaaccaccgttacaccgggcacagggaggagctggcctcgctggtgctgggcttcctcagctcccatccctaccagatcacgtcgcgcttgcgtccgagactctagatagagtagagcacacccacttgaccgtttgcgaacaaaaaaaaatcccctgtaccaatctaagagttgtgggtgtggtgatgtgtttatccagaaccagaacacgagcacctgccgtccaaatcagcgtgactcgctctcgctctagaatttcaaaaaaagtcagtgccaggcatctaacagcaatctcct

SEQ ID NO: 60096 - DNA, 2278 bp, Zea Mays
gcgccggcccacacttcaacggatccactcggcaccggaccatttgctattgggcttccttgttcgccggcccatcacttcatcagttcctgctctcctgtcgtcccccaattccaggtcgcctacaggaatactgacacgctgtcgcccccgtcgtgcgacgccgccggctgggcatcgccccggaactcctcctgaaggcccctcatcacgctcttgcaggttctggacggacgtgggaggccccgcggcgcccgtacgtatatctagcggcgagacggcaagctcccgccccatctccgccgcctccgctccccgtcgtccggctgcgctgttgctgctcatacggatcaagctcggctacacccgtttctgcgagcagatcagaggacgccatcgtcgggtcggtagggatgggacatgttcactccgatcaaaaggcgaagaaattggcgagtgagtctttctctctctctcctatcccgcgcctctgcttcgtcctcagccagccttggaagagtggccaagggtggggatcagcgactcgaagcacttgaagacgagatcaatggagcagaagggccgaaacgctaactgggatcgctggaacccaagagggggcggcaaccttctcctgtttgggggagaaatcgcaatctaagctggcgcctaaggactccacatgcttcgtcggaagcaaaagtggaccagctgggatcttcttctggagacggtagcactccagttatttgcgaacaaagagttataattccaaacgggcatggggagaagcttgttggtttattacatcgaacaagttcaaagaatcttgtgatcctttgtcatggattccaagccacaaaggatgacagcatcttggttgaccttgctgatgccatcacaaaggaaggaattagtgcttttcggtttgatttttctggaaatggggaaagtgatggtgaattccagtatggaagctacagaaaagaggcagctgatttgcgctctgtagtattacatttctcagaacagaaatatgacataattgctcttatcgggcatagcaaaggaggaaatgctgttcttctttatgcttccaagtaccatgatgtccctgccattgtgaacatttctggccgctttgcattagagcgaggtatggagggacgccttgggaagaatttcatgaggagaataaacgaagatggatacattgatgtgaagaataaaaaaggggagttgcagtaccgggtgtcgaaagcgagtctggatgaccggctgagcactgataccctattctccagccgtgccataagcgaaggctgcaggatctgtacaggagcatactgaaagatgctggaacctcatcagacaataagttcacttctattgctcttagcaacttctttgctggtgctgctgccggatgtacaaccctggtcctcatctatccgctcgacattgctcacactcgtcttgcagctgatatcgggcgtacagacacccgccagttcagaggcatccgccacttcatccagaccatctacaagaaaaacggcatcagaggcatatacaggggattaccagcatcgctccacgggatggtcgttcaccggggcctgtactttggcggcttcgacactgccaaggatgtcctggtccctttggagtcccccctgtggcagcgctgggttgcagcccaggcagtgacatccatggcagggctcatctcgtacccactggacaccgtgcgccggaggatgatgatgcagtcagggatggaggtgcagatgtacagcagcacactcgactgctggaggaagatatacaggctggaggggatccggtcattctaccgtggtgcattgtctaacatgtttaggagcactggtgcagccgccatacttgttttgtatgacgaggtcaagaagttcatggacaggggtaggttgtaacagctatagaggggtttctttcacagaattttggattcgatatgggaagtgggattaggccaaaaggtgcaaggagcagcagctcgagcattttgtaactggatgctggtttcctcctgcttactaacctgctcgatgtaaccgagcctgaaggttctgactcgcgaacaatgcagcttgttcagttcacctcatctttacctcttcgaggttccacttatgggttgtttgttgcctgcacggaggggcctgcgccatagttaaacccataatcacgtacttcattcttttttttatttgtcttgttttagtttaaaaataaa

SEQ ID NO: 60097 - DNA, 1147 bp, Zea Mays
tccagcagcgcgtcaagctgctgctgcagacccaggacggcaacgccgcgctgctgggcagggcgcgcaagttccggggcttcgccgactgcgtcgcgcgcaccgttcgggacgagggggtgctctcgctctggcgcggcaacggcaccgccgtcatccgttactacccctccgtcgccctcaacttctcgctcaaggatctgtacaggagcatactgaaagatgctggaacctcatcagacaataagttcacttctattgctcttagcaacttctttgctggtgctgctgccggatgtacaaccctggtcctcatctatccgctcgacattgctcacactcgtcttgcagctgatatcgggcgtacagacacccgccagttcagaggcatccgccacttcatccagaccatctacaagaaaaacggcatcagaggcatatacaggggattaccagcatcgctccacgggatggtcgttcaccggggcctgtactttggcggcttcgacactgccaaggatgtcctggtccctttggagtcccccctgtggcagcgctgggttgcagcccaggcagtgacatccatggcagggctcatctcgtacccactggacaccgtgcgccggaggatgatgatgcagtcagggatggaggtgcagatgtacagcagcacactcgactgctggaggaagatatacaggctggaggggatccggtcattctaccgtggtgcattgtctaacatgtttaggagcactggtgcagccgccatacttgttttgtatgacgaggtcaagaagttcatggacaggggtaggttgtaacagctatagaggggtttctttcacagaattttggattcgatatgggaagtgggattaggccaaaaggtgcaaggagcagcagctcgagcattttgtaactggatgctggtttcctcctgcttactaacctgctcgatgtaaccgagcctgaaggttctgactcgcgaacaatgcagcttgttcagttcacctcatctttacctcttcgaggttccacttatgggttgtttgttgcctgcacggaggggcctgcgccatagttaaacccataatcacgtacttcattcttttttttatttgtcttgttttagtttaaaaataaa

SEQ ID NO: 60098 - DNA, 1501 bp, Zea Mays
atttcttattcattgattacataagtaggctagctgcctgcccctatctagctagagatccttatctccttaaaactctcctaaaaactcttaacaaactaataactaataaccttcctagacaatctcaactgataaccttactagacaaactactaattgataaccattacacaaatatgtgaaccaaacggcacctaaatgaagtctcgtacatagtttataaggacacttggcctgctaaccgaatggaggaaccaaactcttgaaattgaggcaataatctaggcgcggtgaccgcgtctacgtcacgctgagcgcgtccgcgtccctggtaccatgcttcttgccagagtagtggtggccccacatgacatacacattgcaggagaattatttgacctgtcatttactcctatagttcaaaatacttggccaagtttgcatgaccattctttttctggtgatgtgttttcatctttgtgagtaacagactgtgccacccacgctattcattcaagtaacacgacagacttatatggtcttactgcctgtgttcctttgcttcaggaggaaatgctgttcttctttatgcttccaagtaccatgatgtccctgccattgtgaacatttctggccgctttgcattagagcgaggtatggagggacgccttgggaagaatttcatgaggagaataaacgaagatggatacattgatgtgaagaataaaaaaggtctagcctttctttacttgattaataatacgtcatttttttcatgttaatcttattatgagtctgattcaatggactatcccttagttttctaatcaattagcacagggtcatcaaacaaatgcatgcgtctgatctggtgtcaatcttgaaactgtcaaaaactaaactataggctcggtgtttctgctcactctttccaagccaggacacatggcaatgcgattgtaaagaggatcatgcatcgcgttgttttggtggttgtgcaggggagttgcagtaccgggtgtcgaaagcgagtctggatgaccggctgagcactgataccctattctccagccgtgccataagcgaaggctgcagggttctcacgatccacggcgccaaagacgagatcgtcccggcggaggacgcccggcagttcgcggcgaacatccgcaaccacgagctgcgcatcgtcgcagatgccaaccaccgttacaccgggcacagggaggagctggcctcgctggtgctgggcttcctcagctcccatccctaccagatcacgtcgcgcttgcgtccgagactctagatagagtagagcacacccacttgaccgtttgcgaacaaaaaaaaatcccctgtaccaatctaagagttgtgggtgtggtgatgtgtttatccagaaccagaacacgagcacctgccgtccaaatcagcgtgactcgctctcgctctagaatttcaaaaaaagtcagtgccaggcatctaacagcaatctcct

SEQ ID NO: 60099 - DNA, 1320 bp, Zea Mays
ctggtagtggtagtctggtagactggtagtagtagtagttggtttgttcaggcctcagggcaggggaccgcctcctcgaacaggccacagcccgcagcgcagggggtagcgaggagtgcgagaggaggcgagtgggtccaaacaccagagggaggggagggcaggcgaatgagcgaggaggcggcgcgggcgggagtggaggagtccatcgggcagcggcggcggcgggatgggcgcggggaggcggcggcggcggggcgggtgtgggagttcgagcgggatctggtggccggcgcgctgatggggggcgccgtgcacaccgtggtggcgccgatcgagcgcgtcaagctgctgctgcagacccaggacggcaacgccgcgctgctgggcagggcgcgcaagttccggggcttcgccgactgcgtcgcgcgcaccgttcgggacgagggggtgctctcgctctggcgcggcaacggcaccgccgtcatccgttactacccctccgtcgccctcaacttctcgctcaaggatctgtacaggagcatactgaaagatgctggaacctcatcagacaataactgatatcgggcgtacagacacccgccagttcagaggcatccgccacttcatccagaccatctacaagaaaaacggcatcagaggcatatacaggggattaccagcatcgctccacgggatggtcgttcaccggggcctgtactttggcggcttcgacactgccaaggatgtcctggtccctttggagtcccccctgtggcagcgctgggttgcagcccaggcagtgacatccatggcagggctcatctcgtacccactggacaccgtgcgccggaggatgatgatgcagtcagggatggaggggatccggtcattctaccgtggtgcattgtctaacatgtttaggagcactggtgcagccgccatacttgttttgtatgacgaggtcaagaagttcatggacaggggtaggttgtaacagctatagaggggtttctttcacagaattttggattcgatatgggaagtgggattaggccaaaaggtgcaaggagcagcagctcgagcattttgtaactggatgctggtttcctcctgcttactaacctgctcgatgtaaccgagcctgaaggttctgactcgcgaacaatgcagcttgttcagttcacctcatctttacctcttcgaggttccacttatgggttgtttgttgcctgcacggaggggcctgcgccatagttaaacccataatcacgtacttcattcttttttttatttgtcttgttttagtttaaaaataaa

SEQ ID NO: 60100 - DNA, 1068 bp, Zea Mays
gcaccccaccccaccccactgccgtccttttatctattccgttcgttcgttcgcatttacagctgccattcccttgaggtggtatagagggcactgcatcatatgcaaatattattaggatctgtacaggagcatactgaaagatgctggaacctcatcagacaataagttcacttctattgctcttagcaacttctttgctggtgctgctgccggatgtacaaccctggtcctcatctatccgctcgacattgctcacactcgtcttgcagctgatatcgggcgtacagacacccgccagttcagaggcatccgccacttcatccagaccatctacaagaaaaacggcatcagaggcatatacaggggattaccagcatcgctccacgggatggtcgttcaccggggcctgtactttggcggcttcgacactgccaaggatgtcctggtccctttggagtcccccctgtggcagcgctgggttgcagcccaggcagtgacatccatggcagggctcatctcgtacccactggacaccgtgcgccggaggatgatgatgcagtcagggatggaggtgcagatgtacagcagcacactcgactgctggaggaagatatacaggctggaggggatccggtcattctaccgtggtgcattgtctaacatgtttaggagcactggtgcagccgccatacttgttttgtatgacgaggtcaagaagttcatggacaggggtaggttgtaacagctatagaggggtttctttcacagaattttggattcgatatgggaagtgggattaggccaaaaggtgcaaggagcagcagctcgagcattttgtaactggatgctggtttcctcctgcttactaacctgctcgatgtaaccgagcctgaaggttctgactcgcgaacaatgcagcttgttcagttcacctcatctttacctcttcgaggttccacttatgggttgtttgttgcctgcacggaggggcctgcgccatagttaaacccataatcacgtacttcattcttttttttatttgtcttgttttagtttaaaaataaa

SEQ ID NO: 60101 - DNA, 985 bp, Zea Mays
aaaaatatttggtttcttatttatctccagtgcattgcagtcactagataaaaagtgtttgaaatcttgttgtcaccatcttaagatgcaactgaaagaggcagacaataggatttaatgcaagtgaccaatccgtggagttgagttttctttaagattttattctaaaaaaaactgccttgtgacattctaaattttgtaaagtggaagggcaaaaataagtaaaaatcgtgagtaagggtaaaaatgagaaaagccacaggactaaggatattattttaaatactactatattttttgctaccatttgcgcagggcctctcaacttgacgggacacccctgcttggtttgatctgattctttacagctatttgtattcttctaaataaaattttgtatgcatggaattcattatacttggctcatcattcggcaccagaattaactcttgatgctaaaatcatttgttacctttggcatatatgggttaaaaactccagaagttttagctcgtgatcggcttctaggctcgttttctgtcaagcctgtggtaaacagagtgaagttcaccttggtgggtctggcaggctccctcatcctttgcattcttctttacttgggatgcgtaccggtggaaggtctatcccggaagtgtacagtgacgttgccgcaaggtcatttgggcctgatgcgttctgtggagaagctgatctgtcgtagcatcgcaaagcgtggagcatgagaagtttttagatggtggtatatggtctcatagggtaggtatacaagttcccctttgtcttgccttgtggttggtggatggttccatttctgtacggggttttttatccatcagttactgcatcagggtaatgttaataagtaatatttgatagcacgtagtgccgttatttttatagtggcaagctccttacgaaagtttatatgctgctggggcaaggtgaaacggtaaggaaaactttt

SEQ ID NO: 60102 - DNA, 337 bp, Zea Mays
attcaaaatggaaggcgctatcagtccagctttattaccccaccatcgaacgccgcactgcatcaaaaactgcaactcggtgacagttctgcacctcgtttcgaatgaactccgtagacgtatccgactatccgctagggaaacaaagttcgtccccaacctcccaattcctagccttacaggtcacagatcagcatcatacacggcgcctgaatttcctcagaagtccatcccgctcatctgcggcatacggctggctattctggacttggttgccgggagctcggagacagcggcctccgtggttgccatcagcagggaaacactgcccaacagc

SEQ ID NO: 60103 - DNA, 1650 bp, Zea Mays
caacaataaaactggaccaaacactaccaaaaacaccgccaacatgggatttaaagcatctaggatgcactaaataatgtgaaagaaaaaaaatatattataggcttttatttggtggcccatctaaaaacccactaattgagcccaaacttaagttccaccagacccacaccacacgtttctttacccaaccttttttcactgatccaccgaaagcacaaccgccgccgtttcttcatctcccatcttcgtcgtcttcgcagcaccggcgctccattttccgctctcggcacgcaggcgacggcggcggcgctcaggcttgggatctcaacgacggagtcagcggtttcccctccccctctcgccagccgcctcgcgccttcgcctccggtcctccgcacaccggctggtgaccctgcgtgcgtgcctctctctctcctcccgccttcggtggatcgtcaacgccgccaggccccggcatctgagccgcgcgcggcctgagggcagcgagagccagcagatgctgctccaccaaggtggtcgcgcatgcccaaagcgaagcgttacccgtcctcttagcgctgaagcgtgcgcttagtgccggcttttggaaccctgtatcataccgaattgcgcattatagaaattggctaggactacactgggtttgccattggccatgacgtgtgctgcttacagtatcagaggtcctctcatgcttgctgcaaggcgcagctcggatgtgttcgctagtagcaagtcgtgcaatggcaagtcttcggtgtcttaccccgttattcagtggtggagcagtaactgctcatccttcacaatgcggcatgtcgcctcccatcatcacttgattgttaaggcttcagcaacgtggcactcaaaagcttcagcaactgatgcagccactgcttccgatgagaggataactgtactggtcattggtggtggaggcagggagcatgctctttgttatgccttgaaccgttccccatcatgtgctgcagttctatgtgcccctggtaatgctggtattgctcagtccggggatgcaacatgtatttcagatttggacatctccagtagcgatgatgttatctcgttctgccgcaagagggaagtgggaatggttgtagtgggtcctgaagcccctcttgtcgcgggtcttgtgaatgaccttgtcaaagttgggataccaacctttggcccttcatcagaggctgcagcattagaaggatcaaaggacttcatgaagaagttgtgtgataagtacaacatccctacagccaagtatcgcacattcacggacgctgtggaagctaaaaaatatgttaaaaatgaaggagcccctatcgttgttaaagctgatggactggctgctggaaagggtgtggttgtcgcaatgactttggatgaggcgttcgaagccatagattctatgttggttgaaggctcattcggttctgctggttcactggttatcatcgaagaatttctagagggtgaagaagcctctttctttgcattggtagatggcacaaatgctttacctcttgaatcagcacaggatcacaaaagagttggtgatggtgatgttggcccaaataccggtggtatgggtgcatactcccctgctccaat

SEQ ID NO: 60104 - DNA, 1867 bp, Zea Mays
cccacaccacacgtttctttacccaaccttttttcactgatccaccgaaagcacaaccgccgccgtttcttcatctcccatcttcgtcgtcttcgcagcaccggcgctccattttccgctctcggcacgcaggcgacggcggcggcgctcaggcttgggatctcaacgacggagtcagcggtttcccctccccctctcgccagccgcctcgcgccttcgcctccggtcctccgcacaccggctggtgaccctgcgtgcgtgcctctctctctcctcccgccttcggtggatcgtcaacgccgccaggccccggcatctgagccgcgcgcggcctgagggcagcgagagccagcagatgctgctccaccaaggtggtcgcgcatgcccaaagcgaagcgttacccgtcctcttagcgctgaagcgtgcgcttagtgccggcttttggaaccctgtatcataccgaattgcgcattatagaaattggctaggactacactgggtttgccattggccatgacgtgtgctgcttacagtatcagaggtcctctcatgcttgctgcaaggcgcagctcggatgtgttcgctagtagcaagtcgtgcaatggcaagtcttcggtgtcttaccccgttattcagtggtggagcagtaactgctcatccttcacaatgcggcatgtcgcctcccatcatcacttgattgttaaggcttcagcaacgtggcactcaaaagcttcagcaactgatgcagccactgcttccgatgagaggataactgtactggtcattggtggtggaggcagggagcatgctctttgttatgccttgaaccgttccccatcatgtgctgcagttctatgtgcccctggtaatgctggtattgctcagtccggggatgcaacatgtatttcagatttggacatctccagtagcgatgatgttatctcgttctgccgcaagagggaagtgggaatggttgtagtgggtcctgaagcccctcttgtcgcgggtcttgtgaatgaccttgtcaaagttgggataccaacctttggcccttcatcagaggctgcagcattagaaggatcaaaggacttcatgaagaagttgtgtgataagtacaacatccctacagccaaggttctgatgatgcgattagaatctgatttggcacaagttctgttatctgcttgccagggagagttaggcaatgtttcactaacctggtcacccgaaatggcaatggtggttgtgatggcaagccagggatacccgggcccttataaaaaggggaccgtgataaaaaacgtggacaaggctgagcaggtgtctccggctgtcaagatattccatgctgggacagcactagatggagacggcaaccttgttgccgttggagggcgagttcttggtgtcactgccaagggcaaggacattgaagaagcaagggcaagagcatatggtgcggtagacgctgtcgagtggccagaagggttcttcaggcacgacattggttggagagcactgaggcagaagcaagcggcaaaataggtagcagctacccatgaccacgagattttcctagactaccacaactacggtgagcttgtagtgtttgcaagtaataaaaagggaaacggtgtaacgttcactgatttttttttggttgtggaacagcaggttgttcaaattttaacacctgcggatttcagcatgatttggtagatgtttgaaccgagattatgttcagagtctagacaagcgctagcgtgaaagcagcgccatctgaattctgaccatttgtctttcagttctcggataagtggacctcctatatgactgtgatatctcaaaccaaacacttcagagtgt

SEQ ID NO: 60105 - DNA, 1361 bp, Zea Mays
cactgatccaccgaaagcacaaccgccgccgtttcttcatctcccatcttcgtcgtcttcgcagcaccggcgctccattttccgctctcggcacgcaggcgacggcggcggcgctcaggcttgggatctcaacgacggagtcagcggtttcccctccccctctcgccagccgcctcgcgccttcgcctccggtcctccgcacaccggctggtgaccctgcgtgcgtgcctctctctctcctcccgccttcggtggatcgtcaacgccgccaggccccggcatctgagccgcgcgcggcctgagggcagcgagagccagcagatgctgctccaccaaggtggtcgcgcatgcccaaagcgaagcgttacccgtcctcttagcgctgaagcgtgcgcttagtgccggcttttggaaccctgtatcataccgaattgcgcattatagaaattggctaggactacactgggtttgccattggccatgacgtgtgctgcttacagtatcagaggtcctctcatgcttgctgcaaggcgcagctcggatgtgttcgctagtagcaagtcgtgcaatggcaagtcttcggtgtcttaccccgttattcagtggtggagcagtaactgctcatccttcacaatgcggcatgtcgcctcccatcatcacttgattgttaaggcttcagcaacgtggcactcaaaagcttcagcaactgatgcagccactgcttccgttctatgtgcccctggtaatgctggtattgctcagtccggggatgcaacatgtatttcagatttggacatctccagtagcgatgatgttatctcgttctgccgcaagagggaagtgggaatggttgtagtgggtcctgaagcccctcttgtcgcgggtcttgtgaatgaccttgtcaaagttgggataccaacctttggcccttcatcagaggctgcagcattagaaggatcaaaggacttcatgaagaagttgtgtgataagtacaacatccctacagccaagtatcgcacattcacggacgctgtggaagctaaaaaatatgttaaaaatgaaggagcccctatcgttgttaaagctgatggactggctgctggaaagggtgtggttgtcgcaatgactttggatgaggcgttcgaagccatagattctatgttggttgaaggctcattcggttctgctggttcactggttatcatcgaagaatttctagagggtgaagaagcctctttctttgcattggtagatggcacaaatgctttacctcttgaatcagcacaggatcacaaaagagttggtgatggtgatgttggcccaaataccggtggtatgggtgcatactcccctgctccaat

SEQ ID NO: 60106 - DNA, 1039 bp, Zea Mays
ctattcctcactatctgtttgatcaatatcagacaaattaaagtttctttggttgtaaatttggaagctcacatttcttgaccagtgcagaatgtccaattttttactctatctgctgcagaaaaaaatcatttccatttcttttttaccaatgacagtcttacatgtctagcttggaccgcttattttattcagtaatatctaaggatatattaatgtcatgggcatactttagatgtccctgaacccaagcagcgtcaccatgctgacactcagcagccgcaccagaagatctggaacacatgaggttctgatgatgcgattagaatctgatttggcacaagttctgttatctgcttgccagggagagttaggcaatgtttcactaacctggtcacccgaaatggcaatggtggttgtgatggcaagccagggatacccgggcccttataaaaaggggaccgtgataaaaaacgtggacaaggctgagcaggtgtctccggctgtcaagatattccatgctgggacagcactagatggagacggcaaccttgttgccgttggagggcgagttcttggtgtcactgccaagggcaaggacattgaagaagcaagggcaagagcatatggtgcggtagacgctgtcgagtggccagaagggttcttcaggcacgacattggttggagagcactgaggcagaagcaagcggcaaaataggtagcagctacccatgaccacgagattttcctagactaccacaactacggtgagcttgtagtgtttgcaagtaataaaaagggaaacggtgtaacgttcactgatttttttttggttgtggaacagcaggttgttcaaattttaacacctgcggatttcagcatgatttggtagatgtttgaaccgagattatgttcagagtctagacaagcgctagcgtgaaagcagcgccatctgaattctgaccatttgtctttcagttctcggataagtggacctcctatatgactgtgatatctcaaaccaaacacttcagagtgt

SEQ ID NO: 60107 - DNA, 1026 bp, Zea Mays
gaggaagcggcggacaggcggcggtgcaaaaaagattcccggcgacacggtgcggaggggcatcaacctcgtctatggcggcggcagcatcggtctgatgggcgtgattgctcggacggttcgtcacggcggctgccatgtcctcggggtgattcctaaagcgctcatgcctattgagatatcaggtgaaagcgtgggagaggtgagggtcgtggacgacatgcaccagaggaaagccgagatggctcgtcagtcccaagccttcatcgctctcccaggggggtacgggacgatggaggagctgctggagatgatcacctggtgccagctcgggatccatgacaaaccagttgggttgctgaacgtggacggctactacgaccccctgctcgccctgttcgagaaaggcgccgccgagggtttcatcagcaccgactgcagccagatattcgtctcggcgccaaccgcgagcgagctgctcacaaagatggagcaatacacgcgggtgcaccaggaggtagccccagcgacgagctgggagatctcggagctcggctacggcagaggaggagacgccggcgccgccacgccgccagcagcagcagcaggaggagcagaagagggaaaaggcggctcgtagcacccacatccatctcctgaagcgttaccttcctccacctactgcttgctgatgtgatgacgcgtctgttacggtttcctggcaaatttgtttcgtcaaagtcgacctctccaaagtccaaaacccggttgaaccaggtgccgggtcgggacgtactggggagacgacgatgatatctctgtgttgggtgcttggattgtgtaagcttgctgctgctggtactattcttgttttctttactttttccccggtgtgtggtgcttgtggaaatggaatctgtgctggtgcattgcagtgcagctaccctaccccgtccccggccccggggacgcacgcgacgacgtcacacacaggtgcgcccggccactgattgggctcctactcat

SEQ ID NO: 60108 - DNA, 1097 bp, Zea Mays
tgagggcgggggggacagacaggcaatgcagagttacgggagggcccaagctggtcgtgggtggtgactgactggtcaccggaccgcgcggcgcccgcgaaaatgacagcggcgagcgaggtgcggaggggcatcaacctcgtctatggcggcggcagcatcggtctgatgggcgtgattgctcggacggttcgtcacggcggctgccatgtcctcggggtgattcctaaagcgctcatgcctattgagatatcaggtgaaagcgtgggagaggtgagggtcgtggacgacatgcaccagaggaaagccgagatggctcgtcagtcccaagccttcatcgctctcccaggggggtacgggacgatggaggagctgctggagatgatcacctggtgccagctcgggatccatgacaaaccagttgggttgctgaacgtggacggctactacgaccccctgctcgccctgttcgagaaaggcgccgccgagggtttcatcagcaccgactgcagccagatattcgtctcggcgccaaccgcgagcgagctgctcacaaagatggagcaatacacgcgggtgcaccaggaggtagccccagcgacgagctgggagatctcggagctcggctacggcagaggaggagacgccggcgccgccacgccgccagcagcagcagcaggaggagcagaagagggaaaaggcggctcgtagcacccacatccatctcctgaagcgttaccttcctccacctactgcttgctgatgtgatgacgcgtctgttacggtttcctggcaaatttgtttcgtcaaagtcgacctctccaaagtccaaaacccggttgaaccaggtgccgggtcgggacgtactggggagacgacgatgatatctctgtgttgggtgcttggattgtgtaagcttgctgctgctggtactattcttgttttctttactttttccccggtgtgtggtgcttgtggaaatggaatctgtgctggtgcattgcagtgcagctaccctaccccgtccccggccccggggacgcacgcgacgacgtcacacacaggtgcgcccggccactgattgggctcctactcat

SEQ ID NO: 60109 - DNA, 2160 bp, Zea Mays
atcgattacagcactagcccccccgccggccttaatgcccgcgcgccatcacttgctggggggagctctgccgagacacgcacgctgctggagataggcatccagacacggcaccaccagtccaccaccaccaccaccaccaccgtgacgtgagtgcccgagcgcgcggccgccatcaggctcccccgtcgtcctcgccgggcggctaggtcagagccgggagaggcgggggccggcggcgctaggctaggctaggctaggcagcggcgtacgtgcgtggccgccgcgcgatcggcatgggcgacggcgaggcggcggtgccgagcaggttccgcacggtctgcgtcttctgcggcagcaacgccggccgccgcaaggtgtacgccgacgccgccctcgagctcggccacgagctggtgcggaggggcatcaacctcgtctatggcggcggcagcatcggtctgatgggcgtgattgctcggacggttcgtcacggcggctgccatgtcctcggggtgattcctaaagcgctcatgcctattgaggtaagtacatgtggattctcctcgctccaagatctgttcatgcacgcacatgatttgtcgctgggttaaattcaagcatgtcccatattcatgcataattcagaaaagcttcacctacaactagtcaactacgatggggattcagtgaacgactgctgagcttcttgtctgtccaccagtcgttcggttttgtcatgtcacccttgttggtgaaagattttggcaagctaggactgctagtattgattttctctctctctctttctcttcctactagcagaaggttcctgtctagctagttatatatatagactttactactttaggtgtgacaatttggagtctcggttcagctgccgtctgaattcagtactactacaacacacgtgccaggtagactctgtcaagtagaggatgcttttctagtcctttttttcctttgtatgtataactagggttctgtactcctgcactacactagtacagagtggttccctattcgaggcgagtggcgtggtggtgttttcacctctctttttgccctcccttttccatcgttaatcctcctgttgctgtcctctttgttcgtttgtgtgtgtgttgtctggggctggctctgtcaagtgtcaggaaccggaacagcgtgtgtgtgtgtccaagccactgagacagaaatgcagatctcacagtaatgtatacgcttggttggacacgacggagatttacagtggcattttttacacggctgtcttttacgcttgtggcagatatcaggtgaaagcgtgggagaggtgagggtcgtggacgacatgcaccagaggaaagccgagatggctcgtcagtcccaagccttcatcgctctcccaggggggtacgggacgatggaggagctgctggagatgatcacctggtgccagctcgggatccatgacaaaccagttgggttgctgaacgtggacggctactacgaccccctgctcgccctgttcgagaaaggcgccgccgagggtttcatcagcaccgactgcagccagatattcgtctcggcgccaaccgcgagcgagctgctcacaaagatggagcaatacacgcgggtgcaccaggaggtagccccagcgacgagctgggagatctcggagctcggctacggcagaggaggagacgccggcgccgccacgccgccagcagcagcagcaggaggagcagaagagggaaaaggcggctcgtagcacccacatccatctcctgaagcgttaccttcctccacctactgcttgctgatgtgatgacgcgtctgttacggtttcctggcaaatttgtttcgtcaaagtcgacctctccaaagtccaaaacccggttgaaccaggtgccgggtcgggacgtactggggagacgacgatgatatctctgtgttgggtgcttggattgtgtaagcttgctgctgctggtactattcttgttttctttactttttccccggtgtgtggtgcttgtggaaatggaatctgtgctggtgcattgcagtgcagctaccctaccccgtccccggccccggggacgcacgcgacgacgtcacacacaggtgcgcccggccactgattgggctcctactcat

SEQ ID NO: 60110 - DNA, 984 bp, Zea Mays
tgccgtctgaattcagtactactacaacacacgtgccagatatcaggtgaaagcgtgggagaggtgagggtcgtggacgacatgcaccagaggaaagccgagatggctcgtcagtcccaagccttcatcgctctcccaggggggtacgggacgatggaggagctgctggagatgatcacctggtgccagctcgggatccatgacaaaccagttgggttgctgaacgtggacggctactacgaccccctgctcgccctgttcgagaaaggcgccgccgagggtttcatcagcaccgactgcagccagatattcgtctcggcgccaaccgcgagcgagctgctcacaaagatggaggtggcgagctagctagctagtacatgtacatcttcgatatacatacgctttttttgttcacgtacgctagctgttgtggctctttgcctgtgtccagcaatacacgcgggtgcaccaggaggtagccccagcgacgagctgggagatctcggagctcggctacggcagaggaggagacgccggcgccgccacgccgccagcagcagcagcaggaggagcagaagagggaaaaggcggctcgtagcacccacatccatctcctgaagcgttaccttcctccacctactgcttgctgatgtgatgacgcgtctgttacggtttcctggcaaatttgtttcgtcaaagtcgacctctccaaagtccaaaacccggttgaaccaggtgccgggtcgggacgtactggggagacgacgatgatatctctgtgttgggtgcttggattgtgtaagcttgctgctgctggtactattcttgttttctttactttttccccggtgtgtggtgcttgtggaaatggaatctgtgctggtgcattgcagtgcagctaccctaccccgtccccggccccggggacgcacgcgacgacgtcacacacaggtgcgcccggccactgattgggctcctactcat

SEQ ID NO: 60111 - DNA, 1730 bp, Zea Mays
gagaaggcatataaaaatgcgaaggccttcttcttcctctccctcctcacctggcatccagagaggaagggaagggaggaactcgggggcacacagcacagggggtcgtccggaatttcctctgcttccgcttaccaccgaaacctctgtcttgaaggaagaatccgttcctctgcttgatctgtattcttatagtggagaagagaagccgaggacgattaatagagctggaaggtgaattgacgcttagtatttgaagctcgtcgccaaatggagaaagaggcgaggaaccactaccgcacgcggggatcctcgcgcggcagcggcggcggaggcaccgctgccgagcgcgacctgctgttacagtggggcaaccggaagcgcctgcgctgtgtcaaggtgcagcgccgcgacgtcgaggccgccgccaccgcggccgccgagaaggccgccatcagccagcgccgcgccgcggccgcagccgcagccgcgcagcaccacccaaccggccacacccaccaccgcgttctcaggaagtcagaagagtttgcaatcatgaaattgccagcacggcaacgacagaatgacaggatccacacagttgcttcaccagacagggagtgccctggtagagggaaaaggaagaggatttcctggtgttcaaaggatccaagctgcctcaaagacccaagaaaagagctaaggtcatccagagaaccgtcaattttgtatgcccaggaacgtggctatgtgacttgactcttgaaagatatgaagtccgggagaagaaggtttccaagaagcgccccaggggattgaaagctatgcacgacatggacagtgactcggaataaataaaagaagatcactgaacatgagaagctgaatattagaaagaaggccaggacagatcctgcagatggaggccgacgagaaaacgtcctgatggaatgaatggccgtatcaacgattcgccacttctcgtgattgctactggagatcagtttgttccaaaaggacttatggagatcggaggacggccgaaatgtcaggaagctgcatggaagaacagaagagagccgcaggagctggaattcctggacattactattcagttccctctgtaaagcagcaacgctgttttgcaagcctcccatgctaatttcgcgctgccaaatattagcgtgatcgcgaagctagccagtcctggcgcgtctagtttgccgggttgtctgacaacaaaagttagtatgaatatgaaagggccttccttaatgttttttcccacttggtgctgtataaaggttcagtgtatattccattcaggagaatgagaaaaagttcaacactccagtgtgggtggattcaaaacaggcgacttttaattttgaaagtttcagtagatttgttagtttatagtttatattttgaaagtttcagtagtgtccaatggaactcgatgtgtaattcaaaacaggcagacttttaattttgaaagtttcagtagttttattagtttatattttatacagacctactattttcgtctaaaaaagagagaaattcatattagacactagaaaacttttttcctatttaacacttcggttatttcagaccaataacggtgttatgttctagttttacccctattttttttctaaccatgatatttccttttgctagctaaagaaaatatgatagttggaaataaaaaacatcaatagcca

SEQ ID NO: 60112 - DNA, 1797 bp, Zea Mays
cttcttcctctccctcctcacctggcatccagagaggaagggaagggaggaactcgggggcacacagcacagggggtcgtccggaatttcctctgcttccgcttaccaccgaaacctctgtcttgaaggaagaatccgttcctctgcttgatctgtattcttatagtggagaagagaagccgaggacgattaatagagctggaaggtgaattgacgcttagtatttgaagctcgtcgccaaatggagaaagaggcgaggaaccactaccgcacgcggggatcctcgcgcggcagcggcggcggaggcaccgctgccgagcgcgacctgctgttacagtggggcaaccggaagcgcctgcgctgtgtcaaggtgcagcgccgcgacgtcgaggccgccgccaccgcggccgccgagaaggccgccatcagccagcgccgcgccgcggccgcagccgcagccgcgcagcaccacccaaccggccacacccaccaccgcgttctcaggaagtcagaagagtttgcaatcatgaaattgccagcacggcaacgacagaatgacaggatccacacagttgcttcaccagacagggagtgccctggtagaggtaacaacaacaacggagttccacagacctatccggatgacaagaaaggctcttcatcagggagtgaggggtccatctggccgaagtttgaaatcaccctgtcaaacagggaaaaggaagaggatttcctggtgttcaaaggatccaagctgcctcaaagacccaagaaaagagctaaggtcatccagagaaccgtcaatgaacgtggctatgtgacttgactcttgaaagatatgaagtccgggagaagaaggtttccaagaagcgccccaggggattgaaagctatgcacgacatggacagtgactcggaataaataaaagaagatcactgaacatgagaagctgaatattagaaagaaggccaggacagatcctgcagatggaggccgacgagaaaacgtcctgatggaatgaatggccgtatcaacgattcgccacttctcgtgattgctactggagatcagtttgttccaaaaggacttatggagatcggaggacggccgaaatgtcaggaagctgcatggaagaacagaagagagccgcaggagctggaattcctggacattactattcagttccctctgtaaagcagcaacgctgttttgcaagcctcccatgctaatttcgcgctgccaaatattagcgtgatcgcgaagctagccagtcctggcgcgtctagtttgccgggttgtctgacaacaaaagttagtatgaatatgaaagggccttccttaatgttttttcccacttggtgctgtataaaggttcagtgtatattccattcaggagaatgagaaaaagttcaacactccagtgtgggtggattcaaaacaggcgacttttaattttgaaagtttcagtagatttgttagtttatagtttatattttgaaagtttcagtagtgtccaatggaactcgatgtgtaattcaaaacaggcagacttttaattttgaaagtttcagtagttttattagtttatattttatacagacctactattttcgtctaaaaaagagagaaattcatattagacactagaaaacttttttcctatttaacacttcggttatttcagaccaataacggtgttatgttctagttttacccctattttttttctaaccatgatatttccttttgctagctaaagaaaatatgatagttggaaataaaaaacatcaatagcca

SEQ ID NO: 60113 - DNA, 1998 bp, Zea Mays
attttttgttggtacagttttctcaaactgatttgtgattttgcttccctgaaattatttgcgaaaaaagaactacgagactgctgtctaattccttatcagtgttctctaaatgttgatggctgtgttctttgccttatatgttgatagctttggactctacgcacatcatatcaactacatttttgtgactatttttggattccaaagaaaacaagaaaggactcttacggtccatttggttggagagccacgtgagtggagcggtttcattccagatctggagagtggagcggcggtccgtttggttggagagccacgtgagtggagcggtttcattccagatctggagagtggagcggctccattccagattttgatattgtgacttacctggattcaactacgtggcctgagtaaaagaaatcctctcgtccgactatgcgccaaagcatggtgtaaggcccagcccacattcttatgggcaatgtggccaccgtgtaagcatggatatagaaaatattattttgtattgtacacagcactatttacagagtgtaagaaaggaggttcgaggtttttcttgatctatgtgaaaggtttttatcaggcaatgcctgttggttgttttaccctgcaggtcaagtttttttatcttatcagtcaccaccgcatgtataagtggatggaagtcagaagagtttgcaatcatgaaattgccagcacggcaacgacagaatgacaggatccacacagttgcttcaccagacagggagtgccctggtagaggtaacaacaacaacggagttccacagacctatccggatgacaagaaaggctcttcatcagggagtgaggggtccatctggccgaagtttgaaatcaccctgtcaaacagggaaaaggaagaggatttcctggtgttcaaaggatccaagctgcctcaaagacccaagaaaagagctaaggtcatccagagaaccgtcaatgtattttgtatgcccaggaacgtggctatgtgacttgactcttgaaagatatgaagtccgggagaagaaggtttccaagaagcgccccaggggattgaaagctatgcacgacatggacagtgactcggaataaataaaagaagatcactgaacatgagaagctgaatattagaaagaaggccaggacagatcctgcagatggaggccgacgagaaaacgtcctgatggaatgaatggccgtatcaacgattcgccacttctcgtgattgctactggagatcagtttgttccaaaaggacttatggagatcggaggacggccgaaatgtcaggaagctgcatggaagaacagaagagagccgcaggagctggaattcctggacattactattcagttccctctgtaaagcagcaacgctgttttgcaagcctcccatgctaatttcgcgctgccaaatattagcgtgatcgcgaagctagccagtcctggcgcgtctagtttgccgggttgtctgacaacaaaagttagtatgaatatgaaagggccttccttaatgttttttcccacttggtgctgtataaaggttcagtgtatattccattcaggagaatgagaaaaagttcaacactccagtgtgggtggattcaaaacaggcgacttttaattttgaaagtttcagtagatttgttagtttatagtttatattttgaaagtttcagtagtgtccaatggaactcgatgtgtaattcaaaacaggcagacttttaattttgaaagtttcagtagttttattagtttatattttatacagacctactattttcgtctaaaaaagagagaaattcatattagacactagaaaacttttttcctatttaacacttcggttatttcagaccaataacggtgttatgttctagttttacccctattttttttctaaccatgatatttccttttgctagctaaagaaaatatgatagttggaaataaaaaacatcaatagcca

SEQ ID NO: 60114 - DNA, 1342 bp, Zea Mays
tatcttatcagtcaccaccgcatgtataagtggatggaagtcagaagagtttgcaatcatgaaattgccagcacggcaacgacagaatgacaggatccacacagttgcttcaccagacagggagtgccctggtagaggtaacaacaacaacggagttccacagacctatccggatgacaagaaaggctcttcatcagggagtgaggggtccatctggccgaagtttgaaatcaccctgtcaaacagggaaaaggaagaggatttcctggtgttcaaaggatccaagctgcctcaaagacccaagaaaagagctaaggtcatccagagaaccgtcaattttgtatgcccaggaacgtggctatgtgacttgactcttgaaagatatgaagtccgggagaagaaggtttccaagaagcgccccaggggattgaaagctatgcacgacatggacagtgactcggaataaataaaagaagatcactgaacatgagaagctgaatattagaaagaaggccaggacagatcctgcagatggaggccgacgagaaaacgtcctgatggaatgaatggccgtatcaacgattcgccacttctcgtgattgctactggagatcagtttgttccaaaaggacttatggagatcggaggacggccgaaatgtcaggaagctgcatggaagaacagaagagagccgcaggagctggaattcctggacattactattcagttccctctgtaaagcagcaacgctgttttgcaagcctcccatgctaatttcgcgctgccaaatattagcgtgatcgcgaagctagccagtcctggcgcgtctagtttgccgggttgtctgacaacaaaagttagtatgaatatgaaagggccttccttaatgttttttcccacttggtgctgtataaaggttcagtgtatattccattcaggagaatgagaaaaagttcaacactccagtgtgggtggattcaaaacaggcgacttttaattttgaaagtttcagtagatttgttagtttatagtttatattttgaaagtttcagtagtgtccaatggaactcgatgtgtaattcaaaacaggcagacttttaattttgaaagtttcagtagttttattagtttatattttatacagacctactattttcgtctaaaaaagagagaaattcatattagacactagaaaacttttttcctatttaacacttcggttatttcagaccaataacggtgttatgttctagttttacccctattttttttctaaccatgatatttccttttgctagctaaagaaaatatgatagttggaaataaaaaacatcaatagcca

SEQ ID NO: 60115 - DNA, 1380 bp, Zea Mays
ctcatccattgctcttccttttgcctcctcgaaatcgtagcttgttgtctgaacagcacggagcattgatataggaagtcagaagagtttgcaatcatgaaattgccagcacggcaacgacagaatgacaggatccacacagttgcttcaccagacagggagtgccctggtagaggtaacaacaacaacggagttccacagacctatccggatgacaagaaaggctcttcatcagggagtgaggggtccatctggccgaagtttgaaatcaccctgtcaaacagggaaaaggaagaggatttcctggtgttcaaaggatccaagctgcctcaaagacccaagaaaagagctaaggtcatccagagaaccgtcaattttgtatgcccaggaacgtggctatgtgacttgactcttgaaagatatgaagtccgggagaagaaggtttccaagaagcgccccaggggattgaaagctatgcacgacatggacagtgactcggaataaataaaagaagatcactgaacatgagaagctgaatattagaaagaaggccaggacagatcctgcagatggaggccgacgagaaaacgtcctgatggaatgaatggccgtatcaacgattcgccacttctcgtgattgctactggagatcagtttgttccaaaaggacttatggagatcggaggacggccgaaatgtcaggaagctgcatggaagaacagaagagagccgcaggagctggaattcctggacattactattcagttccctctgtaaagcagcaacgctgttttgcaagcctcccatgctaatttcgcgctgccaaatattagcgtgatcgcgaagctagccagtcctggcgcgtctagtttgccgggttgtctgacaacaaaagttagtatgaatatgaaagggccttccttaatgttttttcccacttggtgctgtataaaggttcagtgtatattccattcaggagaatgagaaaaagttcaacactccagtgtgggtggattcaaaacaggcgacttttaattttgaaagtttcagtagatttgttagtttatagtttatattttgaaagtttcagtagtgtccaatggaactcgatgtgtaattcaaaacaggcagacttttaattttgaaagtttcagtagttttattagtttatattttatacagacctactattttcgtctaaaaaagagagaaattcatattagacactagaaaacttttttcctatttaacacttcggttatttcagaccaataacggtgttatgttctagttttacccctattttttttctaaccatgatatttccttttgctagctaaagaaaatatgatagttggaaataaaaaacatcaatagcca

SEQ ID NO: 60116 - DNA, 1328 bp, Zea Mays
gtccctcttaccaaaattggaggaagtcagaagagtttgcaatcatgaaattgccagcacggcaacgacagaatgacaggatccacacagttgcttcaccagacagggagtgccctggtagaggtaacaacaacaacggagttccacagacctatccggatgacaagaaaggctcttcatcagggagtgaggggtccatctggccgaagtttgaaatcaccctgtcaaacagggaaaaggaagaggatttcctggtgttcaaaggatccaagctgcctcaaagacccaagaaaagagctaaggtcatccagagaaccgtcaattttgtatgcccaggaacgtggctatgtgacttgactcttgaaagatatgaagtccgggagaagaaggtttccaagaagcgccccaggggattgaaagctatgcacgacatggacagtgactcggaataaataaaagaagatcactgaacatgagaagctgaatattagaaagaaggccaggacagatcctgcagatggaggccgacgagaaaacgtcctgatggaatgaatggccgtatcaacgattcgccacttctcgtgattgctactggagatcagtttgttccaaaaggacttatggagatcggaggacggccgaaatgtcaggaagctgcatggaagaacagaagagagccgcaggagctggaattcctggacattactattcagttccctctgtaaagcagcaacgctgttttgcaagcctcccatgctaatttcgcgctgccaaatattagcgtgatcgcgaagctagccagtcctggcgcgtctagtttgccgggttgtctgacaacaaaagttagtatgaatatgaaagggccttccttaatgttttttcccacttggtgctgtataaaggttcagtgtatattccattcaggagaatgagaaaaagttcaacactccagtgtgggtggattcaaaacaggcgacttttaattttgaaagtttcagtagatttgttagtttatagtttatattttgaaagtttcagtagtgtccaatggaactcgatgtgtaattcaaaacaggcagacttttaattttgaaagtttcagtagttttattagtttatattttatacagacctactattttcgtctaaaaaagagagaaattcatattagacactagaaaacttttttcctatttaacacttcggttatttcagaccaataacggtgttatgttctagttttacccctattttttttctaaccatgatatttccttttgctagctaaagaaaatatgatagttggaaataaaaaacatcaatagcca

SEQ ID NO: 60117 - DNA, 3416 bp, Zea Mays
gtgcatttgatatcatcacttttgggctgaccctttccaagtaggaaatatgtgagaagaattgaatacctggtgcttatgatgctccataaatttgaactacagtggttgccagtaaaaacttatccagttgccacacaaaattgtcaacctgagatgcactctgtctcgtgactaatgtctttagggtaggaaaatgctattgcttaatcaaacttgatagcaagggattgtgaaggataaactcagtaaatctattgatattacaaaatacaatggtataaaaaggttagattcaagtaatgagaacaaactcaagttttctcttaagtcttaatcatggacaattttaggtgcgataaggattctcagaaacaaacataattacacactcggacaactagtaaaaagtaaacttgagctatttcttgtactatccaagtgaatgcatccacaaagcagagttcatatatatcatgtggcctccttaacacgttttctatatgcattggccaatttctacaggctatatggattttcaatatcaatttattattggtagagaccatggtttcaaaggcgtcgcctaggcgacgtctaggcatccaggcggccaaaaagtctaggcgtccccgtcgcctaaccaagagtcagcaagagaggcaagaggggagggggaagaagcctagcagagactttggggagcgggatcagcggcgcagaactcgggggagtgctgagctcgggggagcggcggtgcagagctcgggggagcggcgacgctgagactcgggggagcgccgagcttgggggagcaggagcaacgatgctgtgatgtggacgagcagcgatgctgtgacagacaggggcggcgacagtgagatgggagcaaccctaaccggaggatatatgggctgcctgcctggtgggctgggccatctcttctaccccttccttctttttttctttctccttttttctttttcttcctcatatatgttgttgttctgtcgtttctttaattggtaaggtgtcgccttgctcgcctaagcgcctaggcgtcgcctaggcgtccaggcggtggtccaacgccttgtctcgcgttaccgccttaagaactatggtagagacctctttgctgacaattgaattgaatgtttgcaaatgccattcaagttactaacacataccgataccgtaatgtgtttcacctttacaagcaaaataagcattcactttttcagacaattttggaggaagatgggaacttagcataattttattttggagggagaaaataactaaacaagatctcttatggcgctcatctgtgccaacaaaataaagtggatttcacatagaacattttcacgcaaatcagaaatgggtatttaaaaagtgaacataaatgacaaaagtaatcaaactgagctgaaagtgttctagcattaacgtatttgtcttcatgtacagcgagctactcaacttctttttataattaagagagctcctctctccatttccaaattgtaagtcatttctgttttgtcctaagtcaaactttgattaagtctatagaaaaatccacaaatatttacattatcaaacgaattaattacatgcaagaaatatattttgacactgaataaatttggcagtgtagttgtagatgttaattgtcaggacctgacaggcccaagggggctgcggccaggacctgtcagggcctaagggggctgcggcaaggagcaacatcaaggagcacaggtcaaaggataagaagattagttgagattatttagaagattagttgagattatctataaaggatatcagttagtagtttgttgagagttttaaggagacaaggatctctagcaagataggggcggtcagtcggcctatttatgtaatcaatggatgaaaaataaagtagacaagaattagaagggagaaaccctcctcttgctcggccgtgggcagaggcccccggacggcattcctgcacatcgacctcattctgcaatcccctcatctacgtgtgaacagtaccacaccgtctccgccagcagctccaatcccccaccgatctagcaactataacattaatacattttcctataaacttggtcaatgttagacaaatctatgtcatatcgaatgtttgaatgataattatgagtattaaatatatttcaactataaaactaattatacagatattcagacatttgatgtgacatgaactaaactttagtcaagggaaccaaacacaaagattaaagtcgaatctgcataagtgcatgagatttagaatactggatctaacgaatagcagcaagtgaaaaggccaccgaaatgtaatccccggcctacaagtccctagcaaacaagccgtaccttcccagacctaccctcacggagtcaaccagactaagccaaggcagaccgaaatcaagggacgctgcgccccaagggcgcgcgcgcacggcgcacatcttgtagggtttgcggaggggagagaaggttgcgtaccgaatccagcgatgaggcaggaggccgcgactacgggctccttaacgacaaagatcttgagcttctccatcaccgccatggctgccgcctctgcttccactactccgcttcgccttcgcgtaaccctcgcccgctgccgtcgctggagacgagagaggccagagggatacaagccagtgctctcctccgatctgtggacgtgggcccgtgtcttgagcggagagacttcgacgcccagcccgtctacgaccgtggtccagtgggccacgatccattttgtttgttgggctgaggcccgtaccgataatcccattaaatgatatggtcacggcatattcagagctgcagactggaatattcctcgcgcgcgcgcgaataatctacccggacgagcgaatctactgtcggtcgcagcgccgttttctcgctctcgcgctcgccttacctgggatgggatggcaccgcacgcacacgaccatccttctctcctctcttcacctaccgattctgcgcgcatagaagaggcactccttcatcgtcagctgcctttcgcatgtcggcatgcatcttgcccgacaccacgctggcccgtggggtagtcgccgcacgccgagcaccggcaggctgcgcagccgtcgaccatgattttgccaagatggaatcctgaattactgaaatattacgcgtactttggaactgatatgacatttcttttataaatccagccgtgcaggcggattgtaagtgttacatttgtttcaatatcgagtttacttgtgagttgagactaaaaacccagtaaatttcatgaattggaagtaaaaccaatgaatttggtatctccatggcacacgatttctattacatacgtcttaagtaaa

SEQ ID NO: 60118 - DNA, 6535 bp, Zea Mays
gtgcatttgatatcatcacttttgggctgaccctttccaagtaggaaatatgtgagaagaattgaatacctggtgcttatgatgctccataaatttgaactacagtggttgccagtaaaaacttatccagttgccacacaaaattgtcaacctgagatgcactctgtctcgtgactaatgtctttagggtaggaaaatgctattgcttaatcaaacttgatagcaagggattgtgaaggataaactcagtaaatctattgatattacaaaatacaatggtataaaaaggttagattcaagtaatgagaacaaactcaagttttctcttaagtcttaatcatggacaattttaggtgcgataaggattctcagaaacaaacataattacacactcggacaactagtaaaaagtaaacttgagctatttcttgtactatccaagtgaatgcatccacaaagcagagttcatatatatcatgtggcctccttaacacgttttctatatgcattggccaatttctacaggctatatggattttcaatatcaatttattattggtagagaccatggtttcaaaggcgtcgcctaggcgacgtctaggcatccaggcggccaaaaagtctaggcgtccccgtcgcctaaccaagagtcagcaagagaggcaagaggggagggggaagaagcctagcagagactttggggagcgggatcagcggcgcagaactcgggggagtgctgagctcgggggagcggcggtgcagagctcgggggagcggcgacgctgagactcgggggagcgccgagcttgggggagcaggagcaacgatgctgtgatgtggacgagcagcgatgctgtgacagacaggggcggcgacagtgagatgggagcaaccctaaccggaggatatatgggctgcctgcctggtgggctgggccatctcttctaccccttccttctttttttctttctccttttttctttttcttcctcatatatgttgttgttctgtcgtttctttaattggtaaggtgtcgccttgctcgcctaagcgcctaggcgtcgcctaggcgtccaggcggtggtccaacgccttgtctcgcgttaccgccttaagaactatggtagagacctctttgctgacaattgaattgaatgtttgcaaatgccattcaagttactaacacataccgataccgtaatgtgtttcacctttacaagcaaaataagcattcactttttcagacaattttggaggaagatgggaacttagcataattttattttggagggagaaaataactaaacaagatctcttatggcgctcatctgtgccaacaaaataaagtggatttcacatagaacattttcacgcaaatcagaaatgggtatttaaaaagtgaacataaatgacaaaagtaatcaaactgagctgaaagtgttctagcattaacgtatttgtcttcatgtacagcgagctactcaacttctttttataattaagagagctcctctctccatttccaaattgtaagtcatttctgttttgtcctaagtcaaactttgattaagtctatagaaaaatccacaaatatttacattatcaaacgaattaattacatgcaagaaatatattttgacactgaataaatttggcagtgtagttgtagatgttaattgtcaggacctgacaggcccaagggggctgcggccaggacctgtcagggcctaagggggctgcggcaaggagcaacatcaaggagcacaggtcaaaggataagaagattagttgagattatttagaagattagttgagattatctataaaggatatcagttagtagtttgttgagagttttaaggagacaaggatctctagcaagataggggcggtcagtcggcctatttatgtaatcaatggatgaaaaataaagtagacaagaattagaagggagaaaccctcctcttgctcggccgtgggcagaggcccccggacggcattcctgcacatcgacctcattctgcaatcccctcatctacgtgtgaacagtaccacaccgtctccgccagcagctccaatcccccaccgatctagcaactataacattaatacattttcctataaacttggtcaatgttagacaaatctatgtcatatcgaatgtttgaatgataattatgagtattaaatatatttcaactataaaactaattatacagatattcagacatttgatgtgacatgaactaaactttagtcaagggaaccaaacacaaagattaaagtcgaatctgcataagtgcatgagatttagaatactggatctaacgaatagcagcaagtgaaaaggccaccgaaatgtaatccccggcctacaagtccctagcaaacaagccgtaccttcccagacctaccctcacggagtcaaccagactaagccaaggcagaccgaaatcaagggacgctgcgccccaagggcgcgcgcgcacggcgcacatcttgtagggtttgcggaggggagagaaggttgcgtaccgaatccagcgatgaggcaggaggccgcgactacgggctccttaacgacaaagatcttgagcttctccatcaccgccatggctgccgcctctgcttccactactccgcttcgccttcgcgtaaccctcgcccgctgccgtcgctggagacgagagaggccagagggatacaagccagtgctctcctccgatctgtggacgtgggcccgtgtcttgagcggagagacttcgacgcccagcccgtctacgaccgtggtccagtgggccacgatccattttgtttgttgggctgaggcccgtaccgataatcccattaaatgatatggtcacggcatattcagagctgcagactggaatattcctcgcgcgcgcgcgaataatctacccggacgagcgaatctactgtcggtcgcagcgccgttttctcgctctcgcgctcgccttacctgggatgggatggcaccgcacgcacacgaccatccttctctcctctcttcacctaccgattctgcgcgcatagaagaggcactccttcatcgtcagctgcctttcgcatgtcggcatgcatcttgcccgacaccacgctggcccgtggggtagtcgccgcacgccgagcaccggcaggctgcgcagccgtcgaccatgattttgccaagaatcagaggaagttcagtaagttgcaaagccacaagacagataatttgatccgcaggcactgcaagggaaagaacagaacaggatggatatccttttaccttatgacttacgactcaattgctgcaacccttactggcttcatcacccttacaatgttcctcatgagttcaaaccccatgagtatcatgcctatgagataaaggaagctcagttgcagcttcccaagcaagttatagaccgctgcggtagcgtctacgcctgcatctgttcgcaccatgacggtgatgggtctcgcagaaatgagcgccccggtttctgatgaggatgcagcgtaagagatttgccccggaacaatttgccttcaagagaaataggaggtgtttagtcttcttaagcttacccgacgtgttctcgggctgggctgaccactcttcagactgtgaacaagcgaggaagggaaacatcaaaaagttcaatgaggcgaaataaaaaaagagaaccttggagaagacagccatgccaataacacagcacccaggtaagagagctgcatattatgttcaagaagtctacatattagtagttgaaaaagcagttgaacccacaattgaaaaggtctacatgttcagtatgagtaattcagttcgcaactcaacatcactgcttggaaaattcctagaagcaaatatcatggttgcttagttagtacaaagtattaagctaagtgtgtgccaagtcacatgcctcaatacttgaggcaatttgatttcaaatacgacttttggtaatctattggatcctatagttctgtttttctctgctagaccagttatcttcgaaagtatcatgttatgtcttcacaaattaaacagaaatctttccaattcgttatcctcagtcgctttggtcaaatcttgccgaagtgttcccgggtaaatatgctaacttacctggaaagtatcttggtcttcccctccactttaggaagattaaaaggatctccttgcaaccgctactggaaaaaataaacaacagactggccggttggaaaggcagactactctctaaagcaggcagagaaacattggttaaatcagtattaacagcccaaccgatttatcatcttacggtttttccagttcaaaaatggctgctaaagaaaattgataagctaagaagaggctttctttggaaaggaaacaaccctgaagcttgcagtgggggtcactgtttgatcaactggtctacaacatgtcagccaaagaacaaggggggactgggcattctgaacctagaacgcttcgcaagggctttaagaatcagatggttgtggatgcgttggaagaacagggataaggcgtggattggtttgcaatcgccatgcgacaaaatagatgaagaacttttcaatgcatccacggtggtcaacgttggtaatgggagaacagcaagtttttggaaatctagttggatccatggtcaggcgcctaagaatatagcaccaattctgttcaagaaagcaaggaagaagaacatctcagtttttcatgctcttagagccaatagctggattcagctatgtctgccatgcatacgagaagacgaaataaaagattttgtaaccctatggcaggctatcagtagcatgcacgaacttaataacttggaggattccatctcttggagatggacgactgatggtcagtacagcgcaagcagcgcatataacattcagttctcaacaaacttctgcacaatgaaaatctgttccatttggaaagcaaaaacggaacccaagtgtcgcttcttcgcttggactcttttacacaacagagtgttgacagcagagaaccttcagaaaaggggatggcctcacaatccttcttgttgtctctgtaattcgacctttgaaacgacggttcatctctgcaaggactgccccttcagcagggaggtgtgggacagaatcttgtcttgggcgaatctttcgtcctttaaggggatctatggctctgattcgttgtatgactggtggagaaatttgagaagtaggtgcaacaagccttcgagaagatcctttgatggccttatcatttatttttggtggagcatttggttagagaggaacaatagaatctttcacagtcagcttagatcagcggagcaggtcgcgctagtggtcaaagagttagttggttgtttccatggcctggctggctagtaggtccgcttagtatatttgttcaggagttcgcttctagtcttgtaagtcgtcttggtttcttgtaatttcctgttagttctactccttctaatatattggagcggcaagtcttttgcctctccctttcaaaaaaaaatgtcttcacaaatttagttggatcatcaatgatgctttcagataactacaatactagacctagtaatggagaacagttatcttaggccctgtttggaagcaacagtttataagaatccagtttcatctctagtttttagaaactggtttatggtgtttggaaccacctcaattttcataaactagttttagctaggagatgctagcttcttggtttttaagaaaccgagaatccaacttctataatctggagcataaaccggtatgtttggaaccatctcagttttcataaaccagttttttaaaaaaaaaaaaaactgggtgcttccaaacagggccggacttagttcactcaggaacttcagaagttgagtactagaaggttcaatcttcctccctagtttggtagacaaaagttgagtactataaggctcaaatttctcagaagcttgcaggcagccacagcttttgatcttaatatctttgtcggccagaaattttgggatttttttctcgaaaaacgcaggactgcgttttagatatatattaagaagagagagagaaaggtgggattttccaccactaacaacagttgtaagaaataagcaaataaatcgaacatataaatgtccttcctagtatttcagtggcacattttgctattatatcagatcagagcccatactttacttcgtcccatatttcatggtttgctcatagtcacagggttgaggcttgaggtaaacgtggtacgctacttgaaagaggtttttacactcggggtcaaaaatgaacccgtggatctgtgttagggtcattgaaaccgggtcaagggtcgaaggcatcatggtagacaaaatgaaccgttcgctagatttccacatgcatgagcatgtgataagcaagccacatactaaaacacttgagcaatgtggttttattataacttttggcaaccaattggattctctaattctatttttca

SEQ ID NO: 60119 - DNA, 6098 bp, Zea Mays
gtgcatttgatatcatcacttttgggctgaccctttccaagtaggaaatatgtgagaagaattgaatacctggtgcttatgatgctccataaatttgaactacagtggttgccagtaaaaacttatccagttgccacacaaaattgtcaacctgagatgcactctgtctcgtgactaatgtctttagggtaggaaaatgctattgcttaatcaaacttgatagcaagggattgtgaaggataaactcagtaaatctattgatattacaaaatacaatggtataaaaaggttagattcaagtaatgagaacaaactcaagttttctcttaagtcttaatcatggacaattttaggtgcgataaggattctcagaaacaaacataattacacactcggacaactagtaaaaagtaaacttgagctatttcttgtactatccaagtgaatgcatccacaaagcagagttcatatatatcatgtggcctccttaacacgttttctatatgcattggccaatttctacaggctatatggattttcaatatcaatttattattggtagagaccatggtttcaaaggcgtcgcctaggcgacgtctaggcatccaggcggccaaaaagtctaggcgtccccgtcgcctaaccaagagtcagcaagagaggcaagaggggagggggaagaagcctagcagagactttggggagcgggatcagcggcgcagaactcgggggagtgctgagctcgggggagcggcggtgcagagctcgggggagcggcgacgctgagactcgggggagcgccgagcttgggggagcaggagcaacgatgctgtgatgtggacgagcagcgatgctgtgacagacaggggcggcgacagtgagatgggagcaaccctaaccggaggatatatgggctgcctgcctggtgggctgggccatctcttctaccccttccttctttttttctttctccttttttctttttcttcctcatatatgttgttgttctgtcgtttctttaattggtaaggtgtcgccttgctcgcctaagcgcctaggcgtcgcctaggcgtccaggcggtggtccaacgccttgtctcgcgttaccgccttaagaactatggtagagacctctttgctgacaattgaattgaatgtttgcaaatgccattcaagttactaacacataccgataccgtaatgtgtttcacctttacaagcaaaataagcattcactttttcagacaattttggaggaagatgggaacttagcataattttattttggagggagaaaataactaaacaagatctcttatggcgctcatctgtgccaacaaaataaagtggatttcacatagaacattttcacgcaaatcagaaatgggtatttaaaaagtgaacataaatgacaaaagtaatcaaactgagctgaaagtgttctagcattaacgtatttgtcttcatgtacagcgagctactcaacttctttttataattaagagagctcctctctccatttccaaattgtaagtcatttctgttttgtcctaagtcaaactttgattaagtctatagaaaaatccacaaatatttacattatcaaacgaattaattacatgcaagaaatatattttgacactgaataaatttggcagtgtagttgtagatgttaattgtcaggacctgacaggcccaagggggctgcggccaggacctgtcagggcctaagggggctgcggcaaggagcaacatcaaggagcacaggtcaaaggataagaagattagttgagattatttagaagattagttgagattatctataaaggatatcagttagtagtttgttgagagttttaaggagacaaggatctctagcaagataggggcggtcagtcggcctatttatgtaatcaatggatgaaaaataaagtagacaagaattagaagggagaaaccctcctcttgctcggccgtgggcagaggcccccggacggcattcctgcacatcgacctcattctgcaatcccctcatctacgtgtgaacagtaccacaccgtctccgccagcagctccaatcccccaccgatctagcaactataacattaatacattttcctataaacttggtcaatgttagacaaatctatgtcatatcgaatgtttgaatgataattatgagtattaaatatatttcaactataaaactaattatacagatattcagacatttgatgtgacatgaactaaactttagtcaagggaaccaaacacaaagattaaagtcgaatctgcataagtgcatgagatttagaatactggatctaacgaatagcagcaagtgaaaaggccaccgaaatgtaatccccggcctacaagtccctagcaaacaagccgtaccttcccagacctaccctcacggagtcaaccagactaagccaaggcagaccgaaatcaagggacgctgcgccccaagggcgcgcgcgcacggcgcacatcttgtagggtttgcggaggggagagaaggttgcgtaccgaatccagcgatgaggcaggaggccgcgactacgggctccttaacgacaaagatcttgagcttctccatcaccgccatggctgccgcctctgcttccactactccgcttcgccttcgcgtaaccctcgcccgctgccgtcgctggagacgagagaggccagagggatacaagccagtgctctcctccgatctgtggacgtgggcccgtgtcttgagcggagagacttcgacgcccagcccgtctacgaccgtggtccagtgggccacgatccattttgtttgttgggctgaggcccgtaccgataatcccattaaatgatatggtcacggcatattcagagctgcagactggaatattcctcgcgcgcgcgcgaataatctacccggacgagcgaatctactgtcggtcgcagcgccgttttctcgctctcgcgctcgccttacctgggatgggatggcaccgcacgcacacgaccatccttctctcctctcttcacctaccgattctgcgcgcatagaagaggcactccttcatcgtcagctgcctttcgcatgtcggcatgcatcttgcccgacaccacgctggcccgtggggtagtcgccgcacgccgagcaccggcaggctgcgcagccgtcgaccatgattttgccaagactgtgaacaagcgaggaagggaaacatcaaaaagttcaatgaggcgaaataaaaaaagagaaccttggagaagacagccatgccaataacacagcacccaggtaagagagctgcatattatgttcaagaagtctacatattagtagttgaaaaagcagttgaacccacaattgaaaaggtctacatgttcagtatgagtaattcagttcgcaactcaacatcactgcttggaaaattcctagaagcaaatatcatggttgcttagttagtacaaagtattaagctaagtgtgtgccaagtcacatgcctcaatacttgaggcaatttgatttcaaatacgacttttggtaatctattggatcctatagttctgtttttctctgctagaccagttatcttcgaaagtatcatgttatgtcttcacaaattaaacagaaatctttccaattcgttatcctcagtcgctttggtcaaatcttgccgaagtgttcccgggtaaatatgctaacttacctggaaagtatcttggtcttcccctccactttaggaagattaaaaggatctccttgcaaccgctactggaaaaaataaacaacagactggccggttggaaaggcagactactctctaaagcaggcagagaaacattggttaaatcagtattaacagcccaaccgatttatcatcttacggtttttccagttcaaaaatggctgctaaagaaaattgataagctaagaagaggctttctttggaaaggaaacaaccctgaagcttgcagtgggggtcactgtttgatcaactggtctacaacatgtcagccaaagaacaaggggggactgggcattctgaacctagaacgcttcgcaagggctttaagaatcagatggttgtggatgcgttggaagaacagggataaggcgtggattggtttgcaatcgccatgcgacaaaatagatgaagaacttttcaatgcatccacggtggtcaacgttggtaatgggagaacagcaagtttttggaaatctagttggatccatggtcaggcgcctaagaatatagcaccaattctgttcaagaaagcaaggaagaagaacatctcagtttttcatgctcttagagccaatagctggattcagctatgtctgccatgcatacgagaagacgaaataaaagattttgtaaccctatggcaggctatcagtagcatgcacgaacttaataacttggaggattccatctcttggagatggacgactgatggtcagtacagcgcaagcagcgcatataacattcagttctcaacaaacttctgcacaatgaaaatctgttccatttggaaagcaaaaacggaacccaagtgtcgcttcttcgcttggactcttttacacaacagagtgttgacagcagagaaccttcagaaaaggggatggcctcacaatccttcttgttgtctctgtaattcgacctttgaaacgacggttcatctctgcaaggactgccccttcagcagggaggtgtgggacagaatcttgtcttgggcgaatctttcgtcctttaaggggatctatggctctgattcgttgtatgactggtggagaaatttgagaagtaggtgcaacaagccttcgagaagatcctttgatggccttatcatttatttttggtggagcatttggttagagaggaacaatagaatctttcacagtcagcttagatcagcggagcaggtcgcgctagtggtcaaagagttagttggttgtttccatggcctggctggctagtaggtccgcttagtatatttgttcaggagttcgcttctagtcttgtaagtcgtcttggtttcttgtaatttcctgttagttctactccttctaatatattggagcggcaagtcttttgcctctccctttcaaaaaaaaatgtcttcacaaatttagttggatcatcaatgatgctttcagataactacaatactagacctagtaatggagaacagttatcttaggccctgtttggaagcaacagtttataagaatccagtttcatctctagtttttagaaactggtttatggtgtttggaaccacctcaattttcataaactagttttagctaggagatgctagcttcttggtttttaagaaaccgagaatccaacttctataatctggagcataaaccggtatgtttggaaccatctcagttttcataaaccagttttttaaaaaaaaaaaaaactgggtgcttccaaacagggccggacttagttcactcaggaacttcagaagttgagtactagaaggttcaatcttcctccctagtttggtagacaaaagttgagtactataaggctcaaatttctcagaagcttgcaggcagccacagcttttgatcttaatatctttgtcggccagaaattttgggatttttttctcgaaaaacgcaggactgcgttttagatatatattaagaagagagagagaaaggtgggattttccaccactaacaacagttgtaagaaataagcaaataaatcgaacatataaatgtccttcctagtatttcagtggcacattttgctattatatcagatcagagcccatactttacttcgtcccatatttcatggtttgctcatagtcacagggttgaggcttgaggtaaacgtggtacgctacttgaaagaggtttttacactcggggtcaaaaatgaacccgtggatctgtgttagggtcattgaaaccgggtcaagggtcgaaggcatcatggtagacaaaatgaaccgttcgctagatttccacatgcatgagcatgtgataagcaagccacatactaaaacacttgagcaatgtggttttattataacttttggcaaccaattggattctctaattctatttttca

SEQ ID NO: 60120 - DNA, 6719 bp, Zea Mays
gtgcatttgatatcatcacttttgggctgaccctttccaagtaggaaatatgtgagaagaattgaatacctggtgcttatgatgctccataaatttgaactacagtggttgccagtaaaaacttatccagttgccacacaaaattgtcaacctgagatgcactctgtctcgtgactaatgtctttagggtaggaaaatgctattgcttaatcaaacttgatagcaagggattgtgaaggataaactcagtaaatctattgatattacaaaatacaatggtataaaaaggttagattcaagtaatgagaacaaactcaagttttctcttaagtcttaatcatggacaattttaggtgcgataaggattctcagaaacaaacataattacacactcggacaactagtaaaaagtaaacttgagctatttcttgtactatccaagtgaatgcatccacaaagcagagttcatatatatcatgtggcctccttaacacgttttctatatgcattggccaatttctacaggctatatggattttcaatatcaatttattattggtagagaccatggtttcaaaggcgtcgcctaggcgacgtctaggcatccaggcggccaaaaagtctaggcgtccccgtcgcctaaccaagagtcagcaagagaggcaagaggggagggggaagaagcctagcagagactttggggagcgggatcagcggcgcagaactcgggggagtgctgagctcgggggagcggcggtgcagagctcgggggagcggcgacgctgagactcgggggagcgccgagcttgggggagcaggagcaacgatgctgtgatgtggacgagcagcgatgctgtgacagacaggggcggcgacagtgagatgggagcaaccctaaccggaggatatatgggctgcctgcctggtgggctgggccatctcttctaccccttccttctttttttctttctccttttttctttttcttcctcatatatgttgttgttctgtcgtttctttaattggtaaggtgtcgccttgctcgcctaagcgcctaggcgtcgcctaggcgtccaggcggtggtccaacgccttgtctcgcgttaccgccttaagaactatggtagagacctctttgctgacaattgaattgaatgtttgcaaatgccattcaagttactaacacataccgataccgtaatgtgtttcacctttacaagcaaaataagcattcactttttcagacaattttggaggaagatgggaacttagcataattttattttggagggagaaaataactaaacaagatctcttatggcgctcatctgtgccaacaaaataaagtggatttcacatagaacattttcacgcaaatcagaaatgggtatttaaaaagtgaacataaatgacaaaagtaatcaaactgagctgaaagtgttctagcattaacgtatttgtcttcatgtacagcgagctactcaacttctttttataattaagagagctcctctctccatttccaaattgtaagtcatttctgttttgtcctaagtcaaactttgattaagtctatagaaaaatccacaaatatttacattatcaaacgaattaattacatgcaagaaatatattttgacactgaataaatttggcagtgtagttgtagatgttaattgtcaggacctgacaggcccaagggggctgcggccaggacctgtcagggcctaagggggctgcggcaaggagcaacatcaaggagcacaggtcaaaggataagaagattagttgagattatttagaagattagttgagattatctataaaggatatcagttagtagtttgttgagagttttaaggagacaaggatctctagcaagataggggcggtcagtcggcctatttatgtaatcaatggatgaaaaataaagtagacaagaattagaagggagaaaccctcctcttgctcggccgtgggcagaggcccccggacggcattcctgcacatcgacctcattctgcaatcccctcatctacgtgtgaacagtaccacaccgtctccgccagcagctccaatcccccaccgatctagcaactataacattaatacattttcctataaacttggtcaatgttagacaaatctatgtcatatcgaatgtttgaatgataattatgagtattaaatatatttcaactataaaactaattatacagatattcagacatttgatgtgacatgaactaaactttagtcaagggaaccaaacacaaagattaaagtcgaatctgcataagtgcatgagatttagaatactggatctaacgaatagcagcaagtgaaaaggccaccgaaatgtaatccccggcctacaagtccctagcaaacaagccgtaccttcccagacctaccctcacggagtcaaccagactaagccaaggcagaccgaaatcaagggacgctgcgccccaagggcgcgcgcgcacggcgcacatcttgtagggtttgcggaggggagagaaggttgcgtaccgaatccagcgatgaggcaggaggccgcgactacgggctccttaacgacaaagatcttgagcttctccatcaccgccatggctgccgcctctgcttccactactccgcttcgccttcgcgtaaccctcgcccgctgccgtcgctggagacgagagaggccagagggatacaagccagtgctctcctccgatctgtggacgtgggcccgtgtcttgagcggagagacttcgacgcccagcccgtctacgaccgtggtccagtgggccacgatccattttgtttgttgggctgaggcccgtaccgataatcccattaaatgatatggtcacggcatattcagagctgcagactggaatattcctcgcgcgcgcgcgaataatctacccggacgagcgaatctactgtcggtcgcagcgccgttttctcgctctcgcgctcgccttacctgggatgggatggcaccgcacgcacacgaccatccttctctcctctcttcacctaccgattctgcgcgcatagaagaggcactccttcatcgtcagctgcctttcgcatgtcggcatgcatcttgcccgacaccacgctggcccgtggggtagtcgccgcacgccgagcaccggcaggctgcgcagccgtcgaccatgattttgccaagcgttgtaaagcgccatgtaggaaagaagatgcccagcgacgcgacacgaaataagcagcaaagcttcgattccaaatctcggccgagtttcacatgtgttagcagatgctactctaaaatcatcatctcccatctcgactaccacaaggtctcaagaacagtgtacatgtatttggttctgcagaatcagaggaagttcagtaagttgcaaagccacaagacagataatttgatccgcaggcactgcaagggaaagaacagaacaggatggatatccttttaccttatgacttacgactcaattgctgcaacccttactggcttcatcacccttacaatgttcctcatgagttcaaaccccatgagtatcatgcctatgagataaaggaagctcagttgcagcttcccaagcaagttatagaccgctgcggtagcgtctacgcctgcatctgttcgcaccatgacggtgatgggtctcgcagaaatgagcgccccggtttctgatgaggatgcagcgtaagagatttgccccggaacaatttgccttcaagagaaataggaggtgtttagtcttcttaagcttacccgacgtgttctcgggctgggctgaccactcttcagactgtgaacaagcgaggaagggaaacatcaaaaagttcaatgaggcgaaataaaaaaagagaaccttggagaagacagccatgccaataacacagcacccaggtaagagagctgcatattatgttcaagaagtctacatattagtagttgaaaaagcagttgaacccacaattgaaaaggtctacatgttcagtatgagtaattcagttcgcaactcaacatcactgcttggaaaattcctagaagcaaatatcatggttgcttagttagtacaaagtattaagctaagtgtgtgccaagtcacatgcctcaatacttgaggcaatttgatttcaaatacgacttttggtaatctattggatcctatagttctgtttttctctgctagaccagttatcttcgaaagtatcatgttatgtcttcacaaattaaacagaaatctttccaattcgttatcctcagtcgctttggtcaaatcttgccgaagtgttcccgggtaaatatgctaacttacctggaaagtatcttggtcttcccctccactttaggaagattaaaaggatctccttgcaaccgctactggaaaaaataaacaacagactggccggttggaaaggcagactactctctaaagcaggcagagaaacattggttaaatcagtattaacagcccaaccgatttatcatcttacggtttttccagttcaaaaatggctgctaaagaaaattgataagctaagaagaggctttctttggaaaggaaacaaccctgaagcttgcagtgggggtcactgtttgatcaactggtctacaacatgtcagccaaagaacaaggggggactgggcattctgaacctagaacgcttcgcaagggctttaagaatcagatggttgtggatgcgttggaagaacagggataaggcgtggattggtttgcaatcgccatgcgacaaaatagatgaagaacttttcaatgcatccacggtggtcaacgttggtaatgggagaacagcaagtttttggaaatctagttggatccatggtcaggcgcctaagaatatagcaccaattctgttcaagaaagcaaggaagaagaacatctcagtttttcatgctcttagagccaatagctggattcagctatgtctgccatgcatacgagaagacgaaataaaagattttgtaaccctatggcaggctatcagtagcatgcacgaacttaataacttggaggattccatctcttggagatggacgactgatggtcagtacagcgcaagcagcgcatataacattcagttctcaacaaacttctgcacaatgaaaatctgttccatttggaaagcaaaaacggaacccaagtgtcgcttcttcgcttggactcttttacacaacagagtgttgacagcagagaaccttcagaaaaggggatggcctcacaatccttcttgttgtctctgtaattcgacctttgaaacgacggttcatctctgcaaggactgccccttcagcagggaggtgtgggacagaatcttgtcttgggcgaatctttcgtcctttaaggggatctatggctctgattcgttgtatgactggtggagaaatttgagaagtaggtgcaacaagccttcgagaagatcctttgatggccttatcatttatttttggtggagcatttggttagagaggaacaatagaatctttcacagtcagcttagatcagcggagcaggtcgcgctagtggtcaaagagttagttggttgtttccatggcctggctggctagtaggtccgcttagtatatttgttcaggagttcgcttctagtcttgtaagtcgtcttggtttcttgtaatttcctgttagttctactccttctaatatattggagcggcaagtcttttgcctctccctttcaaaaaaaaatgtcttcacaaatttagttggatcatcaatgatgctttcagataactacaatactagacctagtaatggagaacagttatcttaggccctgtttggaagcaacagtttataagaatccagtttcatctctagtttttagaaactggtttatggtgtttggaaccacctcaattttcataaactagttttagctaggagatgctagcttcttggtttttaagaaaccgagaatccaacttctataatctggagcataaaccggtatgtttggaaccatctcagttttcataaaccagttttttaaaaaaaaaaaaaactgggtgcttccaaacagggccggacttagttcactcaggaacttcagaagttgagtactagaaggttcaatcttcctccctagtttggtagacaaaagttgagtactataaggctcaaatttctcagaagcttgcaggcagccacagcttttgatcttaatatctttgtcggccagaaattttgggatttttttctcgaaaaacgcaggactgcgttttagatatatattaagaagagagagagaaaggtgggattttccaccactaacaacagttgtaagaaataagcaaataaatcgaacatataaatgtccttcctagtatttcagtggcacattttgctattatatcagatcagagcccatactttacttcgtcccatatttcatggtttgctcatagtcacagggttgaggcttgaggtaaacgtggtacgctacttgaaagaggtttttacactcggggtcaaaaatgaacccgtggatctgtgttagggtcattgaaaccgggtcaagggtcgaaggcatcatggtagacaaaatgaaccgttcgctagatttccacatgcatgagcatgtgataagcaagccacatactaaaacacttgagcaatgtggttttattataacttttggcaaccaattggattctctaattctatttttca

SEQ ID NO: 60121 - DNA, 1359 bp, Zea Mays
gttttaaggagacaaggatctctagcaagataggggcggtcagtcggcctatttatgtaatcaatggatgaaaaataaagtagacaagaattagaagggagaaaccctcctcttgctcggccgtgggcagaggcccccggacggcattcctgcacatcgacctcattctgcaatcccctcatctacgtgtgaacagtaccacaccgtctccgccagcagctccaatcccccaccgatctagcaactataacattaatacattttcctataaacttggtcaatgttagacaaatctatgtcatatcgaatgtttgaatgataattatgagtattaaatatatttcaactataaaactaattatacagatattcagacatttgatgtgacatgaactaaactttagtcaagggaaccaaacacaaagattaaagtcgaatctgcataagtgcatgagatttagaatactggatctaacgaatagcagcaagtgaaaaggccaccgaaatgtaatccccggcctacaagtccctagcaaacaagccgtaccttcccagacctaccctcacggagtcaaccagactaagccaaggcagaccgaaatcaagggacgctgcgccccaagggcgcgcgcgcacggcgcacatcttgtagggtttgcggaggggagagaaggttgcgtaccgaatccagcgatgaggcaggaggccgcgactacgggctccttaacgacaaagatcttgagcttctccatcaccgccatggctgccgcctctgcttccactactccgcttcgccttcgcgtaaccctcgcccgctgccgtcgctggagacgagagaggccagagggatacaagccagtgctctcctccgatctgtggacgtgggcccgtgtcttgagcggagagacttcgacgcccagcccgtctacgaccgtggtccagtgggccacgatccattttgtttgttgggctgaggcccgtaccgataatcccattaaatgatatggtcacggcatattcagagctgcagactggaatattcctcgcgcgcgcgcgaataatctacccggacgagcgaatctactgtcggtcgcagcgccgttttctcgctctcgcgctcgccttacctgggatgggatggcaccgcacgcacacgaccatccttctctcctctcttcacctaccgattctgcgcgcatagaagaggcactccttcatcgtcagctgcctttcgcatgtcggcatgcatcttgcccgacaccacgctggcccgtggggtagtcgccgcacgccgagcaccggcaggctgcgcagccgtcgaccatgattttgccaagggtggtaaccagcgttttctga

SEQ ID NO: 60122 - DNA, 4883 bp, Zea Mays
caaggatctctagcaagataggggcggtcagtcggcctatttatgtaatcaatggatgaaaaataaagtagacaagaattagaagggagaaaccctcctcttgctcggccgtgggcagaggcccccggacggcattcctgcacatcgacctcattctgcaatcccctcatctacgtgtgaacagtaccacaccgtctccgccagcagctccaatcccccaccgatctagcaactataacattaatacattttcctataaacttggtcaatgttagacaaatctatgtcatatcgaatgtttgaatgataattatgagtattaaatatatttcaactataaaactaattatacagatattcagacatttgatgtgacatgaactaaactttagtcaagggaaccaaacacaaagattaaagtcgaatctgcataagtgcatgagatttagaatactggatctaacgaatagcagcaagtgaaaaggccaccgaaatgtaatccccggcctacaagtccctagcaaacaagccgtaccttcccagacctaccctcacggagtcaaccagactaagccaaggcagaccgaaatcaagggacgctgcgccccaagggcgcgcgcgcacggcgcacatcttgtagggtttgcggaggggagagaaggttgcgtaccgaatccagcgatgaggcaggaggccgcgactacgggctccttaacgacaaagatcttgagcttctccatcaccgccatggctgccgcctctgcttccactactccgcttcgccttcgcgtaaccctcgcccgctgccgtcgctggagacgagagaggccagagggatacaagccagtgctctcctccgatctgtggacgtgggcccgtgtcttgagcggagagacttcgacgcccagcccgtctacgaccgtggtccagtgggccacgatccattttgtttgttgggctgaggcccgtaccgataatcccattaaatgatatggtcacggcatattcagagctgcagactggaatattcctcgcgcgcgcgcgaataatctacccggacgagcgaatctactgtcggtcgcagcgccgttttctcgctctcgcgctcgccttacctgggatgggatggcaccgcacgcacacgaccatccttctctcctctcttcacctaccgattctgcgcgcatagaagaggcactccttcatcgtcagctgcctttcgcatgtcggcatgcatcttgcccgacaccacgctggcccgtggggtagtcgccgcacgccgagcaccggcaggctgcgcagccgtcgaccatgattttgccaagcgttgtaaagcgccatgtaggaaagaagatgcccagcgacgcgacacgaaataagcagcaaagcttcgattccaaatctcggtatggtacagatactcttataggagcaggccgagtttcacatgtgttagcagatgctactctaaaatcatcatctcccatctcgactaccacaaggtctcaagaacagtgtacatgtatttggttctgcagaatcagaggaagttcagtaagttgcaaagccacaagacagataatttgatccgcaggcactgcaagggaaagaacagaacaggatggatatccttttaccttatgacttacgactcaattgctgcaacccttactggcttcatcacccttacaatgttcctcatgagttcaaaccccatgagtatcatgcctatgagataaaggaagctcagttgcagcttcccaagcaagttatagaccgctgcggtagcgtctacgcctgcatctgttcgcaccatgacggtgatgggtctcgcagaaatgagcgccccggtttctgatgaggatgcagcgtaagagatttgccccggaacaatttgccttcaagagaaataggaggtgtttagtcttcttaagcttacccgacgtgttctcgggctgggctgaccactcttcagactgtgaacaagcgaggaagggaaacatcaaaaagttcaatgaggcgaaataaaaaaagagaaccttggagaagacagccatgccaataacacagcacccaggtaagagagctgcatattatgttcaagaagtctacatattagtagttgaaaaagcagttgaacccacaattgaaaaggtctacatgttcagtatgagtaattcagttcgcaactcaacatcactgcttggaaaattcctagaagcaaatatcatggttgcttagttagtacaaagtattaagctaagtgtgtgccaagtcacatgcctcaatacttgaggcaatttgatttcaaatacgacttttggtaatctattggatcctatagttctgtttttctctgctagaccagttatcttcgaaagtatcatgttatgtcttcacaaattaaacagaaatctttccaattcgttatcctcagtcgctttggtcaaatcttgccgaagtgttcccgggtaaatatgctaacttacctggaaagtatcttggtcttcccctccactttaggaagattaaaaggatctccttgcaaccgctactggaaaaaataaacaacagactggccggttggaaaggcagactactctctaaagcaggcagagaaacattggttaaatcagtattaacagcccaaccgatttatcatcttacggtttttccagttcaaaaatggctgctaaagaaaattgataagctaagaagaggctttctttggaaaggaaacaaccctgaagcttgcagtgggggtcactgtttgatcaactggtctacaacatgtcagccaaagaacaaggggggactgggcattctgaacctagaacgcttcgcaagggctttaagaatcagatggttgtggatgcgttggaagaacagggataaggcgtggattggtttgcaatcgccatgcgacaaaatagatgaagaacttttcaatgcatccacggtggtcaacgttggtaatgggagaacagcaagtttttggaaatctagttggatccatggtcaggcgcctaagaatatagcaccaattctgttcaagaaagcaaggaagaagaacatctcagtttttcatgctcttagagccaatagctggattcagctatgtctgccatgcatacgagaagacgaaataaaagattttgtaaccctatggcaggctatcagtagcatgcacgaacttaataacttggaggattccatctcttggagatggacgactgatggtcagtacagcgcaagcagcgcatataacattcagttctcaacaaacttctgcacaatgaaaatctgttccatttggaaagcaaaaacggaacccaagtgtcgcttcttcgcttggactcttttacacaacagagtgttgacagcagagaaccttcagaaaaggggatggcctcacaatccttcttgttgtctctgtaattcgacctttgaaacgacggttcatctctgcaaggactgccccttcagcagggaggtgtgggacagaatcttgtcttgggcgaatctttcgtcctttaaggggatctatggctctgattcgttgtatgactggtggagaaatttgagaagtaggtgcaacaagccttcgagaagatcctttgatggccttatcatttatttttggtggagcatttggttagagaggaacaatagaatctttcacagtcagcttagatcagcggagcaggtcgcgctagtggtcaaagagttagttggttgtttccatggcctggctggctagtaggtccgcttagtatatttgttcaggagttcgcttctagtcttgtaagtcgtcttggtttcttgtaatttcctgttagttctactccttctaatatattggagcggcaagtcttttgcctctccctttcaaaaaaaaatgtcttcacaaatttagttggatcatcaatgatgctttcagataactacaatactagacctagtaatggagaacagttatcttaggccctgtttggaagcaacagtttataagaatccagtttcatctctagtttttagaaactggtttatggtgtttggaaccacctcaattttcataaactagttttagctaggagatgctagcttcttggtttttaagaaaccgagaatccaacttctataatctggagcataaaccggtatgtttggaaccatctcagttttcataaaccagttttttaaaaaaaaaaaaaactgggtgcttccaaacagggccggacttagttcactcaggaacttcagaagttgagtactagaaggttcaatcttcctccctagtttggtagacaaaagttgagtactataaggctcaaatttctcagaagcttgcaggcagccacagcttttgatcttaatatctttgtcggccagaaattttgggatttttttctcgaaaaacgcaggactgcgttttagatatatattaagaagagagagagaaaggtgggattttccaccactaacaacagttgtaagaaataagcaaataaatcgaacatataaatgtccttcctagtatttcagtggcacattttgctattatatcagatcagagcccatactttacttcgtcccatatttcatggtttgctcatagtcacagggttgaggcttgaggtaaacgtggtacgctacttgaaagaggtttttacactcggggtcaaaaatgaacccgtggatctgtgttagggtcattgaaaccgggtcaagggtcgaaggcatcatggtagacaaaatgaaccgttcgctagatttccacatgcatgagcatgtgataagcaagccacatactaaaacacttgagcaatgtggttttattataacttttggcaaccaattggattctctaattctatttttca

SEQ ID NO: 60123 - DNA, 1719 bp, Zea Mays
gggagaaaccctcctcttgctcggccgtgggcagaggcccccggacggcattcctgcacatcgacctcattctgcaatcccctcatctacgtgtgaacagtaccacaccgtctccgccagcagctccaatcccccaccgatctagcaactataacattaatacattttcctataaacttggtcaatgttagacaaatctatgtcatatcgaatgtttgaatgataattatgagtattaaatatatttcaactataaaactaattatacagatattcagacatttgatgtgacatgaactaaactttagtcaagggaaccaaacacaaagattaaagtcgaatctgcataagtgcatgagatttagaatactggatctaacgaatagcagcaagtgaaaaggccaccgaaatgtaatccccggcctacaagtccctagcaaacaagccgtaccttcccagacctaccctcacggagtcaaccagactaagccaaggcagaccgaaatcaagggacgctgcgccccaagggcgcgcgcgcacggcgcacatcttgtagggtttgcggaggggagagaaggttgcgtaccgaatccagcgatgaggcaggaggccgcgactacgggctccttaacgacaaagatcttgagcttctccatcaccgccatggctgccgcctctgcttccactactccgcttcgccttcgcgtaaccctcgcccgctgccgtcgctggagacgagagaggccagagggatacaagccagtgctctcctccgatctgtggacgtgggcccgtgtcttgagcggagagacttcgacgcccagcccgtctacgaccgtggtccagtgggccacgatccattttgtttgttgggctgaggcccgtaccgataatcccattaaatgatatggtcacggcatattcagagctgcagactggaatattcctcgcgcgcgcgcgaataatctacccggacgagcgaatctactgtcggtcgcagcgccgttttctcgctctcgcgctcgccttacctgggatgggatggcaccgcacgcacacgaccatccttctctcctctcttcacctaccgattctgcgcgcatagaagaggcactccttcatcgtcagctgcctttcgcatgtcggcatgcatcttgcccgacaccacgctggcccgtggggtagtcgccgcacgccgagcaccggcaggctgcgcagccgtcgaccatgattttgccaagcgttgtaaagcgccatgtaggaaagaagatgcccagcgacgcgacacgaaataagcagcaaagcttcgattccaaatctcgaatcagaggaagttcagtaagttgcaaagccacaagacagataatttgatccgcaggcactgcaagggaaagaacagaacaggatggatatccttttaccttatgacttacgactcaattgctgcaacccttactggcttcatcacccttacaatgttcctcatgagttcaaaccccatgagtatcatgcctatgagataaaggaagctcagttgcagcttcccaagcaagttatagaccgctgcggtagcgtctacgcctgcatctgttcgcaccatgacggtgatgggtctcgcagaaatgagcgccccggtttctgatgaggatgcagcgtaagagatttgccccggaacaatttgccttcaagagaaataggaggtgtttagtcttcttaagc

SEQ ID NO: 60124 - DNA, 825 bp, Zea Mays
aaggaacaattttgggcaaccaaacttcctgtttaccattttaatttgagtcgtatgattatctgtatctgtttcaaaacatagaaacgaaaacgtaatgaaggcacgaagagctcgacacctgctgaaacaccagcagaagccacgtgcaacatgctgaaacggaagggattgatccagaagcgggaaagaaaaaacgaaaacgtaatgaaggcacgaagagctcgacacctgctgaaacaccagcagaagccacgtgcaacatgctgaaacggaagggacttggttcaaagatcaatgtgggagctgttgacgaattgtacaagactaaagatgaagttggcagcgcaaacaatgaagaagagatggagttcgacgcactgtttgggccggacaatgctgccggtgagacggtcgatgacggttacaattacaactatgggggatacgacgacgatggcgcagaaggctacaatggccttgatgacgatttcgatttctaggatgtaggagtagggcatttgcagaacggcaacgctgaccagcacgggcaagattcttcacgtgcacattatatatagttttttttggttaagtttcgacgattattatggagctcgattgggtagtcattgtatatttatgtttgaaactaggttctgcctggttgtagttgtaacggactaataagggcccgtttggtacagcttcagctcctgattctaagcgaggatctggaggagccgtgccaaacggatattttttaaactgattctcgtgtggagccgaaagattgagagtcgtttttgtgaagaaaggtgggat

SEQ ID NO: 60125 - DNA, 1962 bp, Zea Mays
gaaacaccagcagaagccacgtgcaacatgctgaaacggaagggacttggttcaaagatcaatgtgggagctgttgacgaattgtacaagggttacagaggagagagaaggttggtgctctgatcctcatgtccccccgtgcgctgggtttgttgaaataatggctccagttttctccagagatgcgtggagatgtgtctggcatatgtactttatttaaatatatttctgctagattctatcccttctattttctaataactatagagaaacatgactgagaagggtagacctgttgcagtggtgagaactgagtcaggggagggcttactcggtttatcccttccgcaccctactcatgtgggagtctcctgcactggatcttttctttttatagacatgactgagtgatgatattatttgttccatgcctttttcgtcatcagtgttggtcaatgtaaaaactctgagtgtttatatcgtttcttgtctttttcaggacaagcctcagccgccacctgagggccgtcttcctgatgccaccaagggttctgaccacctgaggcaagtctttggcaagcagatgggtttgagtgatcaggacatcgttgccctctctggtggccacaccttgggaaggtgccacaaagagcggtctggttttgagggggcctggactacgaaccctttggtctttgacaactcttacttcaaggaacttctgagtggtgacaaggagggccttcttcagctcccaagtgacaaagccctgctgagcgaccctgtcttccgccctcttgtggagaaatatgctgcagatgagaaggcattctttgatgactacaaagaggcccacctcaagctctccgaactggggtatgctgatgcttaaatggcccatatcctggagcgggatacaaactgctgcctcatgctctctctcatgagacaaggggggcaggttgttgtgcttgcaagtatctgttgcagatgttgttcatgcctgtaacgtaccacaacatactgttgtgtttgatggtattatagtgctatgctggacatctcgcagtcaattcgttttgatgatgatgtggaggatggaaaaagtcatgaactcaaagtgtactctctggaccgtataagagctgttacaattaattttagtgactctaacaagcttggagaaggaggatttggtcctgtctatatgggaactttacctgggggagaagtagctgtgaagaggctttgtaggaattcaggtcaaggccttgaagaattcaagaatgaggtcatacttattgcaaagttctagcaccgcaatcttgtaagattactagggtgctgcatacatagggaagagaagatccaggtgtacgagtacatgcctagcaaaagtctagatgcattcctcttcaatcctgaaaagcaacggcttttagactgaagaaacagtttgatataatcgaaggcattgctagagggctgctatatctccaccgggattcgaggctgcgagttgttcaccgtgatctcaaggccagcaacattctcctggacgcggacatgaaacccaagatatcagattttggaatggcaaggatgtttggaggggaccaaaaccaattcaacacgaatcaggtctggctacatgtctactgaatacgcaatggaaggtattttctccgtcaagtctgacgtctatggcttcggagtcctgatcttaagcttccactgtcacgaggactccttgaacatcgctggatatgtaaacactggtggttactaagataattagagacaagggggcaggttgatgtgcttgcaagtatctgttgcagatgttgttcatgcccgatgctgatgacccttttttcatactgttgtgtttggatggtgtaccaccagtgttttacaacagtttggcttttggaattgctactgctaaaacttcgttcctct

SEQ ID NO: 60126 - DNA, 1532 bp, Zea Mays
gacgaattgtacaagggttacagaggagagagaaggttggtgctctgatcctcatgtccccccgtgcgctgggacaagcctcagccgccacctgagggccgtcttcctgatgccaccaagggttctgaccacctgaggcaagtctttggcaagcagatgggtttgagtgatcaggacatcgttgccctctctggtggccacaccttgggaaggtgccacaaagagcggtctggttttgagggggcctggactacgaaccctttggtctttgacaactcttacttcaaggaacttctgagtggtgacaaggagggccttcttcagctcccaagtgacaaagccctgctgagcgaccctgtcttccgccctcttgtggagaaatatgctgcagatgagaaggcattctttgatgactacaaagaggcccacctcaagctctccgaactggggtatgctgatgcttaaatggcccatatcctggagcgggatacaaactgctgcctcatgctctctctcatgagacaaggggggcaggttgttgtgcttgcaagtatctgttgcagatgttgttcatgcctgtaacgtaccacaacatactgttgtgtttgatggtattatagtgctatgctggacatctcgcagtcaattcgttttgatgatgatgtggaggatggaaaaagtcatgaactcaaagtgtactctctggaccgtataagagctgttacaattaattttagtgactctaacaagcttggagaaggaggatttggtcctgtctatatgggaactttacctgggggagaagtagctgtgaagaggctttgtaggaattcaggtcaaggccttgaagaattcaagaatgaggtcatacttattgcaaagttctagcaccgcaatcttgtaagattactagggtgctgcatacatagggaagagaagatccaggtgtacgagtacatgcctagcaaaagtctagatgcattcctcttcaatcctgaaaagcaacggcttttagactgaagaaacagtttgatataatcgaaggcattgctagagggctgctatatctccaccgggattcgaggctgcgagttgttcaccgtgatctcaaggccagcaacattctcctggacgcggacatgaaacccaagatatcagattttggaatggcaaggatgtttggaggggaccaaaaccaattcaacacgaatcagtggctacatgtctactgaatacgcaatggaaggtattttctccgtcaagtctgacgtctatggcttcggagtcctgatcttaagcttccactgtcacgaggactccttgaacatcgctggatatgtaaacactggtggttactaagataattagagacaagggggcaggttgatgtgcttgcaagtatctgttgcagatgttgttcatgcccgatgctgatgacccttttttcatactgttgtgtttggatggtgtaccaccagtgttttacaacagtttggcttttggaattgctactgctaaaacttcgttcctct

SEQ ID NO: 60127 - DNA, 2462 bp, Zea Mays
aggatccatcggttcgtgagagcgttgctccgtgtagctacaattaaggaaccgtcgccgccgcgcgcccctgccctcgccgccgcccggtctcgcctcgacgcctcccatagcgatctgcttactcttttaagccggtggccggagctccggcggccctctccctcaccggattcggcgccctcttcagaggattcggcgccctcttcagagccctcgctaacctgctcgaccgctccccaccgcccgcggtcatctcccacctcgcgcgaccgccgtcctctcttcacctgttggtcgcccctgtcctcgcgacgaagacgccgccgccaagctatcctctctatctctctatctatctatctatctcatcagattgatatcagctgatcatccctggctgtgtagttccatctgcaatggtttactgcactcattgcgctgattactgcccctccataaaggatcctgacaaaggatacatatgttgtggtacatgtgggaaggttcttgaccaggaggtatacactgatgagcctacttttgttaaggataacaaagggcagagtcgcttagctggaagtattcttgaaagcattgagtctggatattcaatgtctcgtcaaagaaccttagacaaagggagggatgagattaggcagattgtcaataacttacatatcagcggtggagaaactatcgttagcaaggcatttcgcttctacgagctagctctcgaccgtaattttaccagggggcgtagaacaacacatgttgcagctgcttgcctttacattgcctgcaggcaaagtaagaaggcttatcttcttatcgatttctctgaccatctccaaataagtgtctacgtcctaggtgctgtttttcttcagctctgccaagttttgcaacttgcagaacatccagttgttcagaaacttgtagatcccagtcttttcatccatcgttttacaaaacttttgctgggaagaagaaataatgatgtctcggacacagctttacgcattgtagctagcatgaagagagattggatgcagactgggaggaagccaagcggattatgtggtgcagcattatacattgctgcactctctcatgggtgtaattacaccaaggcagatattgtctctgttgtgcatgtgtgtgaggccactctaacgaagcgattgatagagttcgaaaatacagattctggcagcttaacactgatgaatctaatgaagagcctgtttcaaaacattcgcccaagtctggagaaattctctgcaaacacaaggataaaggttttgagcattttgctcatggactttgtgaaaaatgctacaataagttcactaaactgtcgggtggactagaaggtggttctgaccctccagcattccaacgagctgaaaagaaaagacttgaagctgctaaaagggctgaagaagctgcagcagctaaggaggcagcgctggaagaatctctttgcgacacacagaattctgaggttgagagtgccatgactcctagaaagggtttaagtggagataaatcttcgaaaatgggatctgagggactcataaatgactctatgccacccaaggatcctgaagagggaggtgaaaattgtgaaggcaatgcagatccagaaagcctttctgacattgacgatgcagaggttgatgggtaccttcacaatgaggaagaaacacaatataaaaagattatctgggaggaaatgaacaaagagtaccttgaggaacaagcagccaaggaagctttggcagctgaattggcagctagagggattgatccagaagcgggaaagaaaaaacgaaaacgtaatgaaggcacgaagagctcgacacctgctgaaacaccagcagaagccacgtgcaacatgctgaaacggaagggacttggttcaaagatcaatgtgggagctgttgacgaattgtacaagactaaagatgaagttggcagcgcaaacaatgaagaagagatggagttcgacgcactgtttgggccggacaatgctgccggtgagacggtcgatgacggttacaattacaactatgggggatacgacgacgatggcgcagaaggctacaatggccttgatgacgatttcgatttctaggatgtaggagtagggcatttgcagaacggcaacgctgaccagcacgggcaagattcttcacgtgcacattatatatagttttttttggttaagtttcgacgattattatggagctcgattgggtagtcattgtatatttatgtttgaaactaggttctgcctggttgtagttgtaacggactaataagggcccgtttggtacagcttcagctcctgattctaagcgaggatctggaggagccgtgccaaacggatattttttaaactgattctcgtgtggagccgaaagattgagagtcgtttttgtgaagaaaggtgggat

SEQ ID NO: 60128 - DNA, 689 bp, Zea Mays
gcctcgctgctgctgcttataaatattccccgctggaaaagcccccagccatcatcagtagctagctgttcgaagctttcagccgatcgagcaccatcgtcacagtcagtagtagccaagcatatttctttctccgagtgatttgcgctgagcgatcagttcatccagagcgagcggagctgagctgagctgagcgagcttgcgttgcttgagagaccctgctgccatggcttcccaccaggacaaggctagctaccaggccggcgagaccaaggcccgcaccgaggagaagaccgggcaggcggtgggggcgaccaaggacacggcgcagcacgccaaggaccgggcggcggacgcggcggggcacgcggcgggcaagggccaggacgccaaggaggccaccaagcagaaggcgtccgacaccggcagctacctgggcaagaagaccgacgaggccaagcacaaggccggcgagacgacggaggccaccaagcagaaggccggcgagacgacggaggccgccaagcagaaggcagccgacgccatggaggccgccaagcagaaggccgccgaggccgggcagtacgccaaggacaccgctgtctccggcaaggacaagtccggcggcgtcatccagcagcgtgcaggtcgctcatgacagctttccgattctctgcttgcgtgcttgg

SEQ ID NO: 60129 - DNA, 949 bp, Zea Mays
atcatcagtagctagctgttcgaagctttcagccgatcgagcaccatcgtcacagtcagtagtagccaagcatatttctttctccgagtgatttgcgctgagcgatcagttcatccagagcgagcggagctgagctgagctgagcgagcttgcgttgcttgagagaccctgctgccatggcttcccaccaggacaaggctagctaccaggccggcgagaccaaggcccgcaccgaggagaagaccgggcaggcggtgggggcgaccaaggacacggcgcagcacgccaaggaccgggccaccaagcagaaggccggcgagacgacggaggccgccaagcagaaggcagccgacgccatggaggccgccaagcagaaggccgccgaggccgggcagtacgccaaggacaccgctgtctccggcaaggacaagtccggcggcgtcatccagcaggccactgagcaggtgaagagcgcggcggcgggcgccaaggacgcggtgatgagcacgctggggatgggcggggacgacaagcagggcgacgccaacaccaacaaggactcctctaccatcaccagggatcactagacgcgtgtatgcacacgcacttggtccgatcctgtcgtccgtgaccctgtttgcttgttcgcgagtccagtatgggtttgtgcacgttttcagtgtcatggtttccttctctacgaaatttggtgttgtaagtttgattcgcaggtacgttgctgtgttttttctgcgtcatcatgtctgtaaacgagtcgggcgggtttgagtgtcctttgttgtgataataaagttggtaaatcgtaattaatatatagcatgcgactgtcttgctatggcctagtatgtgtgttttgtagttttcatcagtgtgtgttgtgttagatataatcttaactttcgaagacaagtacgggacccaaaaaaaa

SEQ ID NO: 60130 - DNA, 799 bp, Zea Mays
atcatcagtagctagctgttcgaagctttcagccgatcgagcaccatcgtcacagtcagtagtagccaagcatatttctttctccgagtgatttgcgctgagcgatcagttcatccagagcgagcggagctgagctgagctgagcgagcttgcgttgcttgagagaccctgctgccatggcttcccaccaggacaaggctagctaccaggccggcgagaccaaggcccgcaccgaggccgggcagtacgccaaggacaccgctgtctccggcaaggacaagtccggcggcgtcatccagcaggccactgagcaggtgaagagcgcggcggcgggcgccaaggacgcggtgatgagcacgctggggatgggcggggacgacaagcagggcgacgccaacaccaacaaggactcctctaccatcaccagggatcactagacgcgtgtatgcacacgcacttggtccgatcctgtcgtccgtgaccctgtttgcttgttcgcgagtccagtatgggtttgtgcacgttttcagtgtcatggtttccttctctacgaaatttggtgttgtaagtttgattcgcaggtacgttgctgtgttttttctgcgtcatcatgtctgtaaacgagtcgggcgggtttgagtgtcctttgttgtgataataaagttggtaaatcgtaattaatatatagcatgcgactgtcttgctatggcctagtatgtgtgttttgtagttttcatcagtgtgtgttgtgttagatataatcttaactttcgaagacaagtacgggacccaaaaaaaa

SEQ ID NO: 60131 - DNA, 979 bp, Zea Mays
atcatcagtagctagctgttcgaagctttcagccgatcgagcaccatcgtcacagtcagtagtagccaagcatatttctttctccgagtgatttgcgctgagcgatcagttcatccagagcgagcggagctgagctgagctgagcgagcttgcgttgcttgagagaccctgctgccatggcttcccaccaggacaaggctagctaccaggccggcgagaccaaggcccgcaccgaggaggccaccaagcagaaggcgtccgacaccggcagctacctgggcaagaagaccgacgaggccaagcacaaggccggcgagacgacggaggccaccaagcagaaggccggcgagacgacggaggccgccaagcagaaggcagccgacgccatggaggccgccaagcagaaggccgccgaggccgggcagtacgccaaggacaccgctgtctccggcaaggacaagtccggcggcgtcatccagcaggccactgagcaggtgaagagcgcggcggcgggcgccaaggacgcggtgatgagcacgctggggatgggcggggacgacaagcagggcgacgccaacaccaacaaggactcctctaccatcaccagggatcactagacgcgtgtatgcacacgcacttggtccgatcctgtcgtccgtgaccctgtttgcttgttcgcgagtccagtatgggtttgtgcacgttttcagtgtcatggtttccttctctacgaaatttggtgttgtaagtttgattcgcaggtacgttgctgtgttttttctgcgtcatcatgtctgtaaacgagtcgggcgggtttgagtgtcctttgttgtgataataaagttggtaaatcgtaattaatatatagcatgcgactgtcttgctatggcctagtatgtgtgttttgtagttttcatcagtgtgtgttgtgttagatataatcttaactttcgaagacaagtacgggacccaaaaaaaa

SEQ ID NO: 60132 - DNA, 760 bp, Zea Mays
atcatcagtagctagctgttcgaagctttcagccgatcgagcaccatcgtcacagtcagtagtagccaagcatatttctttctccgagtgatttgcgctgagcgatcagttcatccagagcgagcggagctgagctgagctgagcgagcttgcgttgcttgagagaccctgctgccatggcttcccaccaggacaaggctagctaccaggccggcgagaccaaggcccgcaccgaggacaagtccggcggcgtcatccagcaggccactgagcaggtgaagagcgcggcggcgggcgccaaggacgcggtgatgagcacgctggggatgggcggggacgacaagcagggcgacgccaacaccaacaaggactcctctaccatcaccagggatcactagacgcgtgtatgcacacgcacttggtccgatcctgtcgtccgtgaccctgtttgcttgttcgcgagtccagtatgggtttgtgcacgttttcagtgtcatggtttccttctctacgaaatttggtgttgtaagtttgattcgcaggtacgttgctgtgttttttctgcgtcatcatgtctgtaaacgagtcgggcgggtttgagtgtcctttgttgtgataataaagttggtaaatcgtaattaatatatagcatgcgactgtcttgctatggcctagtatgtgtgttttgtagttttcatcagtgtgtgttgtgttagatataatcttaactttcgaagacaagtacgggacccaaaaaaaa

SEQ ID NO: 60133 - DNA, 1834 bp, Zea Mays
ctgggccacctcgcagtgaaatacgcctcacaagccacgccagcgacgcgaagagggcagcagcaagcagccgttcccccaaaaaaggccagagctcagcagagccccgcaggccgcacccaccagaaaccccagtcgatcggcggcggcgatgtcgctgtcctcggtgaagatcggcgaggaggtttggctcacatgcctctcccacgccctcactaccgagaccgaggaggtcatgggcctcctcctcggcgacatcgagctttccagcaagggcgccaccgcccttatatggggagcgtctccgcagatgaggtgcgagcggaagaaggaccgcgtcgaggtcaacccggagcttctcgccgccgcatccgcgcaagccgagaaaatgacggccaccatcaagaagactacgagggtgatcggatggtaccactcgcacccacatatcactgttctgccgtcccatgtagatgttcgtacccaagcgatgtttcagttgctggatacaggctttgtgggccttatattttcttgttttagtgaagatgctcaaaaggttggaaaaatccaagtgactgcctttcagtcagagggtggacaacagcatgcccttcctcttgccattgctccagttattgaccttgattcatcccttagttcatcagataatgcactcacttcacattctgcattggttgaaggcatggaacaggacacaggggattccagggcctcaaagcataacaaggcctggaaaagatctttggatttctactctcatcctgacacaaatcattccacgaattatcaacccaatgaaaacactctcgctctgtacaatcctgataacacacaagaagcgcctgttgatccatacgattcagatatgactcaaagcctccaggaggctttgcaccggtcaactatggacataagtggtgcagagtatagagggaaggaggtgccactttttgtgctcccgacaaggtatctcctcaagctggacaccacgatgacctcgtactgtgatatgcaacgagtcctgtttgaagaggagcaatcagcatataatcaagctatgcaacaaaatatttgtgatgggaaaattcaccctcttacatccattcactgtacgtctacatacaactcctctctatgcaaactaatggagtattgtttgagtccagctgttattacgcttcaggaccgcctgaaggaaaatgaacttcggctatctatgttaaaagaggagtgtaagcaactggaggctgatacccaaggcatgagaaatggttctcctcgtcgcctcatgaatcacggagctggtggcagcggttcacctatggctcagagcaggcatcctttctccagccaagggagccctagaagcccgagcggcggcagccggaggagggcttgatgatgatcttgctccgcctgatgcgttgatgaactgtccgttgtggcttaaccagatgcttcctgaaaacccagatatttgacggacgaagtgcccccagacaacagacacttattgggggggttccttatcctgttgccggagctgtgccattatcctttccatggttcatggttggcatgagcttttatagcctgtacactgtagactctgtactagaggttttccagaaaggctgaactgccgctgctgggatgtgttgttccgggcatattcaaagatgaaggctttctttgcttttgtaattgaaaaaaaaacccgacttcggtagcaatacattttcttgaaatgctataactctaagctacagccacagtgccacaccttgcctggatagtgccatagctgttt

SEQ ID NO: 60134 - DNA, 3129 bp, Zea Mays
gcgacgcgaagagggcagcagcaagcagccgttcccccaaaaaaggccagagctcagcagagccccgcaggccgcacccaccagaaaccccagtcgatcggcggcggcgatgtcgctgtcctcggtgaagatcggcgaggaggtttggctcacatgcctctcccacgccctcactaccgagaccgaggaggtcatgggcctcctcctcggcgacatcgagcaagggcgccaccgcccttatatggggagcgtctccgcagatgaggtgcgagcggaagaaggaccgcgtcgaggtcaacccggagcttctcgccgccgcatccgcgcaagccgagaaaatgacggccaccatcaagaagactacgagggtgatcggatggtaccactcgcacccacatatcactgttctgccgtcccatgtaggtaaaaaattcacatttcctccatcggtgaatcattttgtgcccagggttgcacatttgcttcaactagctcaagtggcctgtggccccggtttgatgttggcgtttgcttgtctcacagaatagcggtaatgctgtcaaatatgtgtctgttcgatattcacagactacctcaagtgatttatcccttactagatcccaacttatgttcacttgccatttctgataatggatatcaagtatgataactgtcatagcactaagtactaagtagctttgcttttgagtgctcaggctttggaacgtgctaaaaatagacattacctttgctccagagcttcaagatgacagtgacatataatttccttcattacaagggcagagggtctatttgttgaccatttgacggtggctatggtcctatggagtatggagggcttgagaattcactagtgtatatgcttttatatgtgtttctcttcattctcctgtgacatgcttcccatctacaataagtttaaactatattttgtataatccccatgagtcgtattttccagatgttcgtacccaagcgatgtttcagttgctggatacaggctttgtgggccttatattttcttgttttagtgaagatgctcaaaaggttggaaaaatccaagtgactgcctttcagtcagagggtggacaacagcatgcccttcctcttgccattgctccagttattgaccttgattcatcccttagttcatcagataatgcactcacttcacattctgcattggttgaaggcatggaacaggacacaggggattccagggcctcaaagcataacaaggcacctttagaagtggagtgtcagattgcagtcgaaaagtgggcttcattacttccaactagcgaaagggcctctaactgagttggttaggtggtttgaatagtactcctcaggaattcgactaggtttaaaaaatcctctcatttgtcccacactcccatgtcaaagcacaggtgtgaggcccgaccctagtcgtggttgttattacacgggctactgtaccgttgtgtatgagtgtggtaggggttttcttttttttcctcgaacacacaggagggttgcatatctttatattaaaagaagataaacaagagggggttggaatgcccgagtacaacccactcaacacccacactagctagactagagttatatttgcgcctgagcacagaaaggataacggctgatgaaagccaacctatctatcaggttctagggctaacaagagggaaattcctcgagccccggccaacgaaccacaaaaaagcctcatcagcaaggagcagggccctcgccaaatcaggcacaacaactcaataagcacctcaacagacagggctccatgaataccattaatctactcgtgatttattaaggcttcgtacactgtgcgccatttgactcttctcttaggcactaaagcaaagattttcggagccagatcctctaaacgccgaccgtgcagccacctctctttccaaaacaaggcctggaaaagatctttggatttctactctcatcctgacacaaatcattccacgaattatcaacccaatgaaaacactctcgctctgtacaatcctgataacacacaagaagcgcctgttgatccatacgattcagatatgactcaaagcctccaggaggctttgcaccggtcaactatggacataagtggtgcagagtatagagggaaggaggtgccactttttgtgctcccgacaaggtatctcctcaagctggacaccacgatgacctcgtactgtgatatgcaacgagtcctgtttgaagaggagcaatcagcatataatcaagctatgcaacaaaatatttgtgatgggaaaattcaccctcttacatccattcactgtacgtctacatacaactcctctctatgcaaactaatggagtattgtttgagtccagctgttattacgcttcaggaccgcctgaaggaaaatgaacttcggctatctatgttaaaagaggagtgtaagcaactggaggctgatacccaaggcatgagaaatggttctcctcgtcgcctcatgaatcacggagctggtggcagcggttcacctatggctcagagcaggcatcctttctccagccaagggagccctagaagcccgagcggcggcagccggaggagggcttgatgatgatcttgctccgcctgatgcgttgatgaactgtccgttgtggcttaaccagatgcttcctgaaaacccagatatttgacggacgaagtgcccccagacaacagacactgtacctgtacatacccattgccgttcagcgctgtgctattgtggaactccaacggtctcattgtgctttttttttgtagtattgggggggttccttatcctgttgccggagctgtgccattatcctttccatggttcatggttggcatgagcttttatagcctgtacactgtagactctgtactagaggttttccagaaaggctgaactgccgctgctgggatgtgttgttccgggcatattcaaagatgaaggctttctttgcttttgtaattgaaaaaaaaacccgacttcggtagcaatacattttcttgaaatgctataactctaagctacagccacagtgccacaccttgcctggatagtgccatagctgttt

SEQ ID NO: 60135 - DNA, 1843 bp, Zea Mays
gcgacgcgaagagggcagcagcaagcagccgttcccccaaaaaaggccagagctcagcagagccccgcaggccgcacccaccagaaaccccagtcgatcggcggcggcgatgtcgctgtcctcggtgaagatcggcgaggaggtttggctcacatgcctctcccacgccctcactaccgagaccgaggaggtcatgggcctcctcctcggcgacatcgagctttccagcaagggcgccaccgcccttatatggggagcgtctccgcagatgaggtgcgagcggaagaaggaccgcgtcgaggtcaacccggagcttctcgccgccgcatccgcgcaagccgagaaaatgacggccaccatcaagaagactacgagggtgatcggatggtaccactcgcacccacatatcactgttctgccgtcccatgtagatgttcgtacccaagcgatgtttcagttgctggatacaggctttgtgggccttatattttcttgttttagtgaagatgctcaaaaggttggaaaaatccaagtgactgcctttcagtcagagggtggacaacagcatgcccttcctcttgccattgctccagttattgaccttgattcatcccttagttcatcagataatgcactcacttcacattctgcattggttgaaggcatggaacaggacacaggggattccagggcctcaaagcataacaaggcctggaaaagatctttggatttctactctcatcctgacacaaatcattccacgaattatcaacccaatgaaaacactctcgctctgtacaatcctgataacacacaagaagcgcctgttgatccatacgattcagatatgactcaaagcctccaggaggctttgcaccggtcaactatggacataagtggtgcagagtatagagggaaggaggtgccactttttgtgctcccgacaaggtatctcctcaagctggacaccacgatgacctcgtactgtgatatgcaacgagtcctgtttgaagaggagcaatcagcatataatcaagctatgcaacaaaatatttgtgatgggaaaattcaccctcttacatccattcactgtacgtctacatacaactcctctctatgcaaactaatggagtattggaccgcctgaaggaaaatgaacttcggctatctatgttaaaagaggagtgtaagcaactggaggctgatacccaaggcatgagaaatggttctcctcgtcgcctcatgaatcacggagctggtggcagcggttcacctatggctcagagcaggcatcctttctccagccaagggagccctagaagcccgagcggcggcagccggaggagggcttgatgatgatcttgctccgcctgatgcgttgatgaactgtccgttgtggcttaaccagatgcttcctgaaaacccagatatttgacggacgaagtgcccccagacaacagacactgtacctgtacatacccattgccgttcagcgctgtgctattgtggaactccaacggtctcattgtgctttttttttgtagtattgggggggttccttatcctgttgccggagctgtgccattatcctttccatggttcatggttggcatgagcttttatagcctgtacactgtagactctgtactagaggttttccagaaaggctgaactgccgctgctgggatgtgttgttccgggcatattcaaagatgaaggctttctttgcttttgtaattgaaaaaaaaacccgacttcggtagcaatacattttcttgaaatgctataactctaagctacagccacagtgccacaccttgcctggatagtgccatagctgttt

SEQ ID NO: 60136 - DNA, 1801 bp, Zea Mays
gcgacgcgaagagggcagcagcaagcagccgttcccccaaaaaaggccagagctcagcagagccccgcaggccgcacccaccagaaaccccagtcgatcggcggcggcgatgtcgctgtcctcggtgaagatcggcgaggaggtttggctcacatgcctctcccacgccctcactaccgagaccgaggaggtcatgggcctcctcctcggcgacatcgagctttccagcaagggcgccaccgcccttatatggggagcgtctccgcagatgaggtgcgagcggaagaaggaccgcgtcgaggtcaacccggagcttctcgccgccgcatccgcgcaagccgagaaaatgacggccaccatcaagaagactacgagggtgatcggatggtaccactcgcacccacatatcactgttctgccgtcccataatagcgatgttcgtacccaagcgatgtttcagttgctggatacaggctttgtgggccttatattttcttgttttagtgaagatgctcaaaaggttggaaaaatccaagtgactgcctttcagtcagagggtggacaacagcatgcccttcctcttgccattgctccagttattgaccttgattcatcccttagttcatcagataatgcactcacttcacattctgcattggttgaaggcatggaacaggacacaggggattccagggcctcaaagcataacaaggcctggaaaagatctttggatttctactctcatcctgacacaaatcattccacgaattatcaacccaatgaaaacactctcgctctgtacaatcctgataacacacaagaagcgcctgttgatccatacgattcagatatgactcaaagcctccaggaggctttgcaccggtcaactatggacataagtggtgcagagtatagagggaaggaggtgccactttttgtgctcccgacaaggtatctcctcaagctggacaccacgatgacctcgtactgtgatatgcaacgagtcctgtttgaagaggagcaatcagcatataatcaagctatgcaacaaaatatttgtgatgggaaaattcaccctcttacatccattcactgtacgtctacatacaactcctctctatgcaaactaatggagtattgtttgagtccagctgttattacgcttcaggaccgcctgaaggaaaatgaacttcggctatctatgttaaaagaggagtgtaagcaactggaggctgatacccaaggcatgagaaatggttctcctcgtcgcctcatgaatcacggagctggtggcagcggttcacctatggctcagagcaggcatcctttctccagccaagggagccctagaagcccgagcggcggcagccggaggagggcttgatgatgatcttgctccgcctgatgcgttgatgaactgtccgttgtggcttaaccagatgcttcctgaaaacccagatatttgacggacgaagtgcccccagacaacagacactgtaccttattgggggggttccttatcctgttgccggagctgtgccattatcctttccatggttcatggttggcatgagcttttatagcctgtacactgtagactctgtactagaggttttccagaaaggctgaactgccgctgctgggatgtgttgttccgggcatattcaaagatgaaggctttctttgcttttgtaattgaaaaaaaaacccgacttcggtagcaatacattttcttgaaatgctataactctaagctacagccacagtgccacaccttgcctggatagtgccatagctgttt

SEQ ID NO: 60137 - DNA, 2245 bp, Zea Mays
gcgacgcgaagagggcagcagcaagcagccgttcccccaaaaaaggccagagctcagcagagccccgcaggccgcacccaccagaaaccccagtcgatcggcggcggcgatgtcgctgtcctcggtgaagatcggcgaggaggtttggctcacatgcctctcccacgccctcactaccgagaccgaggaggtcatgggcctcctcctcggcgacatcgagctttccagcaagggcgccaccgcccttatatggggagcgtctccgcagatgaggtgcgagcggaagaaggaccgcgtcgaggtcaacccggagcttctcgccgccgcatccgcgcaagccgagaaaatgacggccaccatcaagaagactacgagggtgatcggatggtaccactcgcacccacatatcactgttctgccgtcccatgtaggtaaaaaattcacatttcctccatcggtgaatcattttgtgcccagggttgcacatttgcttcaactagctcaagtggcctgtggccccggtttgatgttggcgtttgcttgtctcacagaatagcggtaatgctgtcaaatatgtgtctgttcgatattcacagactacctcaagtgatttatcccttactagatcccaacttatgttcacttgccatttctgataatggatatcaagtatgataactgtcatagcactaagtactaagtagctttgcttttgagtgctcaggctttggaacgtgctaaaaatagacattacctttgctccagagcttcaagatgacagtgacatataatttccttcattacaagggcagagggtctatttgttgaccatttgacggtggctatggtcctatggagtatggagggcttgagaattcactagtatgttcgtacccaagcgatgtttcagttgctggatacaggctttgtgggccttatattttcttgttttagtgaagatgctcaaaaggttggaaaaatccaagtgactgcctttcagtcagagggtggacaacagcatgcccttcctcttgccattgctccagttattgaccttgattcatcccttagttcatcagataatgcactcacttcacattctgcattggttgaaggcatggaacaggacacaggggattccagggcctcaaagcataacaaggcctggaaaagatctttggatttctactctcatcctgacacaaatcattccacgaattatcaacccaatgaaaacactctcgctctgtacaatcctgataacacacaagaagcgcctgttgatccatacgattcagatatgactcaaagcctccaggaggctttgcaccggtcaactatggacataagtggtgcagagtatagagggaaggaggtgccactttttgtgctcccgacaaggtatctcctcaagctggacaccacgatgacctcgtactgtgatatgcaacgagtcctgtttgaagaggagcaatcagcatataatcaagctatgcaacaaaatatttgtgatgggaaaattcaccctcttacatccattcactgtacgtctacatacaactcctctctatgcaaactaatggagtattgtttgagtccagctgttattacgcttcaggaccgcctgaaggaaaatgaacttcggctatctatgttaaaagaggagtgtaagcaactggaggctgatacccaaggcatgagaaatggttctcctcgtcgcctcatgaatcacggagctggtggcagcggttcacctatggctcagagcaggcatcctttctccagccaagggagccctagaagcccgagcggcggcagccggaggagggcttgatgatgatcttgctccgcctgatgcgttgatgaactgtccgttgtggcttaaccagatgcttcctgaaaacccagatatttgacggacgaagtgcccccagacaacagacacttattgggggggttccttatcctgttgccggagctgtgccattatcctttccatggttcatggttggcatgagcttttatagcctgtacactgtagactctgtactagaggttttccagaaaggctgaactgccgctgctgggatgtgttgttccgggcatattcaaagatgaaggctttctttgcttttgtaattgaaaaaaaaacccgacttcggtagcaatacattttcttgaaatgctataactctaagctacagccacagtgccacaccttgcctggatagtgccatagctgttt

SEQ ID NO: 60138 - DNA, 1795 bp, Zea Mays
gcgacgcgaagagggcagcagcaagcagccgttcccccaaaaaaggccagagctcagcagagccccgcaggccgcacccaccagaaaccccagtcgatcggcggcggcgatgtcgctgtcctcggtgaagatcggcgaggaggtttggctcacatgcctctcccacgccctcactaccgagaccgaggaggtcatgggcctcctcctcggcgacatcgagctttccagcaagggcgccaccgcccttatatggggagcgtctccgcagatgaggtgcgagcggaagaaggaccgcgtcgaggtcaacccggagcttctcgccgccgcatccgcgcaagccgagaaaatgacggccaccatcaagaagactacgagggtgatcggatggtaccactcgcacccacatatcactgttctgccgtcccataatagcgatgttcgtacccaagcgatgtttcagttgctggatacaggctttgtgggccttatattttcttgttttagtgaagatgctcaaaaggttggaaaaatccaagtgactgcctttcagtcagagggtggacaacagcatgcccttcctcttgccattgctccagttattgaccttgattcatcccttagttcatcagataatgcactcacttcacattctgcattggttgaaggcatggaacaggacacaggggattccagggcctcaaagcataacaaggcctggaaaagatctttggatttctactctcatcctgacacaaatcattccacgaattatcaacccaatgaaaacactctcgctctgtacaatcctgataacacacaagaagcgcctgttgatccatacgattcagatatgactcaaagcctccaggaggctttgcaccggtcaactatggacataagtggtgcagagtatagagggaaggaggtgccactttttgtgctcccgacaaggtatctcctcaagctggacaccacgatgacctcgtactgtgatatgcaacgagtcctgtttgaagaggagcaatcagcatataatcaagctatgcaacaaaatatttgtgatgggaaaattcaccctcttacatccattcactgtacgtctacatacaactcctctctatgcaaactaatggagtattgtttgagtccagctgttattacgcttcaggaccgcctgaaggaaaatgaacttcggctatctatgttaaaagaggagtgtaagcaactggaggctgatacccaaggcatgagaaatggttctcctcgtcgcctcatgaatcacggagctggtggcagcggttcacctatggctcagagcaggcatcctttctccagccaagggagccctagaagcccgagcggcggcagccggaggagggcttgatgatgatcttgctccgcctgatgcgttgatgaactgtccgttgtggcttaaccagatgcttcctgaaaacccagatatttgacggacgaagtgcccccagacaacagacacttattgggggggttccttatcctgttgccggagctgtgccattatcctttccatggttcatggttggcatgagcttttatagcctgtacactgtagactctgtactagaggttttccagaaaggctgaactgccgctgctgggatgtgttgttccgggcatattcaaagatgaaggctttctttgcttttgtaattgaaaaaaaaacccgacttcggtagcaatacattttcttgaaatgctataactctaagctacagccacagtgccacaccttgcctggatagtgccatagctgttt

SEQ ID NO: 60139 - DNA, 2384 bp, Zea Mays
gcgacgcgaagagggcagcagcaagcagccgttcccccaaaaaaggccagagctcagcagagccccgcaggccgcacccaccagaaaccccagtcgatcggcggcggcgatgtcgctgtcctcggtgaagatcggcgaggaggtttggctcacatgcctctcccacgccctcactaccgagaccgaggaggtcatgggcctcctcctcggcgacatcgagctttccagcaagggcgccaccgcccttatatggggagcgtctccgcagatgaggtgcgagcggaagaaggaccgcgtcgaggtcaacccggagcttctcgccgccgcatccgcgcaagccgagaaaatgacggccaccatcaagaagactacgagggtgatcggatggtaccactcgcacccacatatcactgttctgccgtcccatgtaggtaaaaaattcacatttcctccatcggtgaatcattttgtgcccagggttgcacatttgcttcaactagctcaagtggcctgtggccccggtttgatgttggcgtttgcttgtctcacagaatagcggtaatgctgtcaaatatgtgtctgttcgatattcacagactacctcaagtgatttatcccttactagatcccaacttatgttcacttgccatttctgataatggatatcaagtatgataactgtcatagcactaagtactaagtagctttgcttttgagtgctcaggctttggaacgtgctaaaaatagacattacctttgctccagagcttcaagatgacagtgacatataatttccttcattacaagggcagagggtctatttgttgaccatttgacggtggctatggtcctatggagtatggagggcttgagaattcactagtgtatatgcttttatatgtgtttctcttcattctcctgtgacatgcttcccatctacaataagtttaaactatattttgtataatccccatgagtcgtattttccagatgttcgtacccaagcgatgtttcagttgctggatacaggctttgtgggccttatattttcttgttttagtgaagatgctcaaaaggttggaaaaatccaagtgactgcctttcagtcagagggtggacaacagcatgcccttcctcttgccattgctccagttattgaccttgattcatcccttagttcatcagataatgcactcacttcacattctgcattggttgaaggcatggaacaggacacaggggattccagggcctcaaagcataacaaggcctggaaaagatctttggatttctactctcatcctgacacaaatcattccacgaattatcaacccaatgaaaacactctcgctctgtacaatcctgataacacacaagaagcgcctgttgatccatacgattcagatatgactcaaagcctccaggaggctttgcaccggtcaactatggacataagtggtgcagagtatagagggaaggaggtgccactttttgtgctcccgacaaggtatctcctcaagctggacaccacgatgacctcgtactgtgatatgcaacgagtcctgtttgaagaggagcaatcagcatataatcaagctatgcaacaaaatatttgtgatgggaaaattcaccctcttacatccattcacttttgagtccagctgttattacgcttcaggaccgcctgaaggaaaatgaacttcggctatctatgttaaaagaggagtgtaagcaactggaggctgatacccaaggcatgagaaatggttctcctcgtcgcctcatgaatcacggagctggtggcagcggttcacctatggctcagagcaggcatcctttctccagccaagggagccctagaagcccgagcggcggcagccggaggagggcttgatgatgatcttgctccgcctgatgcgttgatgaactgtccgttgtggcttaaccagatgcttcctgaaaacccagatatttgacggacgaagtgcccccagacaacagacactgtacctgtacatacccattgccgttcagcgctgtgctattgtggaactccaacggtctcattgtgctttttttttgtagtattgggggggttccttatcctgttgccggagctgtgccattatcctttccatggttcatggttggcatgagcttttatagcctgtacactgtagactctgtactagaggttttccagaaaggctgaactgccgctgctgggatgtgttgttccgggcatattcaaagatgaaggctttctttgcttttgtaattgaaaaaaaaacccgacttcggtagcaatacattttcttgaaatgctataactctaagctacagccacagtgccacaccttgcctggatagtgccatagctgttt

SEQ ID NO: 60140 - DNA, 1288 bp, Zea Mays
tcctatggagtatggagggcttgagaattcactagtatgttcgtacccaagcgatgtttcagttgctggatacaggctttgtgggccttatattttcttgttttagtgaagatgctcaaaaggttggaaaaatccaagtgactgcctttcagtcagagggtggacaacagcatgcccttcctcttgccattgctccagttattgaccttgattcatcccttagttcatcagataatgcactcacttcacattctgcattggttgaaggcatggaacaggacacaggggattccagggcctcaaagcataacaagtggtgcagagtatagagggaaggaggtgccactttttgtgctcccgacaaggtatctcctcaagctggacaccacgatgacctcgtactgtgatatgcaacgagtcctgtttgaagaggagcaatcagcatataatcaagctatgcaacaaaatatttgtgatgggaaaattcaccctcttacatccattcactgtacgtctacatacaactcctctctatgcaaactaatggagtattgtttgagtccagctgttattacgcttcaggaccgcctgaaggaaaatgaacttcggctatctatgttaaaagaggagtgtaagcaactggaggctgatacccaaggcatgagaaatggttctcctcgtcgcctcatgaatcacggagctggtggcagcggttcacctatggctcagagcaggcatcctttctccagccaagggagccctagaagcccgagcggcggcagccggaggagggcttgatgatgatcttgctccgcctgatgcgttgatgaactgtccgttgtggcttaaccagatgcttcctgaaaacccagatatttgacggacgaagtgcccccagacaacagacactgtacctgtacatacccattgccgttcagcgctgtgctattgtggaactccaacggtctcattgtgctttttttttgtagtattgggggggttccttatcctgttgccggagctgtgccattatcctttccatggttcatggttggcatgagcttttatagcctgtacactgtagactctgtactagaggttttccagaaaggctgaactgccgctgctgggatgtgttgttccgggcatattcaaagatgaaggctttctttgcttttgtaattgaaaaaaaaacccgacttcggtagcaatacattttcttgaaatgctataactctaagctacagccacagtgccacaccttgcctggatagtgccatagctgttt

SEQ ID NO: 60141 - DNA, 1880 bp, Zea Mays
cacaagtccaacgccggctctctctctctctctctctctctctctctctctctctctctctctctctctctctctctctctctggctctttgctgcgtgcatggcggggctgcagcggtccagcgagacgttccggcggtcgggctcgtcagggcttgtgtgggacgacaacaagagcttctcgggggagatcaagccggcggaggaggacggcggcgcgggcgcggcgcgggcggtggagcgcagccgctccaccgggcacgcgcacgccgggtacagggccacggggcgcgtgccgcccgcgctcgacccgccgtcgccgcgcgtcgccgtgtcggcgcgcgcaacaatggccaaggccgtgccctcgccgctcgcggccgtggccgtgttggcgctgctcctcctgtgccgcggcgccgaggcccgcgtcctcctcacgctcgacgacttcggcggcgtcggcgacggcattgccaacgacacccaggctctcctggacgcgtgggccgccgcgtgcagctccacccaggaggccgtcctcgccgtgccggccgggaaggtctaccagatctggccggtgcagctctccgggccctgcaagaagaggctcaagctgctgatttccggcgcgatcgtggcgccgtcgagccccgacgagtgggccgggcgggaccccatgaagtggctctacgtctacggcgtcgacggcctgtccgtcagcggcggcggcaccatcgacggcatggggcagcagtggtgggccagcacctgcaagcgcaagaagacccagccgtgctactcggggcctcgtccaaaggcggtgcacttcgaggagtgccgggaggccagcttcctccgggtggtggcgccggcggacagccccaacaccgacggcatccacctcaacgacacctcccacgtccgcatcacggacaacctcatctccacaggggacgactgcgtctccatggtcggcaattgctctgacgtccgtgtgaaagacatctcatgtgggcctggccatggcatcagcatcggaagccttggaaagaaccggaccaccgacatggtggaggacgtgaaggtcgacacctgcttgctcaccaacacgaccaacggcgtccgtatcaagagctggcagggaggcacgggcttcgcgcgggacctgcggttcgagaacatcgtgatgaggaacgtctccaaccccatcatcatcgaccagtactactgcgaccagcccacgccctgcgccaaccagacgcaggcggtggaggtgcgcagggtggagttcgcgggcatccggggcacgtcggcgacgccgcaggcgatcagcatcgcgtgcagcgacgccgtgccgtgccgggacctggagctggcgaacgtcaacctgacgctggagggcggtggtgccggccgagccaccgccctctgctaccgggcgtcggggaagagcgccggcaccgtggtcccgccgtcctgcctcgccaggtcctgactgagactcacctagcgaagcagtggccgaagcgcgtatacacccacatgctgcatggctgtcgattggagctgttgccatacccaaacaaaaccaacctgttgattgtacacgccgttgttgacgacaaggaaacacagagaagaaatatcggagcttcttacctgcaaaatgtcgttcgcacttaaaaaaggttcggattaaaaaaacacaacttgattaaaaaatctctaggaaaaaaaaagagtacatcatagacatcttcgtttgatttttgacactcaccggaacctctacaaaggaaaaattaaaagacaagaagggaaagatttgatagagtttggggccttggcttctggcttagttttggactaagttttgg

SEQ ID NO: 60142 - DNA, 957 bp, Zea Mays
ccttattgcatcatacaaatttccaaatctgggacgactgcgtctccatggtcggcaattgctctgacgtccgtgtgaaagacatctcatgtgggcctggccatggcatcagcatcggaagccttggaaagaaccggaccaccgacatggtggaggacgtgaaggtcgacacctgcttgctcaccaacacgaccaacggcgtccgtatcaagagctggcagggaggcacgggcttcgcgcgggacctgcggttcgagaacatcgtgatgaggaacgtctccaaccccatcatcatcgaccagtactactgcgaccagcccacgccctgcgccaaccagacgcaggcggtggaggtgcgcagggtggagttcgcgggcatccggggcacgtcggcgacgccgcaggcgatcagcatcgcgtgcagcgacgccgtgccgtgccgggacctggagctggcgaacgtcaacctgacgctggagggcggtggtgccggccgagccaccgccctctgctaccgggcgtcggggaagagcgccggcaccgtggtcccgccgtcctgcctcgccaggtcctgactgagactcacctagcgaagcagtggccgaagcgcgtatacacccacatgctgcatggctgtcgattggagctgttgccatacccaaacaaaaccaacctgttgattgtacacgccgttgttgacgacaaggaaacacagagaagaaatatcggagcttcttacctgcaaaatgtcgttcgcacttaaaaaaggttcggattaaaaaaacacaacttgattaaaaaatctctaggaaaaaaaaagagtacatcatagacatcttcgtttgatttttgacactcaccggaacctctacaaaggaaaaattaaaagacaagaagggaaagatttgatagagtttggggccttggcttctggcttagttttggactaagttttgg

SEQ ID NO: 60143 - DNA, 1719 bp, Zea Mays
ctgcggtctgcgcgcttcaagtagcaccctaccggtgcgcgcgcacctcaaaacgtagtcaagtgagcggtctcattctgctctgctgctgcaactgcaagcgcggaatctgttcgatgatggcgcggggcgccgtgctgctcctgctcgcggccgccttcgccgcggcgctcctgccggacgccgcggaatcccgcatcctcctcacgctccacgacttcggcgccgtcggcgacggcgtcgcggacgacaccaaggccttggccggcgcgtggacggccgcgtgcgccgccgcggacgacgtcatcctcaacgtgcccgccggcgggacattccggatctggccgctcacgctcgccggaccctgcaggagcgagatcaagctgctcatttccggggacatcgtcgcgccggaaagcccccaggactgggggcaaggccagagcgaccagtggctccacttccacaaggttcgggacctcacggtcaccggcgggggcatcatcgacggcagagggcagcagtggtgggcgcagtcgcttgcgcgcgcgcagcccgctcccaaggctgttcacttcgaggactgccaggggatcagcgtgaagggcatcaccttgcagaacagccagtcgtaccacctgacgttcacccggagctccgacgtcgaggccaattacctcagggtgacctcgccggagcacagcgtcgacaccaagggcattcacctcgttgactcgtacaatgttcacgtcatggataacctcatctccacaggttcagcagacgagtttggttttcagaaaacaatctcgcaacaatgtgatgactgcgtctccatagtgggcaactgcacggatgtccgtctaagagccatctcatgcggacctggccatggtatcagcatcggaaccttaggagtaaacagctccgtcgattacgtggagaagatcaaagtcgacaccttgttcatctcaaacgccgagaacggcgtgcgcgtgaggaccaccgagaacggcggcggcggcggcttcgctcgcaaggtgaagttcgagagcatcgtcatgaggaacgtcaccaaccccatcatcgtcgaccaggggatctcctctgacgatccgccaccttcatcgcctgaagcagtagcactggccgcgacggcgtcggcggcagtgcaggtggagaagatcaactacatcgacatcacgggcacgtcggcgtcggagcgcgcggtcacgttctcgtgcagcgacgcccggccgtgcaggcgcctgtcgctcgacaacgtgaacctgacccaggtggacgggagcgaggcgtcgtcctactgccgccaggcgttcgggaggagcgtcggcaccgttgtcccggagtcctgcctctccaaggaggacttcgtccaccacgtcccgccgcagcgttctgaggaagacggagaagactcagaatcgtgaatctgtggcggttcctgcttggctctggccagattagttttgtcaagggatctctgatactactagttgcttcggatttttgttggaactataggtgttgttggggcttttcccctaggcctagtcctctagtgcagtgcagatctgtctgtgtgaactgaagaaccatgttgctgcccaactttggtttccagtattcctaaacgtttccagcctttctgtgactaatgacgctaaacaccatttctatgtatgattcagattcttt

SEQ ID NO: 60144 - DNA, 607 bp, Zea Mays
aataaaaaagaaaaacagaaaataagcacatcctcctccatcaccaaattgacgattatatcgaaaatctggacggcggcggactcgattgtagcagcagccgccgggaacaagatggcggcggcgttgtcgcagctggacgacgagatcgtccgcggcatggccatcggcgctgtcttcaccgactatgccgggaagataaactgcctcgacttccaccgcaaggaagatctcctcgtcacttccagcgaggacgactccatccgcatgtacaacatcaccagcgcgacgttgttaaagactacatatcacaggaaacatggtgctgaccgtgtctgttttagtcatcatccaagttctatcttatgctcttcacgatacaacctagagtctgcagaatcacttcgttatctgtcattgtatgacaaccgttgcttaagatacttcaaaggacacaaagacagggtcgtttcattatgtatgtcgcctgtcaatgatagctttatgtcaggatcacttgatcacagtgtcagaatatgggatcttcgcgtaaatgcttgtcagatgctatttatcctcgaggctctttcatgcttactcatctatc

SEQ ID NO: 60145 - DNA, 1373 bp, Zea Mays
aataaaaaagaaaaacagaaaataagcacatcctcctccatcaccaaattgacgattatatcgaaaatctggacggcggcggactcgattgtagcagcagccgccgggaacaagatggcggcggcgttgtcgcagctggacgacgagatcgtccgcggcatggccatcggcgctgtcttcaccgactatgccgggaagataaactgcctcgacttccaccgcaaggaagatctcctcgtcacttccagcgaggacgactccatccgcatgtacaacatcaccagcgcgacgttgttaaagactacatatcacaggaaacatggtgctgaccgtgtctgttttagtcatcatccaagttctatcttatgctcttcacgatacaacctagagtctgcagaatcacttcgttatctgtcattgtatgacaaccgttgcttaagatacttcaaaggacacaaagacagcaatggaaggaggtgctattaagttatttgattcccggtcatatgacaagggtccatttgacactttcttggttggtggagatacagctgaagtttctgacatcaaatttagcaacgatggcaagtctatgcttttgacaacaactaacaaccatatatatgttctggatgcatatggaggggataaaggtgtggctttagtttagagccatctcccaatgtaacaaatgaagctgctttcactccagatggtcaatatgtaatttcaggatcaggtgatggaaccctgcacgcttggaacatcaatacagtacaagagattgcttgttggaacagtcacattggtccgattacagcattgaagtgggcccctcgtcgagcgatgtttgcaactgcatcaactgccctaactttctggattcccaaccaatcgaattaggatcaggtgcatggagaaagaagggatgtgacttcatgtatgttaacgtagcaaatgttcatatcttgttcttttgtccaaaagatagatgccatgtatgaaatcacttcattaccatctacggaaacattgacatgtttccaggcagatacttgttgtagtgctcccttatttatatgtactatactaatacacctgcctgttaaattgttgtaacatagttctaggcagatacttgtagtgcctccttccttattttattttatgtacacttgcctgttaaattatcgtgttcttgaaagaccggggggtgttcggtttgaggaatcaaactattcaaaatgaggtggtgcattatggatccattattcaaatttagtgggatgaccacatttctaatattagtactaactatgaagaatgaggtgataatgaatcaaattatttcattctaaaaaccaaacaaaaaa

SEQ ID NO: 60146 - DNA, 1541 bp, Zea Mays
aataaaaaagaaaaacagaaaataagcacatcctcctccatcaccaaattgacgattatatcgaaaatctggacggcggcggactcgattgtagcagcagccgccgggaacaagatggcggcggcgttgtcgcagctggacgacgagatcgtccgcggcatggccatcggcgctgtcttcaccgactatgccgggaagataaactgcctcgacttccaccgcaaggaagatctcctcgtcacttccagcgaggacgactccatccgcatgtacaacatcaccagcgcgacgttgttaaagactacatatcacaggaaacatggtgctgaccgtgtctgttttagtcatcatccaagttctatcttatgctcttcacgatacaacctagagtctgcagaatcacttcgttatctgtcattgtatgacaaccgttgcttaagatacttcaaaggacacaaagacagggcatactaaggctgcgtggtagaccttctgtcgcatatgatcagcagggacttgtttttgctgtagcaatggaaggaggtgctattaagttatttgattcccggtcatatgacaagggtccatttgacactttcttggttggtggagatacagctgaagtttctgacatcaaatttagcaacgatggcaagtctatgcttttgacaacaactaacaaccatatatatgttctggatgcatatggaggggataagttgagtcatattatcttacccattttctttgcttcagatacccatccttgtggtgcacattttctgatgttacatccttttgctaatatctcaacgtaatttgcagaggtgtggctttagtttagagccatctcccaatgtaacaaatgaagctgctttcactccagatggtcaatatgtaatttcaggtgatggaaccctgcacgcttggaacatcaatacagtacaagagattgcttgttggaacagtcacattggtccgattacagcattgaagtgggcccctcgtcgagcgatgtttgcaactgcatcaactgccctaactttctggattcccaaccaatcgaattaggatcaggtgcatggagaaagaagggatgtgacttcatgtatgttaacgtagcaaatgttcatatcttgttcttttgtccaaaagatagatgccatgtatgaaatcacttcattaccatctacggaaacattgacatgtttccaggcagatacttgttgtagtgctcccttatttatatgtactatactaatacacctgcctgttaaattgttgtaacatagttctaggcagatacttgtagtgcctccttccttattttattttatgtacacttgcctgttaaattatcgtgttcttgaaagaccggggggtgttcggtttgaggaatcaaactattcaaaatgaggtggtgcattatggatccattattcaaatttagtgggatgaccacatttctaatattagtactaactatgaagaatgaggtgataatgaatcaaattatttcattctaaaaaccaaacaaaaaa

SEQ ID NO: 60147 - DNA, 1440 bp, Zea Mays
aataaaaaagaaaaacagaaaataagcacatcctcctccatcaccaaattgacgattatatcgaaaatctggacggcggcggactcgattgtagcagcagccgccgggaacaagatggcggcggcgttgtcgcagctggacgacgagatcgtccgcggcatggccatcggcgctgtcttcaccgactatgccgggaagataaactgcctcgacttccaccgcaaggaagatctcctcgtcacttccagcgaggacgactccatccgcatgtacaacatcaccagcgcgacgttgttaaagactacatatcacaggaaacatggtgctgaccgtgtctgttttagtcatcatccaagttctatcttatgctcttcacgatacaacctagagtctgcagaatcacttcgttatctgtcattgtatgacaaccgttgcttaagatacttcaaaggacacaaagacagggcatactaaggctgcgtggtagaccttctgtcgcatatgatcagcagggacttgtttttgctgtagcaatggaaggaggtgctattaagttatttgattcccggtcatatgacaagggtccatttgacactttcttggttggtggagatacagctgaagtttctgacatcaaatttagcaacgatggcaagtctatgcttttgacaacaactaacaaccatatatatgttctggatgcatatggaggggataaaggtgtggctttagtttagagccatctcccaatgtaacaaatgaagctgctttcactccagatggtcaatatgtaatttcaggatcaggtgatggaaccctgcacgcttggaacatcaatacagtacaagagattgcttgttggaacagtcacattggtccgattacagcattgaagtgggcccctcgtcgagcgatgtttgcaactgcatcaactgccctaactttctggattcccaaccaatcgaattaggatcaggtgcatggagaaagaagggatgtgacttcatgtatgttaacgtagcaaatgttcatatcttgttcttttgtccaaaagatagatgccatgtatgaaatcacttcattaccatctacggaaacattgacatgtttccaggcagatacttgttgtagtgctcccttatttatatgtactatactaatacacctgcctgttaaattgttgtaacatagttctaggcagatacttgtagtgcctccttccttattttattttatgtacacttgcctgttaaattatcgtgttcttgaaagaccggggggtgttcggtttgaggaatcaaactattcaaaatgaggtggtgcattatggatccattattcaaatttagtgggatgaccacatttctaatattagtactaactatgaagaatgaggtgataatgaatcaaattatttcattctaaaaaccaaacaaaaaa

SEQ ID NO: 60148 - DNA, 2598 bp, Zea Mays
tgcaccgggtccatgggccgagcatgcgcgcgtttgggcagctcgaccgttcggccggtacgagtgtatgaaccgggtccagagacatgaccggaacctctccttctcgcatcaccctcccggagtctgcccccacgcccacccattgaaaagcagagcggctgccgctctcctcctcctccttcctggacaaaatcatcagctcccgaaatccaaattgaaacagttgcaggcgattctgagctcgggttttgttccggggacggattcctgtgccggcggacgggatgtcaggccctctcgaccgatttgctaggccatgctttgaagggtttgtacataacgatgaaaggaaagagagcagatctgatgcagacaactcagaaggagataagaagactaagattgggtctttcaagaaaaaagcaattaatgcggggaacaaattcaggcattccttgagaaggagaagcaaaaaaaagaccgaaaggggggattccatcaaggacataagggacgttaaagagcttcaagatgttgagacattccgacaatgcttaattgatgaggatttgctgccaccacagcacgatgattatcacatgatgttaaggttcctaaaagcacggaaatttgaagttgagaaagctaagagtatgtggtcagacatgatcaattggaggaaggaattcggagtcgacaaaatagaggaatttgactacaccgagttagatgaagtgacagagtattacccacaattttatcatggagtagataaagagggaagacctgtctacatagaattagtaggaaaagttgatgcaaacaagctaatacaagtgacaaccctagatcgggtttcaagaacttctcgaaatctgccagagaattaatcacacgattacagaagatcgacagtgataactacccagagacactgtgccggatgtatataattaatgctggccaaggcttcaagatgttatggagcacaataaaatcattcctcgatccaaaaactgcttccaagatccatgttcttgggaataagtatcaacataagttgctcgaaataattgacgagtgtgaactgccagaatttcttggtggcaaatgcaattgtattgaaggttgccaaagatctgacaaaggtccttggaaggatcccaacataataaagagagtcctcaatgacgaggcaaactacggcagacaaattgtgaccatatccagcattgatggaaaaataatacgttatgctaggccagatcacccaactagaaaagggagtgatgcatctgccgagtctggatctgaagtggaagatgtaacatctcctactgcatcaaggaacctgattacacatcctattttgacccctgttcacgaagagtcaaaattgtcgccacatggttccacatttgttgctcatgcttctattgaagaaaacattcctgttgtagacaaggttgtggatgatggatggggtactcccagaggtagtctccaagcttcttcaggttcgttgccctcgagaaacacgcacggcacattcgaaggactgagagttcaagctgtcgcatggctgacgttcttgatcacggcccttttcgccacgctctgttccgtcccgagcaagatggccagaaggatctccagccagtctagcaagcacgacgactaccgcggcgagtatcctcaagaggaggaggagcacaaggaggagttccggcctccgtctcctgccccgtcctacacggagaaggacgtgctctcgtcgatgctgagacggctcggtgagctggagggcagggtgcaggtgctcgagacgaagccgtccgagatgccgtttgagaaggaggagctgctcaacgcagccgtccgccgcgtggacgcgctggaagccgagctgatctccacgaagaaggccctttacgatgctctgatgcgacaggatgagctgctcgcgtacattgacaggcaggagctgatcaagttccgtaaaaagaagttctgcttctaagatctgaccatggagcagctggtcatgtccggagccgttcgtgtatattgttggatcgcggctagtacggtgaatgatgtaatgtgtccatctgtacaagtgtgtaacggaacggtgtaagtatagtaggaaaacaatgtgttagctgtgcggtagcacttgtgtgctagcctaaattgtaatcttgcaagtcggtgcatagctgattgcgcaccaatacgtagttatgaatggaatcgcactcgtgttcgtataaaataaaataaattagcagcgccaaatgtttaaaaatgaggcgcaagagagtgcccaggaacatattcccactcgcaccaaatgcttccagtgtttgagtcctgcgtgcaatgcattgatcacggctcgcacttggaaacttctcctcccaactatacaagcttttttcattctactgcagatagcggctgcggcaaggactgcacgtctgcacctacggtaggtggcctacccatcctcatctcttttccccccacaaccgctgaaccaaatctcatcaccaacgtaacgaaaagttcaatggtttaacagtgcaaccg

SEQ ID NO: 60149 - DNA, 2713 bp, Zea Mays
tgcaccgggtccatgggccgagcatgcgcgcgtttgggcagctcgaccgttcggccggtacgagtgtatgaaccgggtccagagacatgaccggaacctctccttctcgcatcaccctcccggagtctgcccccacgcccacccattgaaaagcagagcggctgccgctctcctcctcctccttcctggacaaaatcatcagctcccgaaatccaaattgaaacaggcgattctgagctcgggttttgttccggggacggattcctgtgccggcggacgggatgtcaggccctctcgaccgatttgctaggccatgctttgaagggtttgtacataacgatgaaaggaaagagagcagatctgatgcagacaactcagaaggagataagaagactaagattgggtctttcaagaaaaaagcaattaatgcggggaacaaattcaggcattccttgagaaggagaagcaaaaaaaagaccgaaaggggggattccatcaaggacataagggacgttaaagagcttcaagatgttgagacattccgacaatgcttaattgatgaggatttgctgccaccacagcacgatgattatcacatgatgttaaggttcctaaaagcacggaaatttgaagttgagaaagctaagagtatgtggtcagacatgatcaattggaggaaggaattcggagtcgacaaaatagaggaatttgactacaccgagttagatgaagtgacagagtattacccacaattttatcatggagtagataaagagggaagacctgtctacatagaattagtaggaaaagttgatgcaaacaagctaatacaagtgacaaccctagatcggtatgtaaaataccatgtcaaagaatttgagaagtgcttccagatgaaatttccagcttgcaccattgctgctaaaaagcacatagattcgtccactactattttggatgtgcaaggcgtgggtttcaagaacttctcgaaatctgccagagaattaatcacacgattacagaagatcgacagtgataactacccagagacactgtgccggatgtatataattaatgctggccaaggcttcaagatgttatggagcacaataaaatcattcctcgatccaaaaactgcttccaagatccatgttcttgggaataagtatcaacataagttgctcgaaataattgacgagtgtgaactgccagaatttcttggtggcaaatgcaattgtattgaaggttgccaaagatctgacaaaggtccttggaaggatcccaacataataaagagagtcctcaatgacgaggcaaactacggcagacaaattgtgaccatatccagcattgatggaaaaataatacgttatgctaggccagatcacccaactagaaaagggagtgatgcatctgccgagtctggatctgaagtggaagatgtaacatctcctactgcatcaaggaacctgattacacatcctattttgacccctgttcacgaagagtcaaaattgtcgccacatggttccacatttgttgctcatgcttctattgaagaaaacattcctgttgtagacaaggttgtggatgatggatggggtactcccagaggtagtctccaagcttcttcaggttcgttgccctcgagaaacacgcacggcacattcgaaggactgagagttcaagctgtcgcatggctgacgttcttgatcacggcccttttcgccacgctctgttccgtcccgagcaagatggccagaaggatctccagccagtctagcaagcacgacgactaccgcggcgagtatcctcaagaggaggaggagcacaaggaggagttccggcctccgtctcctgccccgtcctacacggagaaggacgtgctctcgtcgatgctgagacggctcggtgagctggagggcagggtgcaggtgctcgagacgaagccgtccgagatgccgtttgagaaggaggagctgctcaacgcagccgtccgccgcgtggacgcgctggaagccgagctgatctccacgaagaaggccctttacgatgctctgatgcgacaggatgagctgctcgcgtacattgacaggcaggagctgatcaagttccgtaaaaagaagttctgcttctaagatctgaccatggagcagctggtcatgtccggagccgttcgtgtatattgttggatcgcggctagtacggtgaatgatgtaatgtgtccatctgtacaagtgtgtaacggaacggtgtaagtatagtaggaaaacaatgtgttagctgtgcggtagcacttgtgtgctagcctaaattgtaatcttgcaagtcggtgcatagctgattgcgcaccaatacgtagttatgaatggaatcgcactcgtgttcgtataaaataaaataaattagcagcgccaaatgtttaaaaatgaggcgcaagagagtgcccaggaacatattcccactcgcaccaaatgcttccagtgtttgagtcctgcgtgcaatgcattgatcacggctcgcacttggaaacttctcctcccaactatacaagcttttttcattctactgcagatagcggctgcggcaaggactgcacgtctgcacctacggtaggtggcctacccatcctcatctcttttccccccacaaccgctgaaccaaatctcatcaccaacgtaacgaaaagttcaatggtttaacagtgcaaccg

SEQ ID NO: 60150 - DNA, 2747 bp, Zea Mays
tgcaccgggtccatgggccgagcatgcgcgcgtttgggcagctcgaccgttcggccggtacgagtgtatgaaccgggtccagagacatgaccggaacctctccttctcgcatcaccctcccggagtctgcccccacgcccacccattgaaaagcagagcggctgccgctctcctcctcctccttcctggacaaaatcatcagctcccgaaatccaaattgaaacagtgcttttctcccaaatggctggttgcagttgcaggcgattctgagctcgggttttgttccggggacggattcctgtgccggcggacgggatgtcaggccctctcgaccgatttgctaggccatgctttgaagggtttgtacataacgatgaaaggaaagagagcagatctgatgcagacaactcagaaggagataagaagactaagattgggtctttcaagaaaaaagcaattaatgcggggaacaaattcaggcattccttgagaaggagaagcaaaaaaaagaccgaaaggggggattccatcaaggacataagggacgttaaagagcttcaagatgttgagacattccgacaatgcttaattgatgaggatttgctgccaccacagcacgatgattatcacatgatgttaaggttcctaaaagcacggaaatttgaagttgagaaagctaagagtatgtggtcagacatgatcaattggaggaaggaattcggagtcgacaaaatagaggaatttgactacaccgagttagatgaagtgacagagtattacccacaattttatcatggagtagataaagagggaagacctgtctacatagaattagtaggaaaagttgatgcaaacaagctaatacaagtgacaaccctagatcggtatgtaaaataccatgtcaaagaatttgagaagtgcttccagatgaaatttccagcttgcaccattgctgctaaaaagcacatagattcgtccactactattttggatgtgcaaggcgtgggtttcaagaacttctcgaaatctgccagagaattaatcacacgattacagaagatcgacagtgataactacccagagacactgtgccggatgtatataattaatgctggccaaggcttcaagatgttatggagcacaataaaatcattcctcgatccaaaaactgcttccaagatccatgttcttgggaataagtatcaacataagttgctcgaaataattgacgagtgtgaactgccagaatttcttggtggcaaatgcaattgtattgaaggttgccaaagatctgacaaaggtccttggaaggatcccaacataataaagagagtcctcaatgacgaggcaaactacggcagacaaattgtgaccatatccagcattgatggaaaaataatacgttatgctaggccagatcacccaactagaaaagggagtgatgcatctgccgagtctggatctgaagtggaagatgtaacatctcctactgcatcaaggaacctgattacacatcctattttgacccctgttcacgaagagtcaaaattgtcgccacatggttccacatttgttgctcatgcttctattgaagaaaacattcctgttgtagacaaggttgtggatgatggatggggtactcccagaggtagtctccaagcttcttcaggttcgttgccctcgagaaacacgcacggcacattcgaaggactgagagttcaagctgtcgcatggctgacgttcttgatcacggcccttttcgccacgctctgttccgtcccgagcaagatggccagaaggatctccagccagtctagcaagcacgacgactaccgcggcgagtatcctcaagaggaggaggagcacaaggaggagttccggcctccgtctcctgccccgtcctacacggagaaggacgtgctctcgtcgatgctgagacggctcggtgagctggagggcagggtgcaggtgctcgagacgaagccgtccgagatgccgtttgagaaggaggagctgctcaacgcagccgtccgccgcgtggacgcgctggaagccgagctgatctccacgaagaaggccctttacgatgctctgatgcgacaggatgagctgctcgcgtacattgacaggcaggagctgatcaagttccgtaaaaagaagttctgcttctaagatctgaccatggagcagctggtcatgtccggagccgttcgtgtatattgttggatcgcggctagtacggtgaatgatgtaatgtgtccatctgtacaagtgtgtaacggaacggtgtaagtatagtaggaaaacaatgtgttagctgtgcggtagcacttgtgtgctagcctaaattgtaatcttgcaagtcggtgcatagctgattgcgcaccaatacgtagttatgaatggaatcgcactcgtgttcgtataaaataaaataaattagcagcgccaaatgtttaaaaatgaggcgcaagagagtgcccaggaacatattcccactcgcaccaaatgcttccagtgtttgagtcctgcgtgcaatgcattgatcacggctcgcacttggaaacttctcctcccaactatacaagcttttttcattctactgcagatagcggctgcggcaaggactgcacgtctgcacctacggtaggtggcctacccatcctcatctcttttccccccacaaccgctgaaccaaatctcatcaccaacgtaacgaaaagttcaatggtttaacagtgcaaccg

SEQ ID NO: 60151 - DNA, 2698 bp, Zea Mays
tgcaccgggtccatgggccgagcatgcgcgcgtttgggcagctcgaccgttcggccggtacgagtgtatgaaccgggtccagagacatgaccggaacctctccttctcgcatcaccctcccggagtctgcccccacgcccacccattgaaaagcagagcggctgccgctctcctcctcctccttcctggacaaaatcatcagctcccgaaatccaaattgaaacagttgcaggcgattctgagctcgggttttgttccggggacggattcctgtgccggcggacgggatgtcaggccctctcgaccgatttgctaggccatgctttgaagggtttgtacataacgatgaaaggaaagagagcagatctgatgcagacaactcagaaggagataagaagactaagattgggtctttcaagaaaaaagcaattaatgcggggaacaaattcaggcattccttgagaaggagaagcaaaaaaaagaccgaaaggggggattccatcaaggacataagggacgttaaagagcttcaagatgttgagacattccgacaatgcttaattgatgaggatttgctgccaccacagcacgatgattatcacatgatgttaaggttcctaaaagcacggaaatttgaagttgagaaagctaagagtatgtggtcagacatgatcaattggaggaaggaattcggagtcgacaaaatagaggaatttgactacaccgagttagatgaagtgacagagtattacccacaattttatcatggagtagataaagagggaagacctgtctacatagaattagtaggaaaagttgatgcaaacaagctaatacaagtgacaaccctagatcggtatgtaaaataccatgtcaaagaatttgagaagtgcttccagatgaaatttccagcttgcaccattgctgctaaaaagcacatagattcgtccactactattttggatgtgcaaggcgtgggtttcaagaacttctcgaaatctgccagagaattaatcacacgattacagaagatcgacagtgataactacccagagacactgtgccggatgtatataattaatgctggccaaggcttcaagatgttatggagcacaataaaatcattcctcgatccaaaaactgcttccaagatccatgttcttgggaataagtatcaacataagttgctcgaaataattgacgagtgtgaactgccagaatttcttggtggcaaatgcaattgtattgaaggttgccaaagatctgacaaaggtccttggaaggatcccaacataataaagagagtcctcaatgacgaggcaaactacggcagacaaattgtgaccatatccagcattgatggaaaaataatacgttatgctaggccagatcacccaactagaaaagggagtgatgcatctgccgagtctggatctgaagtggaagatgtaacatctcctactgcatcaaggaacctgattacacatcctattttgacccctgttcacgaagagtcaaaattgtcgccacatggttccacatttgttgctcatgcttctattgaagaaaacattcctgttgtagacaaggttgtggatgatggatggggtactcccagaggttcgttgccctcgagaaacacgcacggcacattcgaaggactgagagttcaagctgtcgcatggctgacgttcttgatcacggcccttttcgccacgctctgttccgtcccgagcaagatggccagaaggatctccagccagtctagcaagcacgacgactaccgcggcgagtatcctcaagaggaggaggagcacaaggaggagttccggcctccgtctcctgccccgtcctacacggagaaggacgtgctctcgtcgatgctgagacggctcggtgagctggagggcagggtgcaggtgctcgagacgaagccgtccgagatgccgtttgagaaggaggagctgctcaacgcagccgtccgccgcgtggacgcgctggaagccgagctgatctccacgaagaaggccctttacgatgctctgatgcgacaggatgagctgctcgcgtacattgacaggcaggagctgatcaagttccgtaaaaagaagttctgcttctaagatctgaccatggagcagctggtcatgtccggagccgttcgtgtatattgttggatcgcggctagtacggtgaatgatgtaatgtgtccatctgtacaagtgtgtaacggaacggtgtaagtatagtaggaaaacaatgtgttagctgtgcggtagcacttgtgtgctagcctaaattgtaatcttgcaagtcggtgcatagctgattgcgcaccaatacgtagttatgaatggaatcgcactcgtgttcgtataaaataaaataaattagcagcgccaaatgtttaaaaatgaggcgcaagagagtgcccaggaacatattcccactcgcaccaaatgcttccagtgtttgagtcctgcgtgcaatgcattgatcacggctcgcacttggaaacttctcctcccaactatacaagcttttttcattctactgcagatagcggctgcggcaaggactgcacgtctgcacctacggtaggtggcctacccatcctcatctcttttccccccacaaccgctgaaccaaatctcatcaccaacgtaacgaaaagttcaatggtttaacagtgcaaccg

SEQ ID NO: 60152 - DNA, 1238 bp, Zea Mays
tcaccacaaacacgcttgggcctggccaccctactaggcccatgcccatgggttatcggtccgccgctccgccctgtactcttttggtcaatagcgaccttttgcttgttcaactcggactcggacccctggatggaaccgcgtgctttttagctaccgaacggcggcgatgcgtcttttctccggcgtcctcgattcttcgtccgcgcttgcctccgccgtcctgggctccgtgtccgaccgcctcggattctcgcgcatagttttcggtcgagcgagcccttcgaacatgccggctctcgcttgttctgccgcttcctcgtcttctgccgctaccggcgcccagaaaccgtggctcttcgtcggtctggggaaccccgggcggatgtacaaaggcactcggcataacgttgggtttgagatgattgatgctattgcggaagctgagggcatatcagtcagcagtaagcaatttaaggcaattgtcggaaaaggcctcattggtgatgtccctgtaatgcttgccaagccacagacttttatgaatgcaagtggtcggacagctggtttcatacttcaagataccactcaatcaattagttgtgatctacgatgatcttgatctaccctttgcgaaattgcgtctgctaccaaaggggggacatggtggccacaatgggatgaggagtattgttgaccatttgaatcagagccgtgattttggacgcctaaggattggtattggcattggacggccacctgaggagctgggtgctatcaattttgttctgcggtcattcaccaagcaggaaaaggaagagcttgaagtcacgttccaaaggagcttgcaagctgtaagaattatggtacgggaaggattcaacaaaagtgcacagtttgtgaatactccacagccaccagaaatgctgaatagatgagagcccaacgacacatatacaatattaggttccataatcaaaaaatataatattaggttcgtctagttgctggccgccaacatgtatgtgccctaattgattagtagaggttttcatttgatcacacatcaagtcatgtaaattggattcacatattgttttcagattattatggggattatttggatttatgttttgtgtttttttttcggcgacaacccattgtatgtactgctccaacgttcatggatctcactaccaaaccacaaaatgtttagaatgacagacatgttttgaagt

SEQ ID NO: 60153 - DNA, 1543 bp, Zea Mays
tcaccacaaacacgcttgggcctggccaccctactaggcccatgcccatgggttatcggtccgccgctccgccctgtactcttttggtcaatagcgaccttttgcttgttcaactcggactcggacccctggatggaaccgcgtgctttttagctaccgaacggcggcgatgcgtcttttctccggcgtcctcgattcttcgtccgcgcttgcctccgccgtcctgggctccgtgtccgaccgcctcggattctcgcgcatagttttcggtcgagcgagcccttcgaacatgccggctctcgcttgttctgccgcttcctcgtcttctgccgctaccggcgcccagaaaccgtggctcttcgtcggtctggggaaccccgggcggatgtacaaaggcactcggcataacgttgggtttgagatgattgatgctattgcggaagctgagggcatatcagtcagcagtaagcaatttaaggcaattgtcggaaaaggcctcattggtgatgtccctgtaatgcttgccaagccacagacttttatgaatgcaagtggtgagtctgtcggacagctggtttcatacttcaagataccactcaatcaattagttgtgatctacgatgatcttgatctaccctttgcgaaattgcgtctgctaccaaaggggggacatggtggccacaatgggtattcatttcttttctagaagccgtcttaccccttgtactccctggctaaattggaagggacttgaattaatgcttcaatagaaataatgtataacaccataattataaattgatatttactcacaagccttccctccactatgagacggctgttacatttctttttcttcgaatggaacttgaacagaaatacttgtgaaccctctgttttcttcaatagttcacacgccatggtaatgtagttctatcataactatcatgttttgttttgcttaaccatttgtacaaattgcaggatgaggagtattgttgaccatttgaatcagagccgtgattttggacgcctaaggattggtattggcattggacggccacctgaggagctgggtgctatcaattttgttctgcggtcattcaccaagcaggaaaaggaagagcttgaagtcacgttccaaaggagcttgcaagctgtaagaattatggtacgggaaggattcaacaaaagtgcacagtttgtgaatactccacagccaccagaaatgctgaatagatgagagcccaacgacacatatacaatattaggttccataatcaaaaaatataatattaggttcgtctagttgctggccgccaacatgtatgtgccctaattgattagtagaggttttcatttgatcacacatcaagtcatgtaaattggattcacatattgttttcagattattatggggattatttggatttatgttttgtgtttttttttcggcgacaacccattgtatgtactgctccaacgttcatggatctcactaccaaaccacaaaatgtttagaatgacagacatgttttgaagt

SEQ ID NO: 60154 - DNA, 1529 bp, Zea Mays
tcaccacaaacacgcttgggcctggccaccctactaggcccatgcccatgggttatcggtccgccgctccgccctgtactcttttggtcaatagcgaccttttgcttgttcaactcggactcggacccctggatggaaccgcgtgctttttagctaccgaacggcggcgatgcgtcttttctccggcgtcctcgattcttcgtccgcgcttgcctccgccgtcctgggctccgtgtccgaccgcctcggattctcgcgcatagttttcggtcgagcgagcccttcgaacatgccggctctcgcttgttctgccgcttcctcgtcttctgccgctaccggcgcccagaaaccgtggctcttcgtcggtctggggaaccccgggcggatgtacaaaggcactcggcataacgttgggtttgagatgattgatgctattgcggaagctgagggcatatcagtcagcagtaagcaatttaaggcaattgtcggaaaaggcctcattggtgatgtccctgtaatgcttgccaagccacagacttttatgaatgcaagtggtcggacagctggtttcatacttcaagataccactcaatcaattagttgtgatctacgatgatcttgatctaccctttgcgaaattgcgtctgctaccaaaggggggacatggtggccacaatgggtattcatttcttttctagaagccgtcttaccccttgtactccctggctaaattggaagggacttgaattaatgcttcaatagaaataatgtataacaccataattataaattgatatttactcacaagccttccctccactatgagacggctgttacatttctttttcttcgaatggaacttgaacagaaatacttgtgaaccctctgttttcttcaatagttcacacgccatggtaatgtagttctatcataactatcatgttttgttttgcttaaccatttgtacaaattgcaggatgaggagtattgttgaccatttgaatcagagccgtgattttggacgcctaaggattggcattggacggccacctgaggagctgggtgctatcaattttgttctgcggtcattcaccaagcaggaaaaggaagagcttgaagtcacgttccaaaggagcttgcaagctgtaagaattatggtacgggaaggattcaacaaaagtgcacagtttgtgaatactccacagccaccagaaatgctgaatagatgagagcccaacgacacatatacaatattaggttccataatcaaaaaatataatattaggttcgtctagttgctggccgccaacatgtatgtgccctaattgattagtagaggttttcatttgatcacacatcaagtcatgtaaattggattcacatattgttttcagattattatggggattatttggatttatgttttgtgtttttttttcggcgacaacccattgtatgtactgctccaacgttcatggatctcactaccaaaccacaaaatgtttagaatgacagacatgttttgaagt

SEQ ID NO: 60155 - DNA, 1537 bp, Zea Mays
tcaccacaaacacgcttgggcctggccaccctactaggcccatgcccatgggttatcggtccgccgctccgccctgtactcttttggtcaatagcgaccttttgcttgttcaactcggactcggacccctggatggaaccgcgtgctttttagctaccgaacggcggcgatgcgtcttttctccggcgtcctcgattcttcgtccgcgcttgcctccgccgtcctgggctccgtgtccgaccgcctcggattctcgcgcatagttttcggtcgagcgagcccttcgaacatgccggctctcgcttgttctgccgcttcctcgtcttctgccgctaccggcgcccagaaaccgtggctcttcgtcggtctggggaaccccgggcggatgtacaaaggcactcggcataacgttgggtttgagatgattgatgctattgcggaagctgagggcatatcagtcagcagtaagcaatttaaggcaattgtcggaaaaggcctcattggtgatgtccctgtaatgcttgccaagccacagacttttatgaatgcaagtggtgagtctgtcggacagctggtttcatacttcaagataccactcaatcaattagttgtgatctacgatgatcttgatctaccctttgcgaaattgcgtctgctaccaaaggggggacatggtggccacaatgggtattcatttcttttctagaagccgtcttaccccttgtactccctggctaaattggaagggacttgaattaatgcttcaatagaaataatgtataacaccataattataaattgatatttactcacaagccttccctccactatgagacggctgttacatttctttttcttcgaatggaacttgaacagaaatacttgtgaaccctctgttttcttcaatagttcacacgccatggtaatgtagttctatcataactatcatgttttgttttgcttaaccatttgtacaaattgcaggatgaggagtattgttgaccatttgaatcagagccgtgattttggacgcctaaggattggcattggacggccacctgaggagctgggtgctatcaattttgttctgcggtcattcaccaagcaggaaaaggaagagcttgaagtcacgttccaaaggagcttgcaagctgtaagaattatggtacgggaaggattcaacaaaagtgcacagtttgtgaatactccacagccaccagaaatgctgaatagatgagagcccaacgacacatatacaatattaggttccataatcaaaaaatataatattaggttcgtctagttgctggccgccaacatgtatgtgccctaattgattagtagaggttttcatttgatcacacatcaagtcatgtaaattggattcacatattgttttcagattattatggggattatttggatttatgttttgtgtttttttttcggcgacaacccattgtatgtactgctccaacgttcatggatctcactaccaaaccacaaaatgtttagaatgacagacatgttttgaagt

SEQ ID NO: 60156 - DNA, 1246 bp, Zea Mays
tcaccacaaacacgcttgggcctggccaccctactaggcccatgcccatgggttatcggtccgccgctccgccctgtactcttttggtcaatagcgaccttttgcttgttcaactcggactcggacccctggatggaaccgcgtgctttttagctaccgaacggcggcgatgcgtcttttctccggcgtcctcgattcttcgtccgcgcttgcctccgccgtcctgggctccgtgtccgaccgcctcggattctcgcgcatagttttcggtcgagcgagcccttcgaacatgccggctctcgcttgttctgccgcttcctcgtcttctgccgctaccggcgcccagaaaccgtggctcttcgtcggtctggggaaccccgggcggatgtacaaaggcactcggcataacgttgggtttgagatgattgatgctattgcggaagctgagggcatatcagtcagcagtaagcaatttaaggcaattgtcggaaaaggcctcattggtgatgtccctgtaatgcttgccaagccacagacttttatgaatgcaagtggtgagtctgtcggacagctggtttcatacttcaagataccactcaatcaattagttgtgatctacgatgatcttgatctaccctttgcgaaattgcgtctgctaccaaaggggggacatggtggccacaatgggatgaggagtattgttgaccatttgaatcagagccgtgattttggacgcctaaggattggtattggcattggacggccacctgaggagctgggtgctatcaattttgttctgcggtcattcaccaagcaggaaaaggaagagcttgaagtcacgttccaaaggagcttgcaagctgtaagaattatggtacgggaaggattcaacaaaagtgcacagtttgtgaatactccacagccaccagaaatgctgaatagatgagagcccaacgacacatatacaatattaggttccataatcaaaaaatataatattaggttcgtctagttgctggccgccaacatgtatgtgccctaattgattagtagaggttttcatttgatcacacatcaagtcatgtaaattggattcacatattgttttcagattattatggggattatttggatttatgttttgtgtttttttttcggcgacaacccattgtatgtactgctccaacgttcatggatctcactaccaaaccacaaaatgtttagaatgacagacatgttttgaagt

SEQ ID NO: 60157 - DNA, 558 bp, Zea Mays
ggcaggatgaggagtattgttgaccatttgaatcagagccgtgattttggacgcctaaggattggcattggacggccacctgaggagctgggtgctatcaattttgttctgcggtcattcaccaagcaggaaaaggaagagcttgaagtcacgttccaaaggagcttgcaagctgtaagaattatggtacgggaaggattcaacaaaagtgcacagtttgtgaatactccacagccaccagaaatgctgaatagatgagagcccaacgacacatatacaatattaggttccataatcaaaaaatataatattaggttcgtctagttgctggccgccaacatgtatgtgccctaattgattagtagaggttttcatttgatcacacatcaagtcatgtaaattggattcacatattgttttcagattattatggggattatttggatttatgttttgtgtttttttttcggcgacaacccattgtatgtactgctccaacgttcatggatctcactaccaaaccacaaaatgtttagaatgacagacatgttttgaagt

SEQ ID NO: 60158 - DNA, 1994 bp, Zea Mays
cttttttcttgctgaagatgcgcgtgtgtgcgttggaattttccaaggaggaagaagggaaagcctaggaaagccaccgctcaccttctctttctctgtagcctctgccaccaaacagctttggagtgggatctcctcttccttccccgccctcttccgccgacagcgggagagtacgcggcgcagcggctacaccaccgtctccaggctcccaaacacgtccctgccatccttttttgactccggagtccctcccctccttgcctacctggcgaggatcccatacccaatcccatccaactagcttcctactacttcccccccgtcctctcgatccctctccccgttcccctgaccagccgggcgtcaagtggcagggaggagaggcggcaccgcgtgtgaggctcaatggggaaggggagcgcgcgggcgctggccctggcgctcgccgtgattctcgcctgctccgacgtcgccgtcgtcacggctcaggaaaccgagcggatcgaaggaagcgctggtgatgtgttagaagatgaccctgttgggaggctcaaggtctatgtctatgatctccccagcaaatacaacaagaagctgctcaagaaggatcctaggtgcctgaaccatatgtttgccgctgagatcttcatgcaccggttcctgttgtcaagcgctgtccgaacttttaatcctgaggaagcagattggttctacacacccgtatacacgacgtgtgatctgacccctaagggtcttcccttgcctttcaagtctcctcggatgatgcgtagcgcaatccagctgattgctacgaactggccttactggaatagatcagagggcgcagatcatttctttgtcacaccccatgactttggtgcttgctttcattatcaggaagagaaagccattggacggggaatccttcccttgcttcagcgtgctacgttggttcagacctttggacagaagaaccatgtctgcctgaaggatgggtccatcacgatcccgccatatgcgcctcctcagaaaatgcagactcaccttatccccccggacacccctcgatccatctttgtgtacttccgaggtctgttctatgacaccggcaatgaccccgagggcggatactacgcaagaggtgctcgtgcatcggtctgggagaacttcaagaacaacccgctgtttgacatctcgaccgatcacccaccaacatactacgaagacatgcagcgctcggtgttctgcctctgcccgttgggctgggcaccgtggagtcccaggctggtggaggccgtggtgttcggctgcatccccgtcatcatcgccgacgacatcgtgctgcccttcgcggacgccatcccgtgggaggagatcgccgtgttcgtgcccgaggacgacgtcctgaggctggacaccatcctcacgtccatccccatggacgagatcctccgcaagcagaggctgctggccaacccgtccatgaagcaggcgatgctgttcccgcagcccgcggagccgagggacgccttccaccaggtcctcaacgggctggcgcgcaagctgccccaccccaaggacgtcttcctcaagcccggccagaaggtgctcaactggacagagggcgcccaggatgacctcaagccgtggtaggccgtggctgctgctcttttgtaaacgacacaaccagatcgatgatggtgatgctgatgagtgaaccacacaaccattggttaaatgtaaagctcttaatcctcttgctcctccaacctttcttctttttgattttgaggcaatgtgcatgtcttgcctgtatatatacactagtacatgacaatcagggtggccggccggggcaagacaaattgaggtgccaacacattacacactaatagtattagtattatattctagcatgttttgacggcaattcctttctttagaactcggtatagcagagggacaaacccaacgtttttttttgtttttta

SEQ ID NO: 60159 - DNA, 1894 bp, Zea Mays
gaattttccaaggaggaagaagggaaagcctaggaaagccaccgctcaccttctctttctctgtagcctctgccaccaaacagctttggagtgggatctcctcttccttccccgccctcttccgccgacagcgggagagtacgcggcgcagcggctacaccaccgtctccaggctcccaaacacgtccctgccatccttttttgactccggagtccctcccctccttgcctacctggcgaggatcccatacccaatcccatccaactagcttcctactacttcccccccgtcctctcgatccctctccccgttcccctgaccagccgggcgtcaagtggcagggaggagaggcggcaccgcgtgtgaggctcaatggggaaggggagcgcgcgggcgctggccctggcgctcgccgtgattctcgcctgctccgacgtcgccgtcgtcacggctcaggaaaccgagcggatcgaaggaagcgctggtgatgtgttagaagatgaccctgttgggaggctcaaggtctatgtctatgatctccccagcaaatacaacaagaagctgctcaagaaggatcctaggtgcctgaaccatatgtttgccgctgagatcttcatgcaccggttcctgttgtcaagcgctgtccgaacttttaatcctgaggaagcagattggttctacacacccgtatacacgacgtgtgatctgacccctaagggtcttcccttgcctttcaagtctcctcggatgatgcgtagcgcaatccagctgattgctacgaactggccttactggaatagatcagagggcgcagatcatttctttgtcacaccccatgactttggtgcttgctttcattatcagagaaagccattggacggggaatccttcccttgcttcagcgtgctacgttggttcagacctttggacagaagaaccatgtctgcctgaaggatgggtccatcacgatcccgccatatgcgcctcctcagaaaatgcagactcaccttatccccccggacacccctcgatccatctttgtgtacttccgaggtctgttctatgacaccggcaatgaccccgagggcggatactacgcaagaggtgctcgtgcatcggtctgggagaacttcaagaacaacccgctgtttgacatctcgaccgatcacccaccaacatactacgaagacatgcagcgctcggtgttctgcctctgcccgttgggctgggcaccgtggagtcccaggctagtcgaagccgtggtctttggctgcatcccggtgatcatcgcagacgacatcgtcctccccttcgcggacgccatcccgtgggaggagatcggcgtcttcgttgcagaggatgatgtcccgcagctggacagcatcctgacatccatccccacagacgtcgtgctgaggaagcagcggctccttgcgaacccgtcgatgaagcaggccatgctgttcccccagcctgctcagccaggagatgcgttccaccagatcctgaacggcctagcgcgcaagctcccgcacggcagcaatgtcttcctgaagcctggtgagagggccctgaactggaccgctggaccaccaggcgacctgaaaccttggtagcgtcctgtggatctgagatggatacgacttgttctgaaaggaaatatggagaacatgattatatatatacccgtgcctttgagttaccatgggtgcatagtgctgacaagaagccaaatgtacatcgttctatgttctttttctataactgttatatacatataaatatcttcgtttcttcttcttctttcttccatttcttcactagatgataagagtgccaagccttgtcggtcatatgtggatatatcataaatgaaattcacaagattgtact

SEQ ID NO: 60160 - DNA, 3808 bp, Zea Mays
aaaaaaacaaaaatagccaaccgagcgagacagaggcacacagccggacgcgcaccacggtaccagagcacacacggaggtgccaccgcgcgccgcagccggagcatggcgacgccgctggccgggaagggcccgatcgcggcggcgatcccgcggtccccacccccactggccgagggcggcgcgggagggtcggcggccgaggcgcccgtgctcatcttcgtctacttccacaaggcgatccgcgcggagctggagcggatgcacgccgcggcggtgcgcctcgccatggggcgcgcgggcggggacgtggccacgctcgaggcgcgctgccggttcctcttcaccgtctacaggcaccactgcgacgccgaggacgcggttatttttccagcacttgacattcgagtgaaaaatgtcgcagggacatattctcttgaacataaaggagaaaatgatcttttcgcacatctattcactctgctacagttggatgtgcagaatgataatgctattaggagggaacttgcatcctgtactggagcaattcggacgtttgtatcccaacacatgtccaaggaagaagaacaggttgttttcacgtggtttggagggaaatcagaaagcagttctacatgtgagtctagctctggccaaacagataaacatgcacattcacttgaacacaccaaaattggaaagaggaagtctatagaatcaagtcagcttgtcactcatccaattgatgagattctgtattggcacaatgctgttctgagagaactgagtgatatagcagaggagactaaaaggatacatcagtctggagatttttctgacatagcaggatttaatatgaggctgcaatttattgcagatgtgtgcattttccacaggagcatgctgaagaagaacggcgattgaataaatttaggagtttaattgaacaaattcaactagcaggagccaagtcaactgtagttgattttcattcagagttatgctcacaagctgatcaaataatgcagaaaattgagagtcacttcaatgatgaggaaataaaggtacttcctaaagctaggataaagttctcaccggagaaacagagggaacttttatatcagagtctatgtgtcatgccactaaagctgttggagcgtgttctaccatggtttatagtgaaactgaatgatgcagaggcagtgtcttttcttcagaatatgcggttggcaggttgtctctgttatgttcctacttctctcttgaataataaaacagttttccgtacctttcctaattttttatatttaatgaatacgtcgcagcaccttcctctgaaactgcattggttactcttctctctggctgggcgtgcaaaggtcgtctggaggacacatccaaccctggaaagttcgtatgcatggcatcaggagcggtcacttgtgcgtcagatgggaatggtttcaaaacatgccagtcactctgtccatgttatgtaagtagcaatggagctttttcaaaaccagttaagagagcaagtcaaggagaatctagcacaaatactgacagaaatcatagctcacacaatgctgctactgaagcatcgcaatgtaacaacagagcctgttacattcccaggttaagagtagaaagtagctaccttggtgttcattcatctacccctacaaaatcctttcgccctctgtctttcaattatgttgcaccttcattatattcaagccttttctcatgggacacagatacactagtatccggcccagataacatttctaagccaattgataccatattcaaattccacaaggcaattcgcaaggatttagagtttttggatttggaatctggaaagcttattgacgggaacgagtcttgccttagccaattcattggaaggtttcgtttactgtggggtctatatagagcacacagcaatgctgaagatgagattgtatttcctgctcttgaatcgaaggaggcattgcacaatgttagtcattcatacactcttgatcacaagcaggaagaaaaattgttccaagatatatccactgtactatctgaactttctcaactacatgatggtttgagctatcctcttgatgttgaagctggaacaaatgatatttcaagtaatgagattgattgggctagaaagcgtaatgaacttttgacaaagcttcaaggattatgcaaatctatccgggtcacgttgtcaaatcatgttcatagagaagaacttgagttgtggccattgttcgataaacatttttctgtagacgagcaggataagattatcggtcatataattggaactactggtgctgaggttctgcagtcaatgttaccttgggttacatcagcacttagtttagaggaacagaacatgatgctggatacatggaagcaagcaaccaaaaacaccatgtttgatgaatggctaaatgaatggtggaagggaccttcaacttcatctgacccatcagacaaggcttctactccttcagaagaaagtcattttcaggagaatcttgaacaaaatgaccagatgtttaggcctggttggaaggacattttccgaatgaatcagagtgagctcgaggctgagattcgaaaggtctctcgagattctactcttgatccaaggaggaaggcctatctgatccaaaatctcatgaccagaaatcaccacaaccaagcgtcgaaggacataatggatgtacacgacgacctggatgtgttgcttcgtaccgagacccagggaaacaaatatttggctgtgagcattacaaaagaaactgcaagcttgttgctgcatgctgcgataagttattcacttgcagattctgtcacgataaagttagtgaccatacaatggacaggaaatcagtgatggagatgatgtgcatgcaatgtctgaatgttcaacctgttggtccaaattgtcaatccccttcttgcaatggactgtccatggccaagtattattgtagcatatgcaagttcttcgatgatgaaaggagtgtctaccattgtcctttttgcaacttgtgtcgccttgggagcggattgggcactgatttttttcattgcatgaagtgcaattgttgccttggcataaagatgatagaacataaatgccgggaaaagatgctagagatgaactgtccaatctgctgcgactttttgtttacatcgagtgcaccagttaaaggccttccttgtggccacttcatgcattcggcttgttttcaggcatatacttgtacccactacacttgtccaatctgctgcaaatccttgggagatatgacggtgtattttggcatgcttgatggtttgctggctgcagaacagcttcctgaggaataccaggaccggtgccaggatatactgtgtaacgactgcgagagaaaaggcaggtcacggtttcattggctctaccacaagtgtggtttctgtggttcttacaacaccagagttatcaagactgatacggcagagtgttctcgccctctataatttcttttatgcaatccatttgtatatatatatcgacggggtagaaaccttgtgaccgtaggtgtgatagtttttttatagagtgaactgggggaggaaccccacctggatgtattatgaggaaaaagtgactgtgcacatgaggagtctgagaattactcgctcccgtcccaaactaactgtatttctacgatttgaaatatattcgctcatatatttcctgtgttgcccttcagctgtttcctgggaacatctcggtttgtatcag

SEQ ID NO: 60161 - DNA, 4028 bp, Zea Mays
gcgagacagaggcacacagccggacgcgcaccacggtaccagagcacacacggaggtgccaccgcgcgccgcagccggagcatggcgacgccgctggccgggaagggcccgatcgcggcggcgatcccgcggtccccacccccactggccgagggcggcgcgggagggtcggcggccgaggcgcccgtgctcatcttcgtctacttccacaaggcgatccgcgcggagctggagcggatgcacgccgcggcggtgcgcctcgccatggggcgcgcgggcggggacgtggccacgctcgaggcgcgctgccggttcctcttcaccgtctacaggcaccactgcgacgccgaggacgcggttatttttccagcacttgacattcgagtgaaaaatgtcgcagggacatattctcttgaacataaaggagaaaatgatcttttcgcacatctattcactctgctacagttggatgtgcagaatgataatgctattaggagggaacttgcatcctgtactggagcaattcggacgtttgtatcccaacacatgtccaaggaagaagaacaggtcttcccgttactcatcaagaagttttcacacgaagagcaagcagatttagtatggcagttcttatgtagcatccctgtaaacatgatggcaaaatttcttccatggatttctgcttctgtttctacagatgagaatcaagatattcttgactgcctaagtaaaatagttcctgaagaaaaactcctccaagaggtcctcatgattatggcatcacacatcttaacttcccatttgtaaaattattggcgtatttcacttcagttttttactttgtgaaggttgttttcacgtggtttggagggaaatcagaaagcagttctacatgtgagtctagctctggccaaacagataaacatgcacattcacttgaacacaccaaaattggaaagaggaagtctatagaatcaagtcagcttgtcactcatccaattgatgagattctgtattggcacaatgctgttctgagagaactgagtgatatagcagaggagactaaaaggatacatcagtctggagatttttctgacatagcaggatttaatatgaggctgcaatttattgcagatgtgtgcattttccacagtattgccgaggatcaagttatattccctgcagtggatggtgaattgtcctttgtgcaggagcatgctgaagaagaacggcgattgaataaatttaggagtttaattgaacaaattcaactagcaggagccaagtcaactgtagttgattttcattcagagttatgctcacaagctgatcaaataatgcagaaaattgagagtcacttcaatgatgaggaaataaaggtacttcctaaagctaggataaagttctcaccggagaaacagagggaacttttatatcagagtctatgtgtcatgccactaaagctgttggagcgtgttctaccatggtttatagtgaaactgaatgatgcagaggcagtgtcttttcttcagaatatgcggttggcagcaccttcctctgaaactgcattggttactcttctctctggctgggcgtgcaaaggtcgtctggaggacacatccaaccctggaaagttcgtatgcatggcatcaggagcggtcacttgtgcgtcagatgggaatggtttcaaaacatgccagtcactctgtccatgttatgtaagtagcaatggagctttttcaaaaccagttaagagagcaagtcaaggagaatctagcacaaatactgacagaaatcatagctcacacaatgctgctactgaagcatcgcaatgtaacaacagagcctgttacattcccaggttaagagtagaaagtagctaccttggtgttcattcatctacccctacaaaatcctttcgccctctgtctttcaattatgttgcaccttcattatattcaagccttttctcatgggacacagatacactagtatccggcccagataacatttctaagccaattgataccatattcaaattccacaaggcaattcgcaaggatttagagtttttggatttggaatctggaaagcttattgacgggaacgagtcttgccttagccaattcattggaaggtttcgtttactgtggggtctatatagagcacacagcaatgctgaagatgagattgtatttcctgctcttgaatcgaaggaggcattgcacaatgttagtcattcatacactcttgatcacaagcaggaagaaaaattgttccaagatatatccactgtactatctgaactttctcaactacatgatggtttgagctatcctcttgatgttgaagctggaacaaatgatatttcaagtaatgagattgattgggctagaaagcgtaatgaacttttgacaaagcttcaaggattatgcaaatctatccgggtcacgttgtcaaatcatgttcatagagaagaacttgagttgtggccattgttcgataaacatttttctgtagacgagcaggataagattatcggtcatataattggaactactggtgctgaggttctgcagtcaatgttaccttgggttacatcagcacttagtttagaggaacagaacatgatgctggatacatggaagcaagcaaccaaaaacaccatgtttgatgaatggctaaatgaatggtggaagggaccttcaacttcatctgacccatcagacaaggcttctactccttcagaagaaagtcattttcaggagaatcttgaacaaaatgaccagatgtttaggcctggttggaaggacattttccgaatgaatcagagtgagctcgaggctgagattcgaaaggtctctcgagattctactcttgatccaaggaggaaggcctatctgatccaaaatctcatgaccagccgttggatagctgctcagcagaaatcaccacaaccaagcgtcgaaggacataatggatgtacacgacgacctggatgtgttgcttcgtaccgagacccagggaaacaaatatttggctgtgagcattacaaaagaaactgcaagcttgttgctgcatgctgcgataagttattcacttgcagattctgtcacgataaagttagtgaccatacaatggacaggaaatcagtgatggagatgatgtgcatgcaatgtctgaatgttcaacctgttggtccaaattgtcaatccccttcttgcaatggactgtccatggccaagtattattgtagcatatgcaagttcttcgatgatgaaaggagtgtctaccattgtcctttttgcaacttgtgtcgccttgggagcggattgggcactgatttttttcattgcatgaagtgcaattgttgccttggcataaagatgatagaacataaatgccgggaaaagatgctagagatgaactgtccaatctgctgcgactttttgtttacatcgagtgcaccagttaaaggccttccttgtggccacttcatgcattcggcttgttttcaggtaatggaaaaagctgataatgaactagtagcactaagcacgccaactgtacaaaccacaaatagacgcagcaacctgaggcggggaaacgaacgaggggtgaagaaaaagctcctaggctagggcatacgacatgagccaaggcgcacctacccagctcgatggactggactagagccccgagctgtgaattctcgccacgacgtacgccaggtggtttggacttggagcttgcattgggaactcaggcagcgccgcgccggctagctggtgaatgaatgacccggtgtgctcgtggtccgtggagctagtcgtccggcactcggtacgcgtcggcggtgatctcggtcagccacagccccgggaacagcgactgcacaagggaaaacgaacagtttattattcttgcacacaacaatcatgtccggtccgatagaatatgcattcgtattactacctagtggcaactggcaagcaagcttaaacggaaccgtatcgagcggataaaca

SEQ ID NO: 60162 - DNA, 5515 bp, Zea Mays
ggcacacagccggacgcgcaccacggtaccagagcacacacggaggtgccaccgcgcgccgcagccggagcatggcgacgccgctggccgggaagggcccgatcgcggcggcgatcccgcggtccccacccccactggccgagggcggcgcgggagggtcggcggccgaggcgcccgtgctcatcttcgtctacttccacaaggcgatccgcgcggagctggagcggatgcacgccgcggcggtgcgcctcgccatggggcgcgcgggcggggacgtggccacgctcgaggcgcgctgccggttcctcttcaccgtctacaggcaccactgcgacgccgaggacgcgggacatattctcttgaacataaaggagaaaatgatcttttcgcacatctattcactctgctacagttggatgtgcagaatgataatgctattaggagggaacttgcatcctgtactggagcaattcggacgtttgtatcccaacacatgtccaaggaagaagaacaggtcttcccgttactcatcaagaagttttcacacgaagagcaagcagatttagtatggcagttcttatgtagcatccctgtaaacatgatggcaaaatttcttccatggatttctgcttctgtttctacagatgagaatcaagatattcttgactgcctaagtaaaatagttcctgaagaaaaactcctccaagaggttgttttcacgtggtttggagggaaatcagaaagcagttctacatgtgagtctagctctggccaaacagataaacatgcacattcacttgaacacaccaaaattggaaagaggaagtctatagaatcaagtcagcttgtcactcatccaattgatgagattctgtattggcacaatgctgttctgagagaactgagtgatatagcagaggagactaaaaggatacatcagtctggagatttttctgacatagcaggatttaatatgaggctgcaatttattgcagatgtgtgcattttccacagtattgccgaggatcaagttatattccctgcagtggatggtgaattgtcctttgtgcaggagcatgctgaagaagaacggcgattgaataaatttaggagtttaattgaacaaattcaactagcaggagccaagtcaactgtagttgattttcattcagagttatgctcacaagctgatcaaataatgcagaaaattgagagtcacttcaatgatgaggaaataaaggtacttcctaaagctaggataaagttctcaccggagaaacagagggaacttttatatcagagtctatgtgtcatgccactaaagctgttggagcgtgttctaccatggtttatagtgaaactgaatgatgcagaggcagtgtcttttcttcagaatatgcggttggcagcaccttcctctgaaactgcattggttactcttctctctggctgggcgtgcaaaggtcgtctggaggacacatccaaccctggaaagttcgtatgcatggcatcaggagcggtcacttgtgcgtcagatgggaatggtttcaaaacatgccagtcactctgtccatgttatgtaagtagcaatggagctttttcaaaaccagttaagagagcaagtcaaggagaatctagcacaaatactgacagaaatcatagctcacacaatgctgctactgaagcatcgcaatgtaacaacagagcctgttacattcccaggttaagagtagaaagtagctaccttggtgttcattcatctacccctacaaaatcctttcgccctctgtctttcaattatgttgcaccttcattatattcaagccttttctcatgggacacagatacactagtatccggcccagataacatttctaagccaattgataccatattcaaattccacaaggcaattcgcaaggatttagagtttttggatttggaatctggaaagcttattgacgggaacgagtcttgccttagccaattcattggaaggtttcgtttactgtggggtctatatagagcacacagcaatgctgaagatgagattgtatttcctgctcttgaatcgaaggaggcattgcacaatgttagtcattcatacactcttgatcacaagcaggaagaaaaattgttccaagatatatccactgtactatctgaactttctcaactacatgatggtttgagctatcctcttgatgttgaagctggaacaaatgatatttcaagtaatgagattgattgggctagaaagcgtaatgaacttttgacaaagcttcaaggattatgcaaatctatccgggtcacgttgtcaaatcatgttcatagagaagaacttgagttgtggccattgttcgataaacatttttctgtagacgagcaggataagattatcggtcatataattggaactactggtgctgaggttctgcagtcaatgttaccttgggttacatcagcacttagtttagaggaacagaacatgatgctggatacatggaagcaagcaaccaaaaacaccatgtttgatgaatggctaaatgaatggtggaagggaccttcaacttcatctgacccatcagacaaggcttctactccttcagaagaaagtcattttcaggagaatcttgaacaaaatgaccagatgtttaggcctggttggaaggacattttccgaatgaatcagagtgagctcgaggctgagattcgaaaggtctctcgagattctactcttgatccaaggaggaaggcctatctgatccaaaatctcatgaccagccgttggatagctgctcagcagaaatcaccacaaccaagcgtcgaaggacataatggatgtacacgacgacctggatgtgttgcttcgtaccgagacccagggaaacaaatatttggctgtgagcattacaaaagaaactgcaagcttgttgctgcatgctgcgataagttattcacttgcagattctgtcacgataaagttagtgaccatacaatggacaggaaatcagtgatggagatgatgtgcatgcaatgtctgaatgttcaacctgttggtccaaattgtcaatccccttcttgcaatggactgtccatggccaagtattattgtagcatatgcaagttcttcgatgatgaaaggagtgtctaccattgtcctttttgcaacttgtgtcgccttgggagcggattgggcactgatttttttcattgcatgaagtgcaattgttgccttggcataaagatgatagaacataaatgccgggaaaagatgctagagatgaactgtccaatctgctgcgactttttgtttacatcgagtgcaccagttaaaggccttccttgtggccacttcatgcattcggcttgttttcaggcatatacttgtacccactacacttgtccaatctgctgcaaatccttgggagatatgacggtgtattttggcatgcttgatggtttgctggctgcagaacagcttcctgaggaataccaggaccggtgccaggatatactgtgtaacgactgcgagagaaaaggcaggtcacggtttcattggctctaccacaagtgtggtttctgtggttcttacaacaccagagttatcaagactgatacggcagagtgttctcgccctctataatttcttttatgcaatccatttgtatatatatatcgacggggtagaaaccttgtgaccgtaggtgtgatagtttttttatagagtgaactgggggaggaaccccacctggatgtattatgaggaaaaagtgactgtgcacatgaggagtctgagaattactcgctcccgtcccaaactaactgtatttctacgatttgaaatatattcgctcatatatttcctgtgttgcccttcagctgtttcctgggaacatctcggtttgtatcagcgatacagttggagaccttctgaacactgtccccaactcaagccgactcagttgagctgaagagcaaataaatactcaggttgcgattgacatgggcgtgaaaatgtcaacaagctctttgaaagaacccaatgtttctcaatcaaaagacgtggagaatggaaatgacaattctgtgaaatcctgcattagcaagcctgtgttgaatggcaacaaatgtgccaacaaggaacaaaatgttccgtcttgttgccctggcgctgtgacaaatggaaacgaggctggaaatgcagacgtggagtacattgattctgagaatctagtggatctaccagatgttgatgcagctctatgtaccttagttaaaaggttggattcaaaggactgggttatgacatgtgaagctctcaacaatgttcgtcagttggcgatgtatcacaaggaaagattgcaggagctgctggagcctctagttcctcttatcgtgaaatctgtgaagaacccaagaagtgctgtatgcaaaacagcactgatgacttgtgctgacatctttaaggtctatggtgacctactggttgagtctattgatccactgctagtgcagctgtttctaaaggcttcacaagataagcgttttgtctgtgaagctgctgaggcagctcttacatcgatgacaagttggatctccccattactactgttaccaagaatgcagccctacctcaagaacaggaatccgcgggttcgagcaaaagcatcagtgtgtttgagcaagagtgtaccttgcttagatgtgcagggaatcagagaatatggaatggataagctcgtccagattgcagcaacccaactcagtgaccagcttcctgaatcaagagaggctgctcgcaacctggcactggaactacaggtattatatgagaagtctcaggcctccacctctgacgaaaatgagggtgaaccttctgtctcacaagatgctgagtcatgggaggctttctgtcagtccaagctttctgccttaagcgcccaagccatccttcgcgtgacctctactactccaaaagagggtgtcgcctctacttcaaatgctacaaaagagggtgtcacggcggccccaaaagaaggtttggatgtggattgctagcatgaggcacacaagcccacaatgagtttgtagatgcgatcagagcgcgattgtccacccccttcggtttttttgatgtacatgcttatggctggtccttggttacatccagttgggaatcggttgattattggttcgggaattcaggtgtgaccgcggtgttaatattggttgggacatatatctgctatagttgattgtataatcattttgttccactacttggtatttgtttcgccaggtgaacgtagaatttgacccacggtcagtgttatatacagtcctctttctgccacatcgggtgcaggttatgttatttttgaaggagatgtcattggcattcgtgcgccacccttatgttgtactctctctccgttttaaatcataagtcgttttgacttttttttaagtatatagcttttgttatgcatctagatataagttgtctataaaa

SEQ ID NO: 60163 - DNA, 3828 bp, Zea Mays
atggcgacgccgctggccgggaagggcccgatcgcggcggcgatcccgcggtccccacccccactggccgagggcggcgcgggagggtcggcggccgaggcgcccgtgctcatcttcgtctacttccacaaggcgatccgcgcggagctggagcggatgcacgccgcggcggtgcgcctcgccatggggcgcgcgggcggggacgtggccacgctcgaggcgcgctgccggttcctcttcaccgtctacaggcaccactgcgacgccgaggacgcggttatttttccagcacttgacattcgagtgaaaaatgtcgcagggacatattctcttgaacataaaggagaaaatgatcttttcgcacatctattcactctgctacagttggatgtgcagaatgataatgctattaggagggaacttgcatcctgtactggagcaattcggacgtttgtatcccaacacatgtccaaggaagaagaacaggtcttcccgttactcatcaagaagttttcacacgaagagcaagcagatttagtatggcagttcttatgtagcatccctgtaaacatgatggcaaaatttcttccatggatttctgcttctgtttctacagatgagaatcaagatattcttgactgcctaagtaaaatagttcctgaagaaaaactcctccaagaggttgttttcacgtggtttggagggaaatcagaaagcagttctacatgtgagtctagctctggccaaacagataaacatgcacattcacttgaacacaccaaaattggaaagaggaagtctatagaatcaagtcagcttgtcactcatccaattgatgagattctgtattggcacaatgctgttctgagagaactgagtgatatagcagaggagactaaaaggatacatcagtctggagatttttctgacatagcaggatttaatatgaggctgcaatttattgcagatgtgtgcattttccacaggagcatgctgaagaagaacggcgattgaataaatttaggagtttaattgaacaaattcaactagcaggagccaagtcaactgtagttgattttcattcagagttatgctcacaagctgatcaaataatgcagaaaattgagagtcacttcaatgatgaggaaataaaggtacttcctaaagctaggataaagttctcaccggagaaacagagggaacttttatatcagagtctatgtgtcatgccactaaagctgttggagcgtgttctaccatggtttatagtgaaactgaatgatgcagaggcagtgtcttttcttcagaatatgcggttggcagcaccttcctctgaaactgcattggttactcttctctctggctgggcgtgcaaaggtcgtctggaggacacatccaaccctggaaagttcgtatgcatggcatcaggagcggtcacttgtgcgtcagatgggaatggtttcaaaacatgccagtcactctgtccatgttatgtaagtagcaatggagctttttcaaaaccagttaagagagcaagtcaaggagaatctagcacaaatactgacagaaatcatagctcacacaatgctgctactgaagcatcgcaatgtaacaacagagcctgttacattcccaggttaagagtagaaagtagctaccttggtgttcattcatctacccctacaaaatcctttcgccctctgtctttcaattatgttgcaccttcattatattcaagccttttctcatgggacacagatacactagtatccggcccagataacatttctaagccaattgataccatattcaaattccacaaggcaattcgcaaggatttagagtttttggatttggaatctggaaagcttattgacgggaacgagtcttgccttagccaattcattggaaggtttcgtttactgtggggtctatatagagcacacagcaatgctgaagatgagattgtatttcctgctcttgaatcgaaggaggcattgcacaatgttagtcattcatacactcttgatcacaagcaggaagaaaaattgttccaagatatatccactgtactatctgaactttctcaactacatgatggtttgagctatcctcttgatgttgaagctggaacaaatgatatttcaagtaatgagattgattgggctagaaagcgtaatgaacttttgacaaagcttcaaggattatgcaaatctatccgggtcacgttgtcaaatcatgttcatagagaagaacttgagttgtggccattgttcgataaacatttttctgtagacgagcaggataagattatcggtcatataattggaactactggtgctgaggttctgcagtcaatgttaccttgggttacatcagcacttagtttagaggaacagaacatgatgctggatacatggaagcaagcaaccaaaaacaccatgtttgatgaatggctaaatgaatggtggaagggaccttcaacttcatctgacccatcagacaaggcttctactccttcagaagaaagtcattttcaggagaatcttgaacaaaatgaccagatgtttaggcctggttggaaggacattttccgaatgaatcagagtgagctcgaggctgagattcgaaaggtctctcgagattctactcttgatccaaggaggaaggcctatctgatccaaaatctcatgaccagccgttggatagctgctcagcagaaatcaccacaaccaagcgtcgaaggacataatggatgtacacgacgacctggatgtgttgcttcgtaccgagacccagggaaacaaatatttggctgtgagcattacaaaagaaactgcaagcttgttgctgcatgctgcgataagttattcacttgcagattctgtcacgataaagttagtgaccatacaatggacaggaaatcagtgatggagatgatgtgcatgcaatgtctgaatgttcaacctgttggtccaaattgtcaatccccttcttgcaatggactgtccatggccaagtattattgtagcatatgcaagttcttcgatgatgaaaggagtgtctaccattgtcctttttgcaacttgtgtcgccttgggagcggattgggcactgatttttttcattgcatgaagtgcaattgttgccttggcataaagatgatagaacataaatgccgggaaaagatgctagagatgaactgtccaatctgctgcgactttttgtttacatcgagtgcaccagttaaaggccttccttgtggccacttcatgcattcggcttgttttcaggcatatacttgtacccactacacttgtccaatctgctgcaaatccttgggagatatgacggtgtattttggcatgcttgatggtttgctggctgcagaacagcttcctgaggaataccaggaccggtgccaggatatactgtgtaacgactgcgagagaaaaggcaggtcacggtttcattggctctaccacaagtgtggtttctgtggttcttacaacaccagagttatcaagactgatacggcagagtgttctcgccctctataatttcttttatgcaatccatttgtatatatatatcgacggggtagaaaccttgtgaccgtaggtgtgatagtttttttatagagtgaactgggggaggaaccccacctggatgtattatgaggaaaaagtgactgtgcacatgaggagtctgagaattactcgctcccgtcccaaactaactgtatttctacgatttgaaatatattcgctcatatatttcctgtgttgcccttcagctgtttcctgggaacatctcggtttgtatcag

SEQ ID NO: 60164 - DNA, 3669 bp, Zea Mays
atggcgacgccgctggccgggaagggcccgatcgcggcggcgatcccgcggtccccacccccactggccgagggcggcgcgggagggtcggcggccgaggcgcccgtgctcatcttcgtctacttccacaaggcgatccgcgcggagctggagcggatgcacgccgcggcggtgcgcctcgccatggggcgcgcgggcggggacgtggccacgctcgaggcgcgctgccggttcctcttcaccgtctacaggcaccactgcgacgccgaggacgcggttatttttccagcacttgacattcgagtgaaaaatgtcgcagggacatattctcttgaacataaaggagaaaatgatcttttcgcacatctattcactctgctacagttggatgtgcagaatgataatgctattaggagggaacttgcatcctgtactggagcaattcggacgtttgtatcccaacacatgtccaaggaagaagaacaggttgttttcacgtggtttggagggaaatcagaaagcagttctacatgtgagtctagctctggccaaacagataaacatgcacattcacttgaacacaccaaaattggaaagaggaagtctatagaatcaagtcagcttgtcactcatccaattgatgagattctgtattggcacaatgctgttctgagagaactgagtgatatagcagaggagactaaaaggatacatcagtctggagatttttctgacatagcaggatttaatatgaggctgcaatttattgcagatgtgtgcattttccacagtattgccgaggatcaagttatattccctgcagtggatggtgaattgtcctttgtgcaggagcatgctgaagaagaacggcgattgaataaatttaggagtttaattgaacaaattcaactagcaggagccaagtcaactgtagttgattttcattcagagttatgctcacaagctgatcaaataatgcagaaaattgagagtcacttcaatgatgaggaaataaaggtacttcctaaagctaggataaagttctcaccggagaaacagagggaacttttatatcagagtctatgtgtcatgccactaaagctgttggagcgtgttctaccatggtttatagtgaaactgaatgatgcagaggcagtgtcttttcttcagaatatgcggttggcagcaccttcctctgaaactgcattggttactcttctctctggctgggcgtgcaaaggtcgtctggaggacacatccaaccctggaaagttcgtatgcatggcatcaggagcggtcacttgtgcgtcagatgggaatggtttcaaaacatgccagtcactctgtccatgttatgtaagtagcaatggagctttttcaaaaccagttaagagagcaagtcaaggagaatctagcacaaatactgacagaaatcatagctcacacaatgctgctactgaagcatcgcaatgtaacaacagagcctgttacattcccaggttaagagtagaaagtagctaccttggtgttcattcatctacccctacaaaatcctttcgccctctgtctttcaattatgttgcaccttcattatattcaagccttttctcatgggacacagatacactagtatccggcccagataacatttctaagccaattgataccatattcaaattccacaaggcaattcgcaaggatttagagtttttggatttggaatctggaaagcttattgacgggaacgagtcttgccttagccaattcattggaaggtttcgtttactgtggggtctatatagagcacacagcaatgctgaagatgagattgtatttcctgctcttgaatcgaaggaggcattgcacaatgttagtcattcatacactcttgatcacaagcaggaagaaaaattgttccaagatatatccactgtactatctgaactttctcaactacatgatggtttgagctatcctcttgatgttgaagctggaacaaatgatatttcaagtaatgagattgattgggctagaaagcgtaatgaacttttgacaaagcttcaaggattatgcaaatctatccgggtcacgttgtcaaatcatgttcatagagaagaacttgagttgtggccattgttcgataaacatttttctgtagacgagcaggataagattatcggtcatataattggaactactggtgctgaggttctgcagtcaatgttaccttgggttacatcagcacttagtttagaggaacagaacatgatgctggatacatggaagcaagcaaccaaaaacaccatgtttgatgaatggctaaatgaatggtggaagggaccttcaacttcatctgacccatcagacaaggcttctactccttcagaagaaagtcattttcaggagaatcttgaacaaaatgaccagatgtttaggcctggttggaaggacattttccgaatgaatcagagtgagctcgaggctgagattcgaaaggtctctcgagattctactcttgatccaaggaggaaggcctatctgatccaaaatctcatgaccagaaatcaccacaaccaagcgtcgaaggacataatggatgtacacgacgacctggatgtgttgcttcgtaccgagacccagggaaacaaatatttggctgtgagcattacaaaagaaactgcaagcttgttgctgcatgctgcgataagttattcacttgcagattctgtcacgataaagttagtgaccatacaatggacaggaaatcagtgatggagatgatgtgcatgcaatgtctgaatgttcaacctgttggtccaaattgtcaatccccttcttgcaatggactgtccatggccaagtattattgtagcatatgcaagttcttcgatgatgaaaggagtgtctaccattgtcctttttgcaacttgtgtcgccttgggagcggattgggcactgatttttttcattgcatgaagtgcaattgttgccttggcataaagatgatagaacataaatgccgggaaaagatgctagagatgaactgtccaatctgctgcgactttttgtttacatcgagtgcaccagttaaaggccttccttgtggccacttcatgcattcggcttgttttcaggcatatacttgtacccactacacttgtccaatctgctgcaaatccttgggagatatgacggtgtattttggcatgcttgatggtttgctggctgcagaacagcttcctgaggaataccaggaccggtgccaggatatactgtgtaacgactgcgagagaaaaggcaggtcacggtttcattggctctaccacaagtgtggtttctgtggttcttacaacaccagagttatcaagactgatacggcagagtgttctcgccctctataatttcttttatgcaatccatttgtatatatatatcgacggggtagaaaccttgtgaccgtaggtgtgatagtttttttatagagtgaactgggggaggaaccccacctggatgtattatgaggaaaaagtgactgtgcacatgaggagtctgagaattactcgctcccgtcccaaactaactgtatttctacgatttgaaatatattcgctcatatatttcctgtgttgcccttcagctgtttcctgggaacatctcggtttgtatcag

SEQ ID NO: 60165 - DNA, 3878 bp, Zea Mays
atggcgacgccgctggccgggaagggcccgatcgcggcggcgatcccgcggtccccacccccactggccgagggcggcgcgggagggtcggcggccgaggcgcccgtgctcatcttcgtctacttccacaaggcgatccgcgcggagctggagcggatgcacgccgcggcggtgcgcctcgccatggggcgcgcgggcggggacgtggccacgctcgaggcgcgctgccggttcctcttcaccgtctacaggcaccactgcgacgccgaggacgcggttatttttccagcacttgacattcgagtgaaaaatgtcgcagggacatattctcttgaacataaaggagaaaatgatcttttcgcacatctattcactctgctacagttggatgtgcagaatgataatgctattaggagggaacttgcatcctgtactggagcaattcggacgtttgtatcccaacacatgtccaaggaagaagaacaggtcttcccgttactcatcaagaagttttcacacgaagagcaagcagatttagtatggcagttcttatgtagcatccctgtaaacatgatggcaaaatttcttccatggatttctgcttctgtttctacagatgagaatcaagatattcttgactgcctaagtaaaatagttcctgaagaaaaactcctccaagaggttgttttcacgtggtttggagggaaatcagaaagcagttctacatgtgagtctagctctggccaaacagataaacatgcacattcacttgaacacaccaaaattggaaagaggaagtctatagaatcaagtcagcttgtcactcatccaattgatgagattctgtattggcacaatgctgttctgagagaactgagtgatatagcagaggagactaaaaggatacatcagtctggagatttttctgacatagcaggatttaatatgaggctgcaatttattgcagatgtgtgcattttccacagtattgccgaggatcaagttatattccctgcagtggatggtgaattgtcctttgtgcaggagcatgctgaagaagaacggcgattgaataaatttaggagtttaattgaacaaattcaactagcaggagccaagtcaactgtagttgattttcattcagagttatgctcacaagctgatcaaataatgcagaaaattgagagtcacttcaatgatgaggaaataaaggtacttcctaaagctaggataaagttctcaccggagaaacagagggaacttttatatcagagtctatgtgtcatgccactaaagctgttggagcgtgttctaccatggtttatagtgaaactgaatgatgcagaggcagtgtcttttcttcagaatatgcggttggcagcaccttcctctgaaactgcattggttactcttctctctggctgggcgtgcaaaggtcgtctggaggacacatccaaccctggaaagttcgtatgcatggcatcaggagcggtcacttgtgcgtcagatgggaatggtttcaaaacatgccagtcactctgtccatgttatgtaagtagcaatggagctttttcaaaaccagttaagagagcaagtcaaggagaatctagcacaaatactgacagaaatcatagctcacacaatgctgctactgaagcatcgcaatgtaacaacagagcctgttacattcccaggttaagagtagaaagtagctaccttggtgttcattcatctacccctacaaaatcctttcgccctctgtctttcaattatgttgcaccttcattatattcaagccttttctcatgggacacagatacactagtatccggcccagataacatttctaagccaattgataccatattcaaattccacaaggcaattcgcaaggatttagagtttttggatttggaatctggaaagcttattgacgggaacgagtcttgccttagccaattcattggaaggtttcgtttactgtggggtctatatagagcacacagcaatgctgaagatgagattgtatttcctgctcttgaatcgaaggaggcattgcacaatgttagtcattcatacactcttgatcacaagcaggaagaaaaattgttccaagatatatccactgtactatctgaactttctcaactacatgatggtttgagctatcctcttgatgttgaagctggaacaaatgatatttcaagtaatgagattgattgggctagaaagcgtaatgaacttttgacaaagcttcaaggattatgcaaatctatccgggtcacgttgtcaaatcatgttcatagagaagaacttgagttgtggccattgttcgataaacatttttctgtagacgagcaggataagattatcggtcatataattggaactactggtgctgaggttctgcagtcaatgttaccttgggttacatcagcacttagtttagaggaacagaacatgatgctggatacatggaagcaagcaaccaaaaacaccatgtttgatgaatggctaaatgaatggtggaagggaccttcaacttcatctgacccatcagacaaggcttctactccttcagaagaaagtcattttcaggagaatcttgaacaaaatgaccagatgtttaggcctggttggaaggacattttccgaatgaatcagagtgagctcgaggctgagattcgaaaggtctctcgagattctactcttgatccaaggaggaaggcctatctgatccaaaatctcatgaccagccgttggatagctgctcagcagaaatcaccacaaccaagcgtcgaaggacataatggatgtacacgacgacctggatgtgttgcttcgtaccgagacccagggaaacaaatatttggctgtgagcattacaaaagaaactgcaagcttgttgctgcatgctgcgataagttattcacttgcagattctgtcacgataaagttagtgaccatacaatggacagtgatggagatgatgtgcatgcaatgtctgaatgttcaacctgttggtccaaattgtcaatccccttcttgcaatggactgtccatggccaagtattattgtagcatatgcaagttcttcgatgatgaaaggagtgtctaccattgtcctttttgcaacttgtgtcgccttgggagcggattgggcactgatttttttcattgcatgaagtgcaattgttgccttggcataaagatgatagaacataaatgccgggaaaagatgctagagatgaactgtccaatctgctgcgactttttgtttacatcgagtgcaccagttaaaggccttccttgtggccacttcatgcattcggcttgttttcaggcatatacttgtacccactacacttgtccaatctgctgcaaatccttgggagatatgacggtgtattttggcatgcttgatggtttgctggctgcagaacagcttcctgaggaataccaggaccggtgccaggatatactgtgtaacgactgcgagagaaaaggcaggtcacggtttcattggctctaccacaagtgtggtttctgtggttcttacaacaccagagttatcaagactgatacggcagagtgttctcgccctctataatttcttttatgcaatccatttgtatatatatatcgacggggtagaaaccttgtgaccgtaggtgtgatagtttttttatagagtgaactgggggaggaaccccacctggatgtattatgaggaaaaagtgactgtgcacatgaggagtctgagaattactcgctcccgtcccaaactaactgtatttctacgatttgaaatatattcgctcatatatttcctgtgttgcccttcagctgtttcctgggaacatctcggtttgtatcag

SEQ ID NO: 60166 - DNA, 5236 bp, Zea Mays
taatttctgaaatgcccatagattggttatttttccagcacttgacattcgagtgaaaaatgtcgcagggacatattctcttgaacataaaggagaaaatgatcttttcgcacatctattcactctgctacagttggatgtgcagaatgataatgctattaggagggaacttgcatcctgtactggagcaattcggacgtttgtatcccaacacatgtccaaggaagaagaacaggtcttcccgttactcatcaagaagttttcacacgaagagcaagcagatttagtatggcagttcttatgtagcatccctgtaaacatgatggcaaaatttcttccatggatttctgcttctgtttctacagatgagaatcaagatattcttgactgcctaagtaaaatagttcctgaagaaaaactcctccaagaggttgttttcacgtggtttggagggaaatcagaaagcagttctacatgtgagtctagctctggccaaacagataaacatgcacattcacttgaacacaccaaaattggaaagaggaagtctatagaatcaagtcagcttgtcactcatccaattgatgagattctgtattggcacaatgctgttctgagagaactgagtgatatagcagaggagactaaaaggatacatcagtctggagatttttctgacatagcaggatttaatatgaggctgcaatttattgcagatgtgtgcattttccacagtattgccgaggatcaagttatattccctgcagtggatggtgaattgtcctttgtgcaggagcatgctgaagaagaacggcgattgaataaatttaggagtttaattgaacaaattcaactagcaggagccaagtcaactgtagttgattttcattcagagttatgctcacaagctgatcaaataatgcagaaaattgagagtcacttcaatgatgaggaaataaaggtacttcctaaagctaggataaagttctcaccggagaaacagagggaacttttatatcagagtctatgtgtcatgccactaaagctgttggagcgtgttctaccatggtttatagtgaaactgaatgatgcagaggcagtgtcttttcttcagaatatgcggttggcagcaccttcctctgaaactgcattggttactcttctctctggctgggcgtgcaaaggtcgtctggaggacacatccaaccctggaaagttcgtatgcatggcatcaggagcggtcacttgtgcgtcagatgggaatggtttcaaaacatgccagtcactctgtccatgttatgtaagtagcaatggagctttttcaaaaccagttaagagagcaagtcaaggagaatctagcacaaatactgacagaaatcatagctcacacaatgctgctactgaagcatcgcaatgtaacaacagagcctgttacattcccaggttaagagtagaaagtagctaccttggtgttcattcatctacccctacaaaatcctttcgccctctgtctttcaattatgttgcaccttcattatattcaagccttttctcatgggacacagatacactagtatccggcccagataacatttctaagccaattgataccatattcaaattccacaaggcaattcgcaaggatttagagtttttggatttggaatctggaaagcttattgacgggaacgagtcttgccttagccaattcattggaaggtttcgtttactgtggggtctatatagagcacacagcaatgctgaagatgagattgtatttcctgctcttgaatcgaaggaggcattgcacaatgttagtcattcatacactcttgatcacaagcaggaagaaaaattgttccaagatatatccactgtactatctgaactttctcaactacatgatggtttgagctatcctcttgatgttgaagctggaacaaatgatatttcaagtaatgagattgattgggctagaaagcgtaatgaacttttgacaaagcttcaaggattatgcaaatctatccgggtcacgttgtcaaatcatgttcatagagaagaacttgagttgtggccattgttcgataaacatttttctgtagacgagcaggataagattatcggtcatataattggaactactggtgctgaggttctgcagtcaatgttaccttgggttacatcagcacttagtttagaggaacagaacatgatgctggatacatggaagcaagcaaccaaaaacaccatgtttgatgaatggctaaatgaatggtggaagggaccttcaacttcatctgacccatcagacaaggcttctactccttcagaagaaagtcattttcaggagaatcttgaacaaaatgaccagatgtttaggcctggttggaaggacattttccgaatgaatcagagtgagctcgaggctgagattcgaaaggtctctcgagattctactcttgatccaaggaggaaggcctatctgatccaaaatctcatgaccagccgttggatagctgctcagcagaaatcaccacaaccaagcgtcgaaggacataatggatgtacacgacgacctggatgtgttgcttcgtaccgagacccagggaaacaaatatttggctgtgagcattacaaaagaaactgcaagcttgttgctgcatgctgcgataagttattcacttgcagattctgtcacgataaagttagtgaccatacaatggacaggaaatcagtgatggagatgatgtgcatgcaatgtctgaatgttcaacctgttggtccaaattgtcaatccccttcttgcaatggactgtccatggccaagtattattgtagcatatgcaagttcttcgatgatgaaaggagtgtctaccattgtcctttttgcaacttgtgtcgccttgggagcggattgggcactgatttttttcattgcatgaagtgcaattgttgccttggcataaagatgatagaacataaatgccgggaaaagatgctagagatgaactgtccaatctgctgcgactttttgtttacatcgagtgcaccagttaaaggccttccttgtggccacttcatgcattcggcttgttttcaggcatatacttgtacccactacacttgtccaatctgctgcaaatccttgggagatatgacggtgtattttggcatgcttgatggtttgctggctgcagaacagcttcctgaggaataccaggaccggtgccaggatatactgtgtaacgactgcgagagaaaaggcaggtcacggtttcattggctctaccacaagtgtggtttctgtggttcttacaacaccagagttatcaagactgatacggcagagtgttctcgccctctataatttcttttatgcaatccatttgtatatatatatcgacggggtagaaaccttgtgaccgtaggtgtgatagtttttttatagagtgaactgggggaggaaccccacctggatgtattatgaggaaaaagtgactgtgcacatgaggagtctgagaattactcgctcccgtcccaaactaactgtatttctacgatttgaaatatattcgctcatatatttcctgtgttgcccttcagctgtttcctgggaacatctcggtttgtatcagcgatacagttggagaccttctgaacactgtccccaactcaagccgactcagttgagctgaagagcaaataaatactcaggttgcgattgacatgggcgtgaaaatgtcaacaagctctttgaaagaacccaatgtttctcaatcaaaagacgtggagaatggaaatgacaattctgtgaaatcctgcattagcaagcctgtgttgaatggcaacaaatgtgccaacaaggaacaaaatgttccgtcttgttgccctggcgctgtgacaaatggaaacgaggctggaaatgcagacgtggagtacattgattctgagaatctagtggatctaccagatgttgatgcagctctatgtaccttagttaaaaggttggattcaaaggactgggttatgacatgtgaagctctcaacaatgttcgtcagttggcgatgtatcacaaggaaagattgcaggagctgctggagcctctagttcctcttatcgtgaaatctgtgaagaacccaagaagtgctgtatgcaaaacagcactgatgacttgtgctgacatctttaaggtctatggtgacctactggttgagtctattgatccactgctagtgcagctgtttctaaaggcttcacaagataagcgttttgtctgtgaagctgctgaggcagctcttacatcgatgacaagttggatctccccattactactgttaccaagaatgcagccctacctcaagaacaggaatccgcgggttcgagcaaaagcatcagtgtgtttgagcaagagtgtaccttgcttagatgtgcagggaatcagagaatatggaatggataagctcgtccagattgcagcaacccaactcagtgaccagcttcctgaatcaagagaggctgctcgcaacctggcactggaactacaggtattatatgagaagtctcaggcctccacctctgacgaaaatgagggtgaaccttctgtctcacaagatgctgagtcatgggaggctttctgtcagtccaagctttctgccttaagcgcccaagccatccttcgcgtgacctctactactccaaaagagggtgtcgcctctacttcaaatgctacaaaagagggtgtcacggcggccccaaaagaaggtttggatgtggattgctagcatgaggcacacaagcccacaatgagtttgtagatgcgatcagagcgcgattgtccacccccttcggtttttttgatgtacatgcttatggctggtccttggttacatccagttgggaatcggttgattattggttcgggaattcaggtgtgaccgcggtgttaatattggttgggacatatatctgctatagttgattgtataatcattttgttccactacttggtatttgtttcgccaggtgaacgtagaatttgacccacggtcagtgttatatacagtcctctttctgccacatcgggtgcaggttatgttatttttgaaggagatgtcattggcattcgtgcgccacccttatgttgtactctctctccgttttaaatcataagtcgttttgacttttttttaagtatatagcttttgttatgcatctagatataagttgtctataaaa

SEQ ID NO: 60167 - DNA, 1802 bp, Zea Mays
gtcgtggtttgggcctgcgcgcctttaaactgtattgggcttggcccatgtacaggaaccaaacacatggtacaaaatctaggtattgtgaaatacttctgccactgccactactgccagcctgccagggatctatttgtaaaaagacaatgacaaaattgacatcaaagcgaaaaagaaagaaaaaacaccctgtcctcaccagttcaacgcctcttctccgttcacccggcgtgtgctctgcctctctctctctctcgtgcagcgaccgccgacgcgcttcgccagaccttcgccggcgacgagcactcaccagggcgtgaaaatgtcaacaagctctttgaaagaacccaatgtttctcaatcaaaagacgtggagaatggaaatgacaattctgtgaaatcctgcattagcaagcctgtgttgaatggcaacaaatgtgccaacaaggaacaaaatgttccgtcttgttgccctggcgctgtgacaaatggaaacgaggctggaaatgcagacgtggagtacattgattctgagaatctagtggatctaccagatgttgatgcagctctatgtaccttagttaaaaggttggattcaaaggactgggttatgacatgtgaagctctcaacaatgttcgtcagttggcgatgtatcacaaggaaagattgcaggagctgctggagcctctagttcctcttatcgtgaaatctgtgaagaacccaagaagtgctgtatgcaaaacagcactgatgacttgtgctgacatctttaaggtctatggtgacctactggttgagtctattgatccactggcttcacaagataagcgttttgtctgtgaagctgctgaggcagctcttacatcgatgacaagttggatctccccattactactgttaccaagaatgcagccctacctcaagaacaggaatccgcgggttcgagcaaaagcatcagtgtgtttgagcaagagtgtaccttgcttagatgtgcagggaatcagagaatatggaatggataagctcgtccagattgcagcaacccaactcagtgaccagcttcctgaatcaagagaggctgctcgcaacctggcactggaactacaggtattatatgagaagtctcaggcctccacctctgacgaaaatgagggtgaaccttctgtctcacaagatgctgagtcatgggaggctttctgtcagtccaagctttctgccttaagcgcccaagccatccttcgcgtgacctctactactccaaaagagggtgtcgcctctacttcaaatgctacaaaagagggtgtcacggcggccccaaaagaaggtttggatgtggattgctagcatgaggcacacaagcccacaatgagtttgtagatgcgatcagagcgcgattgtccacccccttcggtttttttgatgtacatgcttatggctggtccttggttacatccagttgggaatcggttgattattggttcgggaattcaggtgtgaccgcggtgttaatattggttgggacatatatctgctatagttgattgtataatcattttgttccactacttggtatttgtttcgccaggtgaacgtagaatttgacccacggtcagtgttatatacagtcctctttctgccacatcgggtgcaggttatgttatttttgaaggagatgtcattggcattcgtgcgccacccttatgttgtactctctctccgttttaaatcataagtcgttttgacttttttttaagtatatagcttttgttatgcatctagatataagttgtctataaaa

SEQ ID NO: 60168 - DNA, 1562 bp, Zea Mays
gtcgtggtttgggcctgcgcgcctttaaactgtattgggcttggcccatgtacaggaaccaaacacatggtacaaaatctaggtattgtgaaatacttctgccactgccactactgccagcctgccagggatctatttgtaaaaagacaatgacaaaattgacatcaaagcgaaaaagaaagaaaaaacaccctgtcctcaccagttcaacgcctcttctccgttcacccggcgtgtgctctgcctctctctctctctcgtgcagcgaccgccgacgcgcttcgccagaccttcgccggcgacgagcactcaccagaccttagttaaaaggttggattcaaaggactgggttatgacatgtgaagctctcaacaatgttcgtcagttggcgatgtatcacaaggaaagattgcaggagctgctggagcctctagttcctcttatcgtgaaatctgtgaagaacccaagaagtgctgtatgcaaaacagcactgatgacttgtgctgacatctttaaggtctatggtgacctactggttgagtctattgatccactgctagtgcagctgtttctaaaggcttcacaagataagcgttttgtctgtgaagctgctgaggcagctcttacatcgatgacaagttggatctccccattactactgttaccaagaatgcagccctacctcaagaacaggaatccgcgggttcgagcaaaagcatcagtgtgtttgagcaagagtgtaccttgcttagatgtgcagggaatcagagaatatggaatggataagctcgtccagattgcagcaacccaactcagtgaccagcttcctgaatcaagagaggctgctcgcaacctggcactggaactacaggtattatatgagaagtctcaggcctccacctctgacgaaaatgagggtgaaccttctgtctcacaagatgctgagtcatgggaggctttctgtcagtccaagctttctgccttaagcgcccaagccatccttcgcgtgacctctactactccaaaagagggtgtcgcctctacttcaaatgctacaaaagagggtgtcacggcggccccaaaagaaggtttggatgtggattgctagcatgaggcacacaagcccacaatgagtttgtagatgcgatcagagcgcgattgtccacccccttcggtttttttgatgtacatgcttatggctggtccttggttacatccagttgggaatcggttgattattggttcgggaattcaggtgtgaccgcggtgttaatattggttgggacatatatctgctatagttgattgtataatcattttgttccactacttggtatttgtttcgccaggtgaacgtagaatttgacccacggtcagtgttatatacagtcctctttctgccacatcgggtgcaggttatgttatttttgaaggagatgtcattggcattcgtgcgccacccttatgttgtactctctctccgttttaaatcataagtcgttttgacttttttttaagtatatagcttttgttatgcatctagatataagttgtctataaaa

SEQ ID NO: 60169 - DNA, 3251 bp, Zea Mays
ctggcttcccaagtcccgtcccgtctcctgggctggctgaccagtgaccagccctctcccacgtcgcacgcctgtggctcctgacctttccaccaccggagttaatgcctccgcctctccgtcagcgccgcctggcctcgccgtctcgctgtgcgcggcgtgggtggtagcagtaccacgcgtggtggttgattgagccattggatgggcggaattgccgttggcgaggtgaggcgtggagactgagggggagctgttgtggcgcgtgtctccctgtcgctcacagcttctttttattcactccgcgcccggttccgttccggggaatgggttctgcggaaggattctgagccgcggagtcgggggagggaggaggcgcgacgctggtgcggccgctgctgcctcgatctcttgccgcctgggctctcgtacgtacgtcctcgtagtcgtcgccgcggcgcaatttggcggcgtgcgcgttccttgcctagattggtgcgatccaatttctgagaggcgtagaggtgcggcgccacagaacacgagcgcgcgcgcctggtgcttgctgagaagcatctgcaaccgtcattccaggctcacgaggaaactcatttactcgaatcatgtcggactttgtcaggagtagatatgataagcaagaagatttccaagttttgttgagcaagaaagatcctggagaacaacctcagcacaaggattacctgtggatggctcactggaccaaagcaagcagcgctgcagaaccccgaaacaatgacagcaatcctttggaggataccaacaatggcactactacgaaagatagcgagaccttgccttatgaattcatgaaatctacagttgctgaaaggctcatggtaggagtacgccatggaagtgcctccatgcagcatgtccgacaattcaagtctagtatgcggggtatgccacgactttccaatgaattgggaccaaagaatagtgaacaggttgatgagtcttttgaaaaatctttgaaaaacgatgctatgaacttgagaactaggcaagttgtgtcagaaacatattctattcacaagctttcagagttaccgttggattttcagaaccttgggagctcagatgatccaagtccagattggagccactttccaatgttcgaaattaatcaaaagattgacagtattgtcaaccgtaaacgaaggtctccacctctggatctaaatgtgtctgcatcccatgtgatggccctatcgtcacaagaatacatgatgcactcacatcaaacagctgatgagaacatggatacgtgcaaacctgcagaaggctttgcatctcgtgtagaagatcatgctggcttcaattcagatcctccagggccaaagttaaaagggcaattgttggataccatgtcatgttcttgcagcaaggatgacaacaactcagcagattgtccaatagatgagcagcacacaagccactattttgcaaactcaaagcatgaactaccctctgtatctaacaaaaagaagttcaagtttgcaggaaacaaccacaatcgaattgttgcaagtgcgtcccacgatctgaagacaaaaagatctgctgtccataaacaacaaagtgctgcagaggcagtgttctgtgcaccagtacttgatagtgagtttcagaatgaacctataactatttccaacatcgacaagaaggatggtgaaaattttcatgatatgtataaatgtcttggcaaggctgtttcatgtcctttgttaccttatgagcatcgtcatctgaatacacagagaacggaatctgcagaaaatttgaaagtctgcacgcttcctgatcatcaaactgcaaataaattgacagaaaagagtcatggtgagctgctgacatatggaccaaagtcaaaggaaatgtatacaggttcttgtaaccaaagaaggaaaatctagcgactttggagtttgtatgtatggcaccaatattggcagtcagttattcagagcacagaatcaatcttcagctaagactgaaacattgcacagcgatactctcattgggtccaaatccccagcaggcatcgcttcattgtcggcacaaaaggactatggttgcacggacgaagcaaaaagtgagcagctcgtagctccgtccaggagaggagattcaggatacggtaaagaagatggatttcataatgtcaatgaaggtcatgatgtttggtccaaagcaactattggtagtaagcaatcatgcatgcccggaacgggaatcacgaacctagatctgatactttcccagatgagcagaatgagaaatcaaatttccattggtagaattcaaccaccaataggtgccgagccaagtgacagatggctcaagcgcctacagcctgacataccagatcctgacatccctggttccaggaggccaaacgttggaggcagccctccactcaggcaaagaaatcgttcgtttgacatggcacttccttgcaacaggactgacactggaacaactgactgtgttatggaggaccagagcttggataaagtggaaaaaacgcaagaaaagcaagaaagtaccccaattccagcgaagagcgtgaatagctggataggaagatggtgccagggaggcactcctgttttccatgaaggcccaggccagggaaggcaagcaacaaagcctggccggccatctgaagaactcgaaggtcggttcccaagcattgcagcgatggcgatgatggggcgagcgatgaacaagcttcggccgtgcgagcatcagaagatggggccacttgtggtgtggaagacagattgacctcatatatatatgtttttgggtgtaatatagtggtttctttccaaaaaaagaaaaaaaaatgaaaagcaacagtgaattttgcctggtttattgtttatggtgtaataaaccatatgatggctcatggtttattgttttctgaagtgaaagtagctaggtgtagtggatactggtgatgtaatggtctggtctcatataccaacaatataataatattttactgtttactgtgtcgttatgatgatgtgttgaggcattgtcaagatgaatttgtgaattatccctgaacagaaacatcagtcttcgtttttgttttgataggggaaccgtcatgcgccaacatgttgtagaacagctaatgatgaagcaaaatatatataaaaaaagatgatgaaatcacaatccgtgtaactggg

SEQ ID NO: 60170 - DNA, 3232 bp, Zea Mays
ctggcttcccaagtcccgtcccgtctcctgggctggctgaccagtgaccagccctctcccacgtcgcacgcctgtggctcctgacctttccaccaccggagttaatgcctccgcctctccgtcagcgccgcctggcctcgccgtctcgctgtgcgcggcgtgggtggtagcagtaccacgcgtggtggttgattgagccattggatgggcggaattgccgttggcgaggtgaggcgtggagactgagggggagctgttgtggcgcgtgtctccctgtcgctcacagcttctttttattcactccgcgcccggttccgttccggggaatgggttctgcggaaggattctgagccgcggagtcgggggagggaggaggcgcgacgctggtgcggccgctgctgcctcgatctcttgccgcctgggctctcgtacgtacgtcctcgtagtcgtcgccgcggcgcaatttggcggcgtgcgcgttccttgcctagattggtgcgatccaatttctgagaggcgtagaggtgcggcgccacagaacacgagcgcgcgcgcctggtgcttgctgagaagcatctgcaaccgtcattccaggctcacgaggaaactcatttactcgaatcatgtcggactttgtcaggagtagatatgataagcaagaagatttccaagttttgttgagcaagaaagatcctggagaacaacctcagcacaaggattacctgtggatggctcactggaccaaagcaagcagcgctgcagaaccccgaaacaatgacagcaatcctttggaggataccaacaatggcactactacgaaagatagcgagaccttgccttatgaattcatgaaatctacagttgctgaaaggctcatggtaggagtacgccatggaagtgcctccatgcagcatgtccgacaattcaagtctagtatgcggggtatgccacgactttccaatgaattgggaccaaagaatagtgaacaggttgatgagtcttttgaaaaatctttgaaaaacgatgctatgaacttgagaactaggcaagttgtgtcagaaacatattctattcacaagctttcagagttaccgttggattttcagaaccttgggagctcagatgatccaagtccagattggagccactttccaatgttcgaaattaatcaaaagattgacagtattgtcaaccgtaaacgaaggtctccacctctggatctaaatgtgtctgcatcccatgtgatggccctatcgtcacaagaatacatgatgcactcacatcaaacagctgatgagaacatggatacgtgcaaacctgcagaaggctttgcatctcgtgtagaagatcatgctggcttcaattcagatcctccagggccaaagttaaaagggcaattgttggataccatgtcatgttcttgcagcaaggatgacaacaactcagcagattgtccaatagatgagcagcacacaagccactattttgcaaactcaaagcatgaactaccctctgtatctaacaaaaagaagttcaagtttgcaggaaacaaccacaatcgaattgttgcaagtgcgtcccacgatctgaagacaaaaagatctgctgtccataaacaacaaagtgctgcagaggcagtgttctgtgcaccagtacttgatagtgagtttcagaatgaacctataactatttccaacatcgacaagaaggatggtgaaaattttcatgatatgtataaatgtcttggcaaggctgtttcatgtcctttgttaccttatgagcatcgtcatctgaatacacagagaacggaatctgcagaaaatttgaaagtctgcacgcttcctgatcatcaaactgcaaataaattgacagaaaagagtcatggtgagctgctgacatatggaccaaagtcaaaggaaatgtatacaggaaaatctagcgactttggagtttgtatgtatggcaccaatattggcagtcagttattcagagcacagaatcaatcttcagctaagactgaaacattgcacagcgatactctcattgggtccaaatccccagcaggcatcgcttcattgtcggcacaaaaggactatggttgcacggacgaagcaaaaagtgagcagctcgtagctccgtccaggagaggagattcaggatacggtaaagaagatggatttcataatgtcaatgaaggtcatgatgtttggtccaaagcaactattggtagtaagcaatcatgcatgcccggaacgggaatcacgaacctagatctgatactttcccagatgagcagaatgagaaatcaaatttccattggtagaattcaaccaccaataggtgccgagccaagtgacagatggctcaagcgcctacagcctgacataccagatcctgacatccctggttccaggaggccaaacgttggaggcagccctccactcaggcaaagaaatcgttcgtttgacatggcacttccttgcaacaggactgacactggaacaactgactgtgttatggaggaccagagcttggataaagtggaaaaaacgcaagaaaagcaagaaagtaccccaattccagcgaagagcgtgaatagctggataggaagatggtgccagggaggcactcctgttttccatgaaggcccaggccagggaaggcaagcaacaaagcctggccggccatctgaagaactcgaaggtcggttcccaagcattgcagcgatggcgatgatggggcgagcgatgaacaagcttcggccgtgcgagcatcagaagatggggccacttgtggtgtggaagacagattgacctcatatatatatgtttttgggtgtaatatagtggtttctttccaaaaaaagaaaaaaaaatgaaaagcaacagtgaattttgcctggtttattgtttatggtgtaataaaccatatgatggctcatggtttattgttttctgaagtgaaagtagctaggtgtagtggatactggtgatgtaatggtctggtctcatataccaacaatataataatattttactgtttactgtgtcgttatgatgatgtgttgaggcattgtcaagatgaatttgtgaattatccctgaacagaaacatcagtcttcgtttttgttttgataggggaaccgtcatgcgccaacatgttgtagaacagctaatgatgaagcaaaatatatataaaaaaagatgatgaaatcacaatccgtgtaactggg

SEQ ID NO: 60171 - DNA, 3121 bp, Zea Mays
cagtgaccagccctctcccacgtcgcacgcctgtggctcctgacctttccaccaccggagttaatgcctccgcctctccgtcagcgccgcctggcctcgccgtctcgctgtgcgcggcgtgggtggtagcagtaccacgcgtggtggttgattgagccattggatgggcggaattgccgttggcgaggtgaggcgtggagactgagggggagctgttgtggcgcgtgtctccctgtcgctcacagcttctttttattcactccgcgcccggttccgttccggggaatgggttctgcggaaggattctgagccgcggagtcgggggagggaggaggcgcgacgctggtgcggccgctgctgcctcgatctcttgccgcctgggctctcgtacgtacgtcctcgtagtcgtcgccgcggcgcaatttggcggcgtgcgcgttccttgcctagattggtgcgatccaatttctgagaggcgtagaggtgcggcgccacagaacacgagcgcgcgcgcctggtgcttgctgaggagtagatatgataagcaagaagatttccaagttttgttgagcaagaaagatcctggagaacaacctcagcacaaggattacctgtggatggctcactggaccaaagcaagcagcgctgcagaaccccgaaacaatgacagcaatcctttggaggataccaacaatggcactactacgaaagatagcgagaccttgccttatgaattcatgaaatctacagttgctgaaaggctcatggtaggagtacgccatggaagtgcctccatgcagcatgtccgacaattcaagtctagtatgcggggtatgccacgactttccaatgaattgggaccaaagaatagtgaacaggttgatgagtcttttgaaaaatctttgaaaaacgatgctatgaacttgagaactaggcaagttgtgtcagaaacatattctattcacaagctttcagagttaccgttggattttcagaaccttgggagctcagatgatccaagtccagattggagccactttccaatgttcgaaattaatcaaaagattgacagtattgtcaaccgtaaacgaaggtctccacctctggatctaaatgtgtctgcatcccatgtgatggccctatcgtcacaagaatacatgatgcactcacatcaaacagctgatgagaacatggatacgtgcaaacctgcagaaggctttgcatctcgtgtagaagatcatgctggcttcaattcagatcctccagggccaaagttaaaagggcaattgttggataccatgtcatgttcttgcagcaaggatgacaacaactcagcagattgtccaatagatgagcagcacacaagccactattttgcaaactcaaagcatgaactaccctctgtatctaacaaaaagaagttcaagtttgcaggaaacaaccacaatcgaattgttgcaagtgcgtcccacgatctgaagacaaaaagatctgctgtccataaacaacaaagtgctgcagaggcagtgttctgtgcaccagtacttgatagtgagtttcagaatgaacctataactatttccaacatcgacaagaaggatggtgaaaattttcatgatatgtataaatgtcttggcaaggctgtttcatgtcctttgttaccttatgagcatcgtcatctgaatacacagagaacggaatctgcagaaaatttgaaagtctgcacgcttcctgatcatcaaactgcaaataaattgacagaaaagagtcatggtgagctgctgacatatggaccaaagtcaaaggaaatgtatacaggaaaatctagcgactttggagtttgtatgtatggcaccaatattggcagtcagttattcagagcacagaatcaatcttcagctaagactgaaacattgcacagcgatactctcattgggtccaaatccccagcaggcatcgcttcattgtcggcacaaaaggactatggttgcacggacgaagcaaaaagtgagcagctcgtagctccgtccaggagaggagattcaggatacggtaaagaagatggatttcataatgtcaatgaaggtcatgatgtttggtccaaagcaactattggtagtaagcaatcatgcatgcccggaacgggaatcacgaacctagatctgatactttcccagatgagcagaatgagaaatcaaatttccattggtagaattcaaccaccaataggtgccgagccaagtgacagatggctcaagcgcctacagcctgacataccagatcctgacatccctggttccaggaggccaaacgttggaggcagccctccactcaggcaaagaaatcgttcgtttgacatggcacttccttgcaacaggactgacactggaacaactgactgtgttatggaggaccagagcttggataaagtggaaaaaacgcaagaaaagcaagaaagtaccccaattccagcgaagagcgtgaatagctggataggaagatggtgccagggaggcactcctgttttccatgaaggcccaggccagggaaggcaagcaacaaagcctggccggccatctgaagaactcgaaggtcggttcccaagcattgcagcgatggcgatgatggggcgagcgatgaacaagcttcggccgtgcgagcatcagaagatggggccacttgtggtgtggaagacagattgacctcatatatatatgtttttgggtgtaatatagtggtttctttccaaaaaaagaaaaaaaaatgaaaagcaacagtgaattttgcctggtttattgtttatggtgtaataaaccatatgatggctcatggtttattgttttctgaagtgaaagtagctaggtgtagtggatactggtgatgtaatggtctggtctcatataccaacaatataataatattttactgtttactgtgtcgttatgatgatgtgttgaggcattgtcaagatgaatttgtgaattatccctgaacagaaacatcagtcttcgtttttgttttgataggggaaccgtcatgcgccaacatgttgtagaacagctaatgatgaagcaaaatatatataaaaaaagatgatgaaatcacaatccgtgtaactggg

SEQ ID NO: 60172 - DNA, 3089 bp, Zea Mays
cagtgaccagccctctcccacgtcgcacgcctgtggctcctgacctttccaccaccggagttaatgcctccgcctctccgtcagcgccgcctggcctcgccgtctcgctgtgcgcggcgtgggtggtagcagtaccacgcgtggtggttgattgagccattggatgggcggaattgccgttggcgaggtgaggcgtggagactgagggggagctgttgtggcgcgtgtctccctgtcgctcacagcttctttttattcactccgcgcccggttccgttccggggaatgggttctgcggaaggattctgagccgcggagtcgggggagggaggaggcgcgacgctggtgcggccgctgctgcctcgatctcttgccgcctgggctctcgtacgtacgtcctcgtagtcgtcgccgcggcgcaatttggaagcatctgcaaccgtcattccaggctcacgaggaaactcatttactcgaatcatgtcggactttgtcaggagtagatatgataagcaagaagatttccaagttttgttgagcaagaaagatcctggagaacaacctcagcacaaggattacctgtggatggctcactggaccaaagcaagcagcgctgcagaaccccgaaacaatgacagcaatcctttggaggataccaacaatggcactactacgaaagatagcgagaccttgccttatgaattcatgaaatctacagttgctgaaaggctcatggtaggagtacgccatggaagtgcctccatgcagcatgtccgacaattcaagtctagtatgcggggtatgccacgactttccaatgaattgggaccaaagaatagtgaacaggttgatgagtcttttgaaaaatctttgaaaaacgatgctatgaacttgagaactaggcaagttgtgtcagaaacatattctattcacaagctttcagagttaccgttggattttcagaaccttgggagctcagatgatccaagtccagattggagccactttccaatgttcgaaattaatcaaaagattgacagtattgtcaaccgtaaacgaaggtctccacctctggatctaaatgtgtctgcatcccatgtgatggccctatcgtcacaagaatacatgatgcactcacatcaaacagctgatgagaacatggatacgtgcaaacctgcagaaggctttgcatctcgtgtagaagatcatgctggcttcaattcagatcctccagggccaaagttaaaagggcaattgttggataccatgtcatgttcttgcagcaaggatgacaacaactcagcagattgtccaatagatgagcagcacacaagccactattttgcaaactcaaagcatgaactaccctctgtatctaacaaaaagaagttcaagtttgcaggaaacaaccacaatcgaattgttgcaagtgcgtcccacgatctgaagacaaaaagatctgctgtccataaacaacaaagtgctgcagaggcagtgttctgtgcaccagtacttgatagtgagtttcagaatgaacctataactatttccaacatcgacaagaaggatggtgaaaattttcatgatatgtataaatgtcttggcaaggctgtttcatgtcctttgttaccttatgagcatcgtcatctgaatacacagagaacggaatctgcagaaaatttgaaagtctgcacgcttcctgatcatcaaactgcaaataaattgacagaaaagagtcatggtgagctgctgacatatggaccaaagtcaaaggaaatgtatacaggaaaatctagcgactttggagtttgtatgtatggcaccaatattggcagtcagttattcagagcacagaatcaatcttcagctaagactgaaacattgcacagcgatactctcattgggtccaaatccccagcaggcatcgcttcattgtcggcacaaaaggactatggttgcacggacgaagcaaaaagtgagcagctcgtagctccgtccaggagaggagattcaggatacggtaaagaagatggatttcataatgtcaatgaaggtcatgatgtttggtccaaagcaactattggtagtaagcaatcatgcatgcccggaacgggaatcacgaacctagatctgatactttcccagatgagcagaatgagaaatcaaatttccattggtagaattcaaccaccaataggtgccgagccaagtgacagatggctcaagcgcctacagcctgacataccagatcctgacatccctggttccaggaggccaaacgttggaggcagccctccactcaggcaaagaaatcgttcgtttgacatggcacttccttgcaacaggactgacactggaacaactgactgtgttatggaggaccagagcttggataaagtggaaaaaacgcaagaaaagcaagaaagtaccccaattccagcgaagagcgtgaatagctggataggaagatggtgccagggaggcactcctgttttccatgaaggcccaggccagggaaggcaagcaacaaagcctggccggccatctgaagaactcgaaggtcggttcccaagcattgcagcgatggcgatgatggggcgagcgatgaacaagcttcggccgtgcgagcatcagaagatggggccacttgtggtgtggaagacagattgacctcatatatatatgtttttgggtgtaatatagtggtttctttccaaaaaaagaaaaaaaaatgaaaagcaacagtgaattttgcctggtttattgtttatggtgtaataaaccatatgatggctcatggtttattgttttctgaagtgaaagtagctaggtgtagtggatactggtgatgtaatggtctggtctcatataccaacaatataataatattttactgtttactgtgtcgttatgatgatgtgttgaggcattgtcaagatgaatttgtgaattatccctgaacagaaacatcagtcttcgtttttgttttgataggggaaccgtcatgcgccaacatgttgtagaacagctaatgatgaagcaaaatatatataaaaaaagatgatgaaatcacaatccgtgtaactggg

SEQ ID NO: 60173 - DNA, 1814 bp, Zea Mays
cctaaaccaaaccagaatcgcatggtttatgacaaaccgacaagcgaaagaggataccggataccagcctatcagcatcaacaggatacaaaaatgctaatgcgattttgttgtaattcggataccagaacaatgcttgcttgaacaacgcttagagcaatgatatggtatggctccattatttctctaactataacttgtttgtgttttagtggggaaagaatatctttatttattaaggcagcaatcaacactcgatcggtttgccgccgaattccccggcggtgccttgttcgctgcatgcaccaacgattttgttgtaagatgtttgagaagcaagcaactgtcagcactcagcagtgccaaagaggcgcctagccgcctactccatctcttgcttccctgcggcattctctcggcgcttcagatatccaaatccctcgccgcaagccttccccttcagcctgcccgccgctggcgctgcccttcttccccgcccccttccattccgtctgcatccgtcttcattaccattcttacgctcgggcggttcgtcgtctcgagcttccttcccgggatcgacgacggcaggccgctccgcggtgatggcgggccggtcgctcgcggagcccagtcttcggtccgccactgacgacgacgtctctgccgtgccctctaccaccacgtcggctgcgcgcggtgtgtctgcccaagacgaggggccggcgagcggtgtgctggtagagtgcaggatctgtcaggaggacggcgacgaggcctgcatggaggctccttgctcctgcaagggaagcttgaagatgcattcagcggtggtgtgacgagaagggagacaccgtgtgtgagatatgcttgcagcaatttgtgccaaactacactgcctcttcaaagctgtttcagcgcggaagaaacacgtttttcttcagtgctcctggctacatccaagcacggccgatgcagaacgcggatcactccgctacgtcgacaggctacggacacgaccaaacgccggatcctaccggcgtactatgctgtcgcataatcgccatcgctctgatggtcctcctcgtcttccgcgacgccgtctccgtcttcctgggtgaccaagacgcctacaccgttgcagtggtcacgctgctgatgcttagaaccgcggccatcgtcattccggtctacatcatactggtggcggttaccgagctgctgcaccgacgccggcatcggcaggttgtgcacggccaggcttcagatcatgcggcagaggagcggacgcagccgcagcagcatgtcatcagcattcagtagcaggctggccatggccatccatcctggtgttcttgctgtgctgtcgtccagaattgtgttgatccttcgacgaacgactgagcttcaggtgtgacgtgacgtgccagcgaatatgatatggaagatgacttggctgtaatcgtagcttcagaacagctttgactgcacctgtacatagtagtagtagcagtaccttatttaactgctcccagcagcattctatagagagttagagaccactgtacgtgaccaccactttcttcggatgaagttgaatcagaggtaaggcaaattcagagctccacaggtttgtgcactgggcgtagtcatgggctcatggcctcatggggcgggtctgagctatgaaacttccaagaaacatatgttggtcactcaaccgagatactcagttttagcggccaaggtatatttcatatttgtaaatcctgtgaaatttcgcaaaacatcgttcaatgtgatcttattctaat

SEQ ID NO: 60174 - DNA, 857 bp, Zea Mays
gctgtgttcccccaccctccaggctgcctgactcggggtctcgggcaggttccgccgcatcgtgtcgtttcttccctttcccgtttcccccgttcagttcagcttcggttggctcgccgtactcgggttgttcctcgcctcgcttcgcttccttcctccgcagtcctcgtctcgaattcgctcgcggtgggagaaatcggggcgcgaggatgaccgtgatcgacatcctcacccgggtggacgcgatctgccagaagtacgacaagtacgacgtcgacaagctcaacggcgccaacgtcgccggcgacgacccgttcgcccgcctctacgcgtccgtcgacgcggacatcaaccaatgcgtcgataaagcggaaacggcgaagcaagagaagaaccgggccgcggtggtggcgcttaacgccgagatccggcgcaccaaggccaagctcctcgaggaggaccttcccaagctgcagcgcctcgccgttaagaaggttgccgctctagtacccgcattgcctccgctgagttataggtgaagtgtgctcgatcggcgagctctgtaacttgagggtttgtcttcgtgtttgccagtaactaaacttgcttggactgttgctggctaaaattaggctgtgcggctagagatattagattcttaggtagtttcgacacttgggaaatgatttaccaggccattttgtgaattttaaggttgttgatgacttggtggttggtgctagcatgtatgccagaatttgggggataacctctggtctggatcagtagtttgcgtattgtgtggattgggagtgagccatataggagaatttcataagattacttgcatggtgact

SEQ ID NO: 60175 - DNA, 1871 bp, Zea Mays
gctgtgttcccccaccctccaggctgcctgactcggggtctcgggcaggttccgccgcatcgtgtcgtttcttccctttcccgtttcccccgttcagttcagcttcggttggctcgccgtactcgggttgttcctcgcctcgcttcgcttccttcctccgcagtcctcgtctcgaattcgctcgcggtgggagaaatcggggcgcgaggatgaccgtgatcgacatcctcacccgggtggacgcgatctgccagaagtacgacaagtacgacgtcgacaagctcaacggcgccaacgtcgccggcgacgacccgttcgcccgcctctacgcgtccgtcgacgcggacatcaaccaatgcgtcgataaagcggaaacggcgaagcaagagaagaaccgggccgcggtggtggcgcttaacgccgagatccggcgcaccaaggccaagctcctcgaggaggaccttcccaagctgcagcgcctcgccgttaagaaggtgaaagggctgacaagagaagaaattgcgacccgtagtgatctggttgccgctttacctgacagaatacaatcaatcccagatggtagttctactgccacaaagaaaaatggaagttggggagcctcaggatctcgcactggaggagccataaagttcgactctactgctgatggaaactttgatgatgagtactttaaggggacagaagaatctaatcagttccgtcgggaatatgagatgcgcagaatgaaacaggatgaaggtttggacgttattggtgaaggactggaaactttgaaaaacatggcatctgatatgaatgaggaattggacagacaagtccctctgatggacgaaatggatgataaggtggatagagccaatgcagatttgaagaataccaacgtgagactgaaggagactgttcttcaacttagatcaagtcgcaacttttgcatcgacatcatccttctgtgtgtcattcttggtattgcggcctacctttacaaatctggagtggaagcttatatatgttggatcagctgaagatgaaaactacgatcaacagcttgagagcgtgcttgttggccctgtcaatgttgggacctaccgttttgtccttcaggctgacccaccggatccctcaaagatacgtgaggaagacataattggtgtgactgtgctgctattgacatgctcttacatgggccaggagttcatgagagtaggctactacgtgaacaatgattatgatgatgaacaattgagagaagagcctccagcaaaggtgctaattgacagggtgcaaagaaatatcttggccgacaagccccgagtcaccaagttccctatcaacttccatcctgaacccagtacaggcccggggcagcagcagcaggaaccccagacgacctcgccagaaaaccacacaggcaatggcgaggccaatggtagcaagcctgaggctgaccaatgaacacagttggcttcagatattttgatgcgtgccccttacaggttgtgctgtaatattacaaacgggattagtggttgtgcattgccctgggatcctgaactctgttctgtaacttgagatgcaaatgctgggtacctggatgttttcttaagcacgagtatttcagcctcgagatgtgatcaattgcatcgaaagcatgtgctccaagaacgcaagcatgaggaaatacagcaaaaaacagcagattaactgaatcctttctctgaatctttttgagaaacaactttgcacgacgattcactgctgtaccaggacgcgctacgtgaatttttctagacctttttggtgcttgcagtcacgatcatttcatttgtcatcttttcacgtctcttttgtgt

SEQ ID NO: 60176 - DNA, 1082 bp, Zea Mays
catcaaccaatgcgtcgataagcggaaacggcgaagcaagagaagaaccgggccgcggtggtggcgcttaacgccgagatccggcgcaccaaggccaagctcctcgaggaggaccttcccaagctgcagcgcctcgccgttaagaaggtgaaagggctgacaagagaagaaattgcgacccgtagtgatctggttgccgctttacctgacagaatacaatcaatcccagatggtagttctactgccacaaagaaaaatggaagttggggagcctcaggatctcgcactggaggagccataaagttcgactctactgctgatggaaactttgatgatgagtactttaaggggacagaagaatctaatcagttccgtcgggaatatgagatgcgcagaatgaaacaggatgaaggtttggacgttattggtgaaggactggaaactttgaaaaacatggcatctgatatgaatgaggaattggacagacaagtccctctgatggacgaaatggatgataaggtggatagagccaatgcagatttgaagaataccaacgtgagactgaaggagactgttcttcaacttagatcaagtcgcaacttttgcatcgacatcatccttctgtgtgtcattcttggtattgcggcctacctttacaatgttctaaaaaagtgaggtggagtcttcttgccttggaaccgctcatgtcgtggtccctttgtcaccatggttctacccagttctttgagcgatttgtgtgcaccaagccatttgttttgtcttatatctgtattattatggtgtccaagttgaaccttgactaggcttgttgaagagaacgctggtaacatgtttgctatatatctggggagtcgatttcgtagcgaggaatgattacacggcaccattcttatcgtcttatcgaaccacgggctcatgtatattcattccgtcagggctttgtctccattgtttctgttgaatcagtcttggtaccaagagcggcgctagtgagcaatcaacgatgactgctacttctttagcctaatgcctaacgaatgtgatcgcagctgcttatcagg

SEQ ID NO: 60177 - DNA, 955 bp, Zea Mays
ggaaggtcaccatgtggcggtggagggagtggttggaaggtcaccatgtgacatggtggcggcttggcactaaggaggcggcacatgcagatctggagtggaagcttatatatgttggatcagctgaagatgaaaactacgatcaacagcttgagagcgtgcttgttggccctgtcaatgttgggacctaccgttttgtccttcaggctgacccaccggatccctcaaagatacgtgaggaagacataattggtgtgactgtgctgctattgacatgctcttacatgggccaggagttcatgagagtaggctactacgtgaacaatgattatgatgatgaacaattgagagaagagcctccagcaaaggtgctaattgacagggtgcaaagaaatatcttggccgacaagccccgagtcaccaagttccctatcaacttccatcctgaacccagtacaggcccggggcagcagcagcaggaaccccagacgacctcgccagaaaaccacacaggcaatggcgaggccaatggtagcaagcctgaggctgaccaatgaacacagttggcttcagatattttgatgcgtgccccttacaggttgtgctgtaatattacaaacgggattagtggttgtgcattgccctgggatcctgaactctgttctgtaacttgagatgcaaatgctgggtacctggatgttttcttaagcacgagtatttcagcctcgagatgtgatcaattgcatcgaaagcatgtgctccaagaacgcaagcatgaggaaatacagcaaaaaacagcagattaactgaatcctttctctgaatctttttgagaaacaactttgcacgacgattcactgctgtaccaggacgcgctacgtgaatttttctagacctttttggtgcttgcagtcacgatcatttcatttgtcatcttttcacgtctcttttgtgt

SEQ ID NO: 60178 - DNA, 2069 bp, Zea Mays
gagcccagtccgcccgggacgcgtcgcgtctacgtgggcacgcggtcagacgtgcagtgcagagaccacgaaacggatcccctcgagtcgagcgaaccgaagccgaacatacccacccatcgtctcgtctcgtcgctcgtgggcgtggcgctctctccccccacctcctcttttaagacgacgccatcgccagccggccctccctcgccgtccggcgccgtcctccttccctctcatcacagtttccacctcgcgaggggctcgcgcgcgtgcccatcccggccgatcgactcacgaattcgcgcgcgatcatattcgtgcaagggcatccccgcacgggcacggccggaagcacggaatcacttccccggccgcccccaattcccgggctcctcggcgccgatccctcgccggtgttcgctttccggcggtttccgctgcgtgtcgcgggcaggcgcaagcggcttggctcggctcggctcggttgtttcctcctcgtgccatccatggaggcgaagcagcgcccgcggcacggcggggagaggaggccgccgccggcgacggacggcggcgaggagtacgacccgtggacggcgtggctctacaagccgcgcaccatctcggtgctcctcgtcggcgcctgccttctcatctgggcaagtggagcacttgatcctgaaggtactgccgctcacagtagcgtgacatcaatcaagaggggtgtctgggctatgattgcagtcttccttgcctactgcacgcttcaggcaccttcaacgatacttattaggccccatcctgctgtctggcgcctggtacatggactggctgtcgtttacctcgttgctcttacctttcttcttttccagaaccgtgacgatgctcgccagttcatgaaacaccttcacccagatcttggagttgaattgccggagagatcttatggagcagattgccgcttgtatgttccagaaaaccctaaaaacaagttcataaatatttatgagacattgtttgatgaatttgttgttgcccatatccttgggtggtggggcaaagctgtaatgatacgaaatcaacttctactttgggtcttgtcgattggctttgagctaatggagctaacgttcagacatatgctgccaaactttaatgagtgctggtgggatagcattatcttggacatattgatctgcaattggtttggtatttgggcaggaatgcacacagtccgtcactttgatggcaaaacttatgaatgggttggactgagccgccaacgaagtatcatgggtgaaaagatcgttgagccagttcactcctgctcaatgggacaaggatcagtggcatcctttcatggggccactgcggttcatccaagtgctgttcctctgcgttgtcttcatgaccgtggagcttaacacattcttccttaagttttgcctttggatccctccaaggaaccccttggtcgtgtacagattgatcctctggtggctgatcgccatcccaaccatccgcgagtacaactcctacctgcaagacaggaaaccggtgaagaaggttggagccttctgttggctctctctagctatatgcatagtggagctgcttatctgcatgaagtttgggcatgggctgtttcatgacccgatgcctacctggctgatcatcttttggagctcggtcgggactgcactcgtgattttcttgctttcgtggtcatggaggagtcaccaaaggttcaggagaaagcagctctgattgtttcagtttgctacttttctttttcgaattttatataggcgttgtacatatttgatatggtttgtgatgtaacttacgttttaggggtggccatttttctgctgcccctggcaggaacttggtttgtcacgatagatcatgcattgttgacaacatgagattgattaataaattgaaataaccgcgacatcataaccagttgtaattaattattaaagcaaggtcactgcatattttggttccaaactaattctgggccaacaatgcacagttctgtaatacgaatgaccaatcattatctt

SEQ ID NO: 60179 - DNA, 3138 bp, Zea Mays
gagcccagtccgcccgggacgcgtcgcgtctacgtgggcacgcggtcagacgtgcagtgcagagaccacgaaacggatcccctcgagtcgagcgaaccgaagccgaacatacccacccatcgtctcgtctcgtcgctcgtgggcgtggcgctctctccccccacctcctcttttaagacgacgccatcgccagccggccctccctcgccgtccggcgccgtcctccttccctctcatcacagtttccacctcgcgaggggctcgcgcgcgtgcccatcccggccgatcgactcacgaattcgcgcgcgatcatattcgtgcaagggcatccccgcacgggcacggccggaagcacggaatcacttccccggccgcccccaattcccgggctcctcggcgccgatccctcgccggtgttcgctttccggcggtttccgctgcgtgtcgcgggcaggcgcaagcggcttggctcggctcggctcggttgtttcctcctcgtgccatccatggaggcgaagcagcgcccgcggcacggcggggagaggaggccgccgccggcgacggacggcggcgaggagtacgacccgtggacggcgtggctctacaagccgcgcaccatctcggtgctcctcgtcggcgcctgccttctcatctgggcaagtggagcacttgatcctgaaggtactgccgctcacagtagcgtgacatcaatcaagaggggtgtctgggctatgattgcagtcttccttgcctactgcacgcttcaggcaccttcaacgatacttattaggccccatcctgctgtctggcgcctggtacatggactggctgtcgtttacctcgttgctcttacctttcttcttttccagaaccgtgacgatgctcgccagttcatgaaacaccttcacccagatcttggagttgaattgccggagagatcttatggagcagattgccgcttgtatgttccagaaaaccctaaaaacaagttcataaatatttatgagacattgtttgatgaatttgttgttgcccatatccttgggtggtggggcaaagctgtaatgatacgaaatcaacttctactttgggtcttgtcgattggctttgagctaatggagctaacgttcagacatatgctgccaaactttaatgagtgctggtgggatagcattatcttggacatattgatctgcaattggtttggtatttgggcaggaatgcacacagtccgtcactttgatggcaaaacttatgaatgggttggactgagccgccaacgaagtatcatgggtaaggtatgttcactgacaatacattagcagacgcattttttctccatttcatggcttgttactcttgtcataattttatcgctacatagatatgaccttcgttcctaaaatagccgttcttttagaatgcatcgaatattaaacttccaaaattttgagctttcgtaggagaaggtagttacacctgcactgtcataatgttcaatctatttttcctgcatgtgactaggaaaaatattttgaaaacaatgcatgttcggcactgttgaagtctgaaaaaagtaaaacagaacagtgatagatgtattatagataagtgccggttcttttgcactgctcatttataaccatggcccaaagtcccagatcgttagtacttgtcaactctcccttggatcttgcattatatttctcataagaattacgtggaatggatactcctctgagtaaggacagcaactttccaaagatagtccaagacaagtgactccaaagcaatgcagtttactgagcaaaagtaaatagctttgcttcttgcatgtgagatgccacacaacatgtgatgttttcccagtggtcctgttcacatttctgttgtgctgtctaaatctgatctttgtcattattgaaccccgagtttcttcacagttcatttttctgcatacagttatgcatgcactgttatcttgtaaaagtgcacccacatgtgaatagtcgcatctgtttcagacatccaaactcgtaatcaggcttgcccggtgccccgtccatatgttgtcctaggacaaaaacaattgtatctatcattgagattggctggaggtttttctgccatatcataagtaacagaatagttaagagcttgaaattgtttcagaaggaagatttctagttaagctatgacaaaaacgaactgaaatagttgtgttgttagttcttcaggaacacatggagcacctgaacattagcaacttgagaattcagtgtggattgatattaaaatttgaatttgaacgtaacttgtgcagaccaacagcctagttttactctcttcgtttggcttgcaggtgaaaagatcgttgagccagttcactcctgctcaatgggacaaggatcagtggcatcctttcatggggccactgcggttcatccaagtgctgttcctctgcgttgtcttcatgaccgtggagcttaacacattcttccttaagttttgcctttggatccctccaaggaaccccttggtcgtgtacagattgatcctctggtggctgatcgccatcccaaccatccgcgagtacaactcctacctgcaagacaggaaaccggtgaagaaggttggagccttctgttggctctctctagctatatgcatagtggagctgcttatctgcatgaagtttgggcatgggctgtttcatgacccgatgcctacctggctgatcatcttttggagctcggtcgggactgcactcgtgattttcttgctttcgtggtcatggaggagtcaccaaaggttcaggagaaagcagctctgattgtttcagtttgctacttttctttttcgaattttatataggcgttgtacatatttgatatggtttgtgatgtaacttacgttttaggggtggccatttttctgctgcccctggcaggaacttggtttgtcacgatagatcatgcattgttgacaacatgagattgattaataaattgaaataaccgcgacatcataaccagttgtaattaattattaaagcaaggtcactgcatattttggttccaaactaattctgggccaacaatgcacagttctgtaatacgaatgaccaatcattatctt

SEQ ID NO: 60180 - DNA, 4352 bp, Zea Mays
gagcccagtccgcccgggacgcgtcgcgtctacgtgggcacgcggtcagacgtgcagtgcagagaccacgaaacggatcccctcgagtcgagcgaaccgaagccgaacatacccacccatcgtctcgtctcgtcgctcgtgggcgtggcgctctctccccccacctcctcttttaagacgacgccatcgccagccggccctccctcgccgtccggcgccgtcctccttccctctcatcacagtttccacctcgcgaggggctcgcgcgcgtgcccatcccggccgatcgactcacgaattcgcgcgcgatcatattcgtgcaagggcatccccgcacgggcacggccggaagcacggaatcacttccccggccgcccccaattcccgggctcctcggcgccgatccctcgccggtgttcgctttccggcggtttccgctgcgtgtcgcgggcaggcgcaagcggcttggctcggctcggctcggttgtttcctcctcgtgccatccatggaggcgaagcagcgcccgcggcacggcggggagaggaggccgccgccggcgacggacggcggcgaggagtacgacccgtggacggcgtggctctacaagccgcgcaccatctcggtgctcctcgtcggcgcctgccttctcatctgggcaagtggagcacttgatcctgaaggtactgccgctcacagtagcgtgacatcaatcaagaggggtgtctgggctatgattgcagtcttccttgcctactgcacgcttcaggcaccttcaacgatacttattaggccccatcctgctgtctggcgcctggtacatggactggctgtcgtttacctcgttgctcttacctttcttcttttccagaaccgtgacgatgctcgccagttcatgaaacaccttcacccagatcttggagttgaattgccggagagatcttatggagcagattgccgcttgtatgttccagaaaaccctaaaaacaagttcataaatatttatgagacattgtttgatgaatttgttgttgcccatatccttgggtggtggggcaaagctgtaatgatacgaaatcaacttctactttgggtcttgtcgattggctttgagctaatggagctaacgttcagacatatgctgccaaactttaatgagtgctggtgggatagcattatcttggacatattgatctgcaattggtttggtatttgggcaggaatgcacacagtccgtcactttgatggcaaaacttatgaatgggttggactgagccgccaacgaagtatcatgggtaaggtatgttcactgacaatacattagcagacgcattttttctccatttcatggcttgttactcttgtcataattttatcgctacatagatatgaccttcgttcctaaaatagccgttcttttagaatgcatcgaatattaaacttccaaaattttgagctttcgtaggagaaggtagttacacctgcactgtcataatgttcaatctatttttcctgcatgtgactaggaaaaatattttgaaaacaatgcatgttcggcactgttgaagtctgaaaaaagtaaaacagaacagtgatagatgtattatagataagtgccggttcttttgcactgctcatttataaccatggcccaaagtcccagatcgttagtacttgtcaactctcccttggatcttgcattatatttctcataagaattacgtggaatggatactcctctgagtaaggacagcaactttccaaagatagtccaagacaagtgactccaaagcaatgcagtttactgagcaaaagtaaatagctttgcttcttgcatgtgagatgccacacaacatgtgatgttttcccagtggtcctgttcacatttctgttgtgctgtctaaatctgatctttgtcattattgaaccccgagtttcttcacagttcatttttctgcatacagttatgcatgcactgttatcttgtaaaagtgcacccacatgtgaatagtcgcatctgtttcagacatccaaactcgtaatcaggcttgcccggtgccccgtccatatgttgtcctaggacaaaaacaattgtatctatcattgagattggctggaggtttttctgccatatcataagtaacagaatagttaagagcttgaaattgtttcagaaggaagatttctagttaagctatgacaaaaacgaactgaaatagttgtgttgttagttcttcaggaacacatggagcacctgaacattagcaacttgagaattcagtgtggattgatattaaaatttgaatttgaacgtaacttgtgcagaccaacagcctagttttactctcttcgtttggcttgcaggtgaaaagatcgttgagccagttcactcctgctcaatgggacaaggatcagtggcatcctttcatggggccactgcggttcatccaagtgctgttcctctgcgttgtcttcatgaccgtggagcttaacacattcttccttaagttttgcctttggatccctccaaggaaccccttggtcgtgtacagattgatcctctggtggctgatcgccatcccaaccatccgcgagtacaactcctacctgcaagacaggaaaccggtgaagaaggttggagccttctgttggctctctctagctatatgcatagtggagctgcttatctgcatgaagtttgggcatgatgctccagccctaaccgcgcataaaccccgcgccgccgctgccgcctcctgtcccggtcggatcctccgcgccgctcgcgccgccctcatcttcccagccccaacgcgacgcaccacaagggccctcgccatgtcgaagaaagtaggacgagcgaagaaagcagcgggcggcggcgagctgtcccgcttcctggagtcgcatctccagaccattagcgacaccttccagatgatggcggagtcggctccgggggccttggagcggacggagtggtctgaggtcgttaagctcggcgaccaggtctccaggcaggccaccgtcgctggaatgctctggagcggtgacttgcctgatgtagagaccctcaaagagaacatcgttgcttatttcaacatcctacagggatttcttttggtttgccacggaagcatggtcggtgctgggcctactctacacaagtccatctttgggtctgcaaaagacgtggttgactctagcttctcattgttcaagcatgctgtctctgcttatgaatctcgcagctctgaccgcaacacaactataccccaggtcacaggaactgtatgggaagcttgtgctgctctcaagaaggtgcctgcatcaaactgcattgccataggacgagccatgaccaggataggtgtgtgtctgaaagatgttctccgagaaatgaatgagctccctattggtggttctggtgatagtactgctgagaagtcttccaatggtgttgtcgacacaacgagttgttctgatagagatgagaggtctgatcttgatttagatgatgacgacgacgatgagttcactgaagaagaggttgctgttgccaagttggttattaacgtggtatctgattccttggttgtagtgaaagaggcaattcgtttcattactggtttgctcaggagctctggtaacaaagacaaagatggtgctaatgaggacagagttgagccaatggagaaattgctgagccactgcaaggagatcgcagaccaggtcaacgatcttggggcttctgtatacccaccacaagactcgtctgagatggagctcgctataaaaagactgtacaatggcatcaacgggatgcgcaaggaaatagggaacctcggtggcgcacctgagagcacctttgcagcccttgaaggattcgaaaattgccttggatctctgcgggccaggttagctgatgatgtggtgaacgagatggaaggtcttaatattagccattagcacgtactgttcagattttccatagcagtgttgtgccagtatatcttctggttttgcacgatggaaggagcttctgtggtttcagtaaatgaggcgtccggtctctgtactgatggcgttgttgcgggtcatcgattgtaaaggaagtgggcctggatttctgtaacttctctggttagtgatgccactgtttacgggtcattcattgcgcgaataagattgtttgcattatatcgttcgtgccattgcatatatatacctgtttctctcactacaatagagtttagtttatccggtcgtgagataactaaaaggatgtgaaatgactggattgacaagctagatagttgtaattttaagaggagcaaatgtgcttggtttcaca

SEQ ID NO: 60181 - DNA, 3240 bp, Zea Mays
gagcccagtccgcccgggacgcgtcgcgtctacgtgggcacgcggtcagacgtgcagtgcagagaccacgaaacggatcccctcgagtcgagcgaaccgaagccgaacatacccacccatcgtctcgtctcgtcgctcgtgggcgtggcgctctctccccccacctcctcttttaagacgacgccatcgccagccggccctccctcgccgtccggcgccgtcctccttccctctcatcacagtttccacctcgcgaggggctcgcgcgcgtgcccatcccggccgatcgactcacgaattcgcgcgcgatcatattcgtgcaagggcatccccgcacgggcacggccggaagcacggaatcacttccccggccgcccccaattcccgggctcctcggcgccgatccctcgccggtgttcgctttccggcggtttccgctgcgtgtcgcgggcaggcgcaagcggcttggctcggctcggctcggttgtttcctcctcgtgccatccatggaggcgaagcagcgcccgcggcacggcggggagaggaggccgccgccggcgacggacggcggcgaggagtacgacccgtggacggcgtggctctacaagccgcgcaccatctcggtgctcctcgtcggcgcctgccttctcatctgggcaagtggagcacttgatcctgaaggtactgccgctcacagtagcgtgacatcaatcaagaggggtgtctgggctatgattgcagtcttccttgcctactgcacgcttcaggcaccttcaacgatacttattaggccccatcctgctgtctggcgcctggtacatggactggctgtcgtttacctcgttgctcttacctttcttcttttccagaaccgtgacgatgctcgccagttcatgaaacaccttcacccagatcttggagttgaattgccggagagatcttatggagcagattgccgcttgagacattgtttgatgaatttgttgttgcccatatccttgggtggtggggcaaagctgtaatgatacgaaatcaacttctactttgggtcttgtcgattggctttgagctaatggagctaacgttcagacatatgctgccaaactttaatgagtgctggtgggatagcattatcttggacatattgatctgcaattggtttggtatttgggcaggaatgcacacagtccgtcactttgatggcaaaacttatgaatgggttggactgagccgccaacgaagtatcatgggtgaaaagatcgttgagccagttcactcctgctcaatgggacaaggatcagtggcatcctttcatggggccactgcggttcatccaagtgctgttcctctgcgttgtcttcatgaccgtggagcttaacacattcttccttaagttttgcctttggatccctccaaggaaccccttggtcgtgtacagattgatcctctggtggctgatcgccatcccaaccatccgcgagtacaactcctacctgcaagacaggaaaccggtgaagaaggttggagccttctgttggctctctctagctatatgcatagtggagctgcttatctgcatgaagtttgggcatgatgctccagccctaaccgcgcataaaccccgcgccgccgctgccgcctcctgtcccggtcggatcctccgcgccgctcgcgccgccctcatcttcccagccccaacgcgacgcaccacaagggccctcgccatgtcgaagaaagtaggacgagcgaagaaagcagcgggcggcggcgagctgtcccgcttcctggagtcgcatctccagaccattagcgacaccttccagatgatggcggagtcggctccgggggccttggagcggacggagtggtctgaggtcgttaagctcggcgaccaggtctccaggcaggccaccgtcgctggaatgctctggagcggtgacttgcctgatgtagagaccctcaaagagaacatcgttgcttatttcaacatcctacagggatttcttttggtttgccacggaagcatggtcggtgctgggcctactctacacaagtccatctttgggtctgcaaaagacgtggttgactctagcttctcattgttcaagcatgctgtctctgcttatgaatctcgcagctctgaccgcaacacaactataccccaggtcacaggaactgtatgggaagcttgtgctgctctcaagaaggtgcctgcatcaaactgcattgccataggacgagccatgaccaggataggtgtgtgtctgaaagatgttctccgagaaatgaatgagctccctattggtggttctggtgatagtactgctgagaagtcttccaatggtgttgtcgacacaacgagttgttctgatagagatgagaggtctgatcttgatttagatgatgacgacgacgatgagttcactgaagaagaggttgctgttgccaagttggttattaacgtggtatctgattccttggttgtagtgaaagaggcaattcgtttcattactggtttgctcaggagctctggtaacaaagacaaagatggtgctaatgaggacagagttgagccaatggagaaattgctgagccactgcaaggagatcgcagaccaggtcaacgatcttggggcttctgtatacccaccacaagactcgtctgagatggagctcgctataaaaagactgtacaatggcatcaacgggatgcgcaaggaaatagggaacctcggtggcgcacctgagagcacctttgcagcccttgaaggattcgaaaattgccttggatctctgcgggccaggttagctgatgatgtggtgaacgagatggaaggtcttaatattagccattagcacgtactgttcagattttccatagcagtgttgtgccagtatatcttctggttttgcacgatggaaggagcttctgtggtttcagtaaatgaggcgtccggtctctgtactgatggcgttgttgcgggtcatcgattgtaaaggaagtgggcctggatttctgtaacttctctggttagtgatgccactgtttacgggtcattcattgcgcgaataagattgtttgcattatatcgttcgtgccattgcatatatatacctgtttctctcactacaatagagtttagtttatccggtcgtgagataactaaaaggatgtgaaatgactggattgacaagctagatagttgtaattttaagaggagcaaatgtgcttggtttcaca

SEQ ID NO: 60182 - DNA, 3245 bp, Zea Mays
gagcccagtccgcccgggacgcgtcgcgtctacgtgggcacgcggtcagacgtgcagtgcagagaccacgaaacggatcccctcgagtcgagcgaaccgaagccgaacatacccacccatcgtctcgtctcgtcgctcgtgggcgtggcgctctctccccccacctcctcttttaagacgacgccatcgccagccggccctccctcgccgtccggcgccgtcctccttccctctcatcacagtttccacctcgcgaggggctcgcgcgcgtgcccatcccggccgatcgactcacgaattcgcgcgcgatcatattcgtgcaagggcatccccgcacgggcacggccggaagcacggaatcacttccccggccgcccccaattcccgggctcctcggcgccgatccctcgccggtgttcgctttccggcggtttccgctgcgtgtcgcgggcaggcgcaagcggcttggctcggctcggctcggttgtttcctcctcgtgccatccatggaggcgaagcagcgcccgcggcacggcggggagaggaggccgccgccggcgacggacggcggcgaggagtacgacccgtggacggcgtggctctacaagccgcgcaccatctcggtgctcctcgtcggcgcctgccttctcatctgggcaagtggagcacttgatcctgaaggtactgccgctcacagtagcgtgacatcaatcaagaggggtgtctgggctatgattgcagtcttccttgcctactgcacgcttcaggcaccttcaacgatacttattaggccccatcctgctgtctggcgcctggtacatggactggctgtcgtttacctcgttgctcttacctttcttcttttccagaaccgtgacgatgctcgccagttcatgaaacaccttcacccagatcttggagttgaattgccggagagatcttatggagcagattgccgcttgagacattgtttgatgaatttgttgttgcccatatccttgggtggtggggcaaagctgtaatgatacgaaatcaacttctactttgggtcttgtcgattggctttgagctaatggagctaacgttcagacatatgctgccaaactttaatgagtgctggtgggatagcattatcttggacatattgatctgcaattggtttggtatttgggcaggaatgcacacagtccgtcactttgatggcaaaacttatgaatgggttggactgagccgccaacgaagtatcatgggtaaggtgaaaagatcgttgagccagttcactcctgctcaatgggacaaggatcagtggcatcctttcatggggccactgcggttcatccaagtgctgttcctctgcgttgtcttcatgaccgtggagcttaacacattcttccttaagttttgcctttggatccctccaaggaaccccttggtcgtgtacagattgatcctctggtggctgatcgccatcccaaccatccgcgagtacaactcctacctgcaagacaggaaaccggtgaagaaggttggagccttctgttggctctctctagctatatgcatagtggagctgcttatctgcatgaagtttgggcatgatgctccagccctaaccgcgcataaaccccgcgccgccgctgccgcctcctgtcccggtcggatcctccgcgccgctcgcgccgccctcatcttcccagccccaacgcgacgcaccacaagggccctcgccatgtcgaagaaagtaggacgagcgaagaaagcagcgggcggcggcgagctgtcccgcttcctggagtcgcatctccagaccattagcgacaccttccagatgatggcggagtcggctccgggggccttggagcggacggagtggtctgaggtcgttaagctcggcgaccaggtctccaggcaggccaccgtcgctggaatgctctggagcggtgacttgcctgatgtagagaccctcaaagagaacatcgttgcttatttcaacatcctacagggatttcttttggtttgccacggaagcatggtcggtgctgggcctactctacacaagtccatctttgggtctgcaaaagacgtggttgactctagcttctcattgttcaagcatgctgtctctgcttatgaatctcgcagctctgaccgcaacacaactataccccaggtcacaggaactgtatgggaagcttgtgctgctctcaagaaggtgcctgcatcaaactgcattgccataggacgagccatgaccaggataggtgtgtgtctgaaagatgttctccgagaaatgaatgagctccctattggtggttctggtgatagtactgctgagaagtcttccaatggtgttgtcgacacaacgagttgttctgatagagatgagaggtctgatcttgatttagatgatgacgacgacgatgagttcactgaagaagaggttgctgttgccaagttggttattaacgtggtatctgattccttggttgtagtgaaagaggcaattcgtttcattactggtttgctcaggagctctggtaacaaagacaaagatggtgctaatgaggacagagttgagccaatggagaaattgctgagccactgcaaggagatcgcagaccaggtcaacgatcttggggcttctgtatacccaccacaagactcgtctgagatggagctcgctataaaaagactgtacaatggcatcaacgggatgcgcaaggaaatagggaacctcggtggcgcacctgagagcacctttgcagcccttgaaggattcgaaaattgccttggatctctgcgggccaggttagctgatgatgtggtgaacgagatggaaggtcttaatattagccattagcacgtactgttcagattttccatagcagtgttgtgccagtatatcttctggttttgcacgatggaaggagcttctgtggtttcagtaaatgaggcgtccggtctctgtactgatggcgttgttgcgggtcatcgattgtaaaggaagtgggcctggatttctgtaacttctctggttagtgatgccactgtttacgggtcattcattgcgcgaataagattgtttgcattatatcgttcgtgccattgcatatatatacctgtttctctcactacaatagagtttagtttatccggtcgtgagataactaaaaggatgtgaaatgactggattgacaagctagatagttgtaattttaagaggagcaaatgtgcttggtttcaca

SEQ ID NO: 60183 - DNA, 3070 bp, Zea Mays
gagcccagtccgcccgggacgcgtcgcgtctacgtgggcacgcggtcagacgtgcagtgcagagaccacgaaacggatcccctcgagtcgagcgaaccgaagccgaacatacccacccatcgtctcgtctcgtcgctcgtgggcgtggcgctctctccccccacctcctcttttaagacgacgccatcgccagccggccctccctcgccgtccggcgccgtcctccttccctctcatcacagtttccacctcgcgaggggctcgcgcgcgtgcccatcccggccgatcgactcacgaattcgcgcgcgatcatattcgtgcaagggcatccccgcacgggcacggccggaagcacggaatcacttccccggccgcccccaattcccgggctcctcggcgccgatccctcgccggtgttcgctttccggcggtttccgctgcgtgtcgcgggcaggcgcaagcggcttggctcggctcggctcggttgtttcctcctcgtgccatccatggaggcgaagcagcgcccgcggcacggcggggagaggaggccgccgccggcgacggacggcggcgaggagtacgacccgtggacggcgtggctctacaagccgcgcaccatctcggtgctcctcgtcggcgcctgccttctcatctgggcaagtggagcacttgatcctgaaggtactgccgctcacagtagcgtgacatcaatcaagaggggtgtctgggctatgattgcagtcttccttgcctactgcacgcttcaggcaccttcaacgatacttattaggccccatcctgctgtctggcgcctggtacatggactggctgtcgtttacctcgttgctcttacctttcttcttttccagaaccgtgacgatgctcgccagttcatgaaacaccttcacccagatcttggagttgaattgccggagagatcttatggagcagattgccgcttgtatgttccagaaaaccctaaaaacaagttcataaatatttatgagacattgtttgatgaatttgttgttgcccatatccttgggtggtggggcaaagctgtaatgatacgaaatcaacttctactttgggtcttgtcgattggctttgagctaatggagctaacgttcagacatatgctgccaaactttaatgagtgctggtgggatagcattatcttggacatattgatctgcaattggtttggtatttgggcaggaatgcacacagtccgtcactttgatggcaaaacttatgaatgggttggactgagccgccaacgaagtatcatgggtaaggtgaaaagatcgttgagccagttcactcctgctcaatgggacaaggatcagtggcatcctttcatggggccactgcggttcatccaagtgctgttcctctgcgttgtcttcatgaccgtggagcttaacacattcttccttaagttttgcctttggatccctccaaggaaccccttggtcgtgtacagattgatcctctggtggctgatcgccatcccaaccatccgcgagtacaactcctacctgcaagacaggaaaccggtgaagaaggttggagccttctgttggctctctctagctatatgcatagtggagctgcttatctgcatgaagtttgggcatgggctgtttcatgacccgatgcctacctggctgatcatcttttggagctcggtcgggactgcactcgtgattttcttgctttcgtggtcatggaggagtcaccaaagctggaatgctctggagcggtgacttgcctgatgtagagaccctcaaagagaacatcgttgcttatttcaacatcctacagggatttcttttggtttgccacggaagcatggtcggtgctgggcctactctacacaagtccatctttgggtctgcaaaagacgtggttgactctagcttctcattgttcaagcatgctgtctctgcttatgaatctcgcagctctgaccgcaacacaactataccccaggtcacaggaactgtatgggaagcttgtgctgctctcaagaaggtgcctgcatcaaactgcattgccataggacgagccatgaccaggataggtgtgtgtctgaaagatgttctccgagaaatgaatgagctccctattggtggttctggtgatagtactgctgagaagtcttccaatggtgttgtcgacacaacgagttgttctgatagagatgagaggtctgatcttgatttagatgatgacgacgacgatgagttcactgaagaagaggttgctgttgccaagttggttattaacgtggtatctgattccttggttgtagtgaaagaggcaattcgtttcattactggtttgctcaggagctctggtaacaaagacaaagatggtgctaatgaggacagagttgagccaatggagaaattgctgagccactgcaaggagatcgcagaccaggtcaacgatcttggggcttctgtatacccaccacaagactcgtctgagatggagctcgctataaaaagactgtacaatggcatcaacgggatgcgcaaggaaatagggaacctcggtggcgcacctgagagcacctttgcagcccttgaaggattcgaaaattgccttggatctctgcgggccaggttagctgatgatgtggtgaacgagatggaaggtcttaatattagccattagcacgtactgttcagattttccatagcagtgttgtgccagtatatcttctggttttgcacgatggaaggagcttctgtggtttcagtaaatgaggcgtccggtctctgtactgatggcgttgttgcgggtcatcgattgtaaaggaagtgggcctggatttctgtaacttctctggttagtgatgccactgtttacgggtcattcattgcgcgaataagattgtttgcattatatcgttcgtgccattgcatatatatacctgtttctctcactacaatagagtttagtttatccggtcgtgagataactaaaaggatgtgaaatgactggattgacaagctagatagttgtaattttaagaggagcaaatgtgcttggtttcaca

SEQ ID NO: 60184 - DNA, 3288 bp, Zea Mays
gagcccagtccgcccgggacgcgtcgcgtctacgtgggcacgcggtcagacgtgcagtgcagagaccacgaaacggatcccctcgagtcgagcgaaccgaagccgaacatacccacccatcgtctcgtctcgtcgctcgtgggcgtggcgctctctccccccacctcctcttttaagacgacgccatcgccagccggccctccctcgccgtccggcgccgtcctccttccctctcatcacagtttccacctcgcgaggggctcgcgcgcgtgcccatcccggccgatcgactcacgaattcgcgcgcgatcatattcgtgcaagggcatccccgcacgggcacggccggaagcacggaatcacttccccggccgcccccaattcccgggctcctcggcgccgatccctcgccggtgttcgctttccggcggtttccgctgcgtgtcgcgggcaggcgcaagcggcttggctcggctcggctcggttgtttcctcctcgtgccatccatggaggcgaagcagcgcccgcggcacggcggggagaggaggccgccgccggcgacggacggcggcgaggagtacgacccgtggacggcgtggctctacaagccgcgcaccatctcggtgctcctcgtcggcgcctgccttctcatctgggcaagtggagcacttgatcctgaaggtactgccgctcacagtagcgtgacatcaatcaagaggggtgtctgggctatgattgcagtcttccttgcctactgcacgcttcaggcaccttcaacgatacttattaggccccatcctgctgtctggcgcctggtacatggactggctgtcgtttacctcgttgctcttacctttcttcttttccagaaccgtgacgatgctcgccagttcatgaaacaccttcacccagatcttggagttgaattgccggagagatcttatggagcagattgccgcttgtatgttccagaaaaccctaaaaacaagttcataaatatttatgagacattgtttgatgaatttgttgttgcccatatccttgggtggtggggcaaagctgtaatgatacgaaatcaacttctactttgggtcttgtcgattggctttgagctaatggagctaacgttcagacatatgctgccaaactttaatgagtgctggtgggatagcattatcttggacatattgatctgcaattggtttggtatttgggcaggaatgcacacagtccgtcactttgatggcaaaacttatgaatgggttggactgagccgccaacgaagtatcatgggtaaggtgaaaagatcgttgagccagttcactcctgctcaatgggacaaggatcagtggcatcctttcatggggccactgcggttcatccaagtgctgttcctctgcgttgtcttcatgaccgtggagcttaacacattcttccttaagttttgcctttggatccctccaaggaaccccttggtcgtgtacagattgatcctctggtggctgatcgccatcccaaccatccgcgagtacaactcctacctgcaagacaggaaaccggtgaagaaggttggagccttctgttggctctctctagctatatgcatagtggagctgcttatctgcatgaagtttgggcatgatgctccagccctaaccgcgcataaaccccgcgccgccgctgccgcctcctgtcccggtcggatcctccgcgccgctcgcgccgccctcatcttcccagccccaacgcgacgcaccacaagggccctcgccatgtcgaagaaagtaggacgagcgaagaaagcagcgggcggcggcgagctgtcccgcttcctggagtcgcatctccagaccattagcgacaccttccagatgatggcggagtcggctccgggggccttggagcggacggagtggtctgaggtcgttaagctcggcgaccaggtctccaggcaggccaccgtcgctggaatgctctggagcggtgacttgcctgatgtagagaccctcaaagagaacatcgttgcttatttcaacatcctacagggatttcttttggtttgccacggaagcatggtcggtgctgggcctactctacacaagtccatctttgggtctgcaaaagacgtggttgactctagcttctcattgttcaagcatgctgtctctgcttatgaatctcgcagctctgaccgcaacacaactataccccaggtcacaggaactgtatgggaagcttgtgctgctctcaagaaggtgcctgcatcaaactgcattgccataggacgagccatgaccaggataggtgtgtgtctgaaagatgttctccgagaaatgaatgagctccctattggtggttctggtgatagtactgctgagaagtcttccaatggtgttgtcgacacaacgagttgttctgatagagatgagaggtctgatcttgatttagatgatgacgacgacgatgagttcactgaagaagaggttgctgttgccaagttggttattaacgtggtatctgattccttggttgtagtgaaagaggcaattcgtttcattactggtttgctcaggagctctggtaacaaagacaaagatggtgctaatgaggacagagttgagccaatggagaaattgctgagccactgcaaggagatcgcagaccaggtcaacgatcttggggcttctgtatacccaccacaagactcgtctgagatggagctcgctataaaaagactgtacaatggcatcaacgggatgcgcaaggaaatagggaacctcggtggcgcacctgagagcacctttgcagcccttgaaggattcgaaaattgccttggatctctgcgggccaggttagctgatgatgtggtgaacgagatggaaggtcttaatattagccattagcacgtactgttcagattttccatagcagtgttgtgccagtatatcttctggttttgcacgatggaaggagcttctgtggtttcagtaaatgaggcgtccggtctctgtactgatggcgttgttgcgggtcatcgattgtaaaggaagtgggcctggatttctgtaacttctctggttagtgatgccactgtttacgggtcattcattgcgcgaataagattgtttgcattatatcgttcgtgccattgcatatatatacctgtttctctcactacaatagagtttagtttatccggtcgtgagataactaaaaggatgtgaaatgactggattgacaagctagatagttgtaattttaagaggagcaaatgtgcttggtttcaca

SEQ ID NO: 60185 - DNA, 1298 bp, Zea Mays
gtgctccctctgccccagaaaccgcgtcgcccccagggtgcccttccatccatggcgtcgccgcggccgcccccgcgatcaactcccagatcccgtgctcacctccccgcaatcaaggttgtcacgcccgacgaggatggctgccagtcaccgcacggccggtccgggccccagcgacggctccagcgcaggcgcgaggaagaagctccaactcaccaatgagcagtcgacgctgctcgaggacaccttccgcgcccacaacatactctccaacgcgcagaagcaggagctcgcacggcaggtggatctcagcgccaggcaggaaacaaccacaatcgaattgttgcaagtgcgtcccacgatctgaagacaaaaagatctgttgtccattagcaacaaagtgctacagaggctgtgttctgtgtaccagtacttgataagaacggaatctgcagaaaaattgaaagtctgcatgcttcctgatcatcaaactgcaaataaattgacaaaaaagagtaatggtgagctgctgacatttggaccaaagtcaaaggaaatgtatacaggttcttgtaaccaaagaaggtcttatttctttgaaaagttaatgattccttccaaatcacaaagtgtacatcctaaaaattctgtgtcttcagtaaaatctagcgactttggagtttgtatgtatggcaccaatatcagcagtcagttattcagagcacagaatcaatcttcagctaagactgaaacattgcacagcgattcactagtataaacacgctcttagctggtactctattgtagagatgctagacctcacctgctggtgtcaattttcagttggttgtgaactataagctttgcgtcctgcggtttgtctacattacttccgaggcagtgatgatgatttattaatcactgaggcctggttcgcccttttgttttgcaagattctgcacccttctgatcagttcagaagagaacatggagaaccatgcacttgtggagttgttcatctggaaagtgacaccattattgaatatgattggtaagaataataaattctacatgattgcactggctctcaagttcagggcttcctgcaacgaataatcttaaagtagtttgctataatctatgttttcatataagatatgtttacagatatatgtttttaaacaatacgaataaattgttatttgctactacagagtttttagaccatgtaaaatttaagctaccagtgcctgtctcagtatatcttttaatgtgaacttacgattgcatgaactgtc

SEQ ID NO: 60186 - DNA, 1002 bp, Zea Mays
gtgctccctctgccccagaaaccgcgtcgcccccagggtgcccttccatccatggcgtcgccgcggccgcccccgcgatcaactcccagatcccgtgctcacctccccgcaatcaaggttgtcacgcccgacgaggatggctgccagtcaccgcacggccggtccgggccccagcgacggctccagcgcaggcgcgaggaagaagctccaactcaccaatgagcagtcgacgctgctcgaggacaccttccgcgcccacaacatactctccaacgcgcagaagcaggagctcgcacggcaggtggatctcagcgccaggaaacaaccacaatcgaattgttgcaagtgcgtcccacgatctgaagacaaaaagatctgttgtccattagcaacaaagtgctacagaggctgtgttctgtgtaccagtacttgatagtgagtttcagaatgaacctataactatttccaacatcgacaagaaggatggtgaaaattttcatgatatgtataaatgtcttggcaaggctgtttcgtgtcctctgttaccttatgagcatcgtcatctgaatacacagagaacggaatctgcagaaaaattgaaagtctgcatgcttcctgatcatcaaactgcaaataaattgacaaaaaagagtaatgattctgcacccttctgatcagttcagaagagaacatggagaaccatgcacttgtggagttgttcatctggaaagtgacaccattattgaatatgattggtaagaataataaattctacatgattgcactggctctcaagttcagggcttcctgcaacgaataatcttaaagtagtttgctataatctatgttttcatataagatatgtttacagatatatgtttttaaacaatacgaataaattgttatttgctactacagagtttttagaccatgtaaaatttaagctaccagtgcctgtctcagtatatcttttaatgtgaacttacgattgcatgaactgtc

SEQ ID NO: 60187 - DNA, 1434 bp, Zea Mays
gtgctccctctgccccagaaaccgcgtcgcccccagggtgcccttccatccatggcgtcgccgcggccgcccccgcgatcaactcccagatcccgtgctcacctccccgcaatcaaggttgtcacgcccgacgaggatggctgccagtcaccgcacggccggtccgggccccagcgacggctccagcgcaggcgcgaggaagaagctccaactcaccaatgagcagtcgacgctgctcgaggacaccttccgcgcccacaacatactctccaacgcgcagaagcaggagctcgcacggcaggtggatctcagcgccaggaaacaaccacaatcgaattgttgcaagtgcgtcccacgatctgaagacaaaaagatctgttgtccattagcaacaaagtgctacagaggctgtgttctgtgtaccagtacttgatagtgagtttcagaatgaacctataactatttccaacatcgacaagaaggatggtgaaaattttcatgatatgtataaatgtcttggcaaggctgtttcgtgtcctctgttaccttatgagcatcgtcatctgaatacacagagaacggaatctgcagaaaaattgaaagtctgcatgcttcctgatcatcaaactgcaaataaattgacaaaaaagagtaatggtgagctgctgacatttggaccaaagtcaaaggaaatgtatacaggttcttgtaaccaaagaaggtcttatttctttgaaaagttaatgattccttccaaatcacaaagtgtacatcctaaaaattctgtgtcttcagtaaaatctagcgactttggagtttgtatgtatggcaccaatatcagcagtcagttattcagagcacagaatcaatcttcagctaagactgaaacattgcacagcgattcactagtataaacacgctcttagctggtactctattgtagagatgctagacctcacctgctggtgtcaattttcagttggttgtgaactataagctttgcgtcctgcggtttgtctacattacttccgaggcagtgatgatgatttattaatcactgaggcctggttcgcccttttgttttgcaagattctgcacccttctgatcagttcagaagagaacatggagaaccatgcacttgtggagttgttcatctggaaagtgacaccattattgaatatgattggtaagaataataaattctacatgattgcactggctctcaagttcagggcttcctgcaacgaataatcttaaagtagtttgctataatctatgttttcatataagatatgtttacagatatatgtttttaaacaatacgaataaattgttatttgctactacagagtttttagaccatgtaaaatttaagctaccagtgcctgtctcagtatatcttttaatgtgaacttacgattgcatgaactgtc

SEQ ID NO: 60188 - DNA, 784 bp, Zea Mays
gtgctccctctgccccagaaaccgcgtcgcccccagggtgcccttccatccatggcgtcgccgcggccgcccccgcgatcaactcccagatcccgtgctcacctccccgcaatcaaggttgtcacgcccgacgaggatggctgccagtcaccgcacggccggtccgggccccagcgacggctccagcgcaggcgcgaggaagaagctccaactcaccaatgagcagtcgacgctgctcgaggacaccttccgcgcccacaacatactctccaacgcgcagaagcaggagctcgcacggcaggtggatctcagcgccaggcaggaaacaaccacaatcgaattgttgcaagtgcgtcccacgatctgaagacaaaaagatctgttgtccattagcaacaaagtgctacagaggctgtgttctgtgtaccagtacttgataattctgcacccttctgatcagttcagaagagaacatggagaaccatgcacttgtggagttgttcatctggaaagtgacaccattattgaatatgattggtaagaataataaattctacatgattgcactggctctcaagttcagggcttcctgcaacgaataatcttaaagtagtttgctataatctatgttttcatataagatatgtttacagatatatgtttttaaacaatacgaataaattgttatttgctactacagagtttttagaccatgtaaaatttaagctaccagtgcctgtctcagtatatcttttaatgtgaacttacgattgcatgaactgtc

SEQ ID NO: 60189 - DNA, 2248 bp, Zea Mays
caagaaacagcaaacaggcacagccctcccctcctccactcctcgccctctctctctctctctctctcatcccgtcccgagaagcggacaaagcgcggcgctgcagatttcgatccggttcccaatgcctcccatgctcgccgtcgccccgtgctagctcctctcccgtctccgcttcctccacctgccgcgccagcgccacgccgcctggatccggcgagcgcgtggccgggagcctcagatccgagcgaaacccagccttcccgtggtgacggccttcgctctagctccagattggctggcggctgccattcctcctcctcctcttctcgctcgaggtttcaaggcgggtccgttcagctctgtgctggcgtgacagtggaaaggcttactgttgccatggtattggtgtgacgaacccgtcaaggttttgcgcaagatgtggaagcagctcctcagcaagctgccccggaagtcgccggcctgcggggattcgggccagtgcagcaatggcaccggtatacagcgcacgagcagctgcgggagcatcccgcccggccgcccggcctccgccatccggcgcatgtcatccgccgtcttcccctcgagtgtcgtggccggtatcgagccgctggtctcgttcaaggatgtccccaactcggagaagcagaacctgttcgtcagcaagctgagcctgtgctgcgtcgtcttcgatttctcggacccgaacaagagctcagtggagaaggatatcaagaggcaggcattgctggatcttatagagtttgtcgagtcgaccaacgctcgcttctcggaggcagccatcgcggcctgctctaggatgtgtgccatcaacctgttccgggcgttccctccgagttgcagatctggctcatcaggtggtggtgagggcgacgaggaagagccaatgttcgaccccgcgtggtgccacctgcagcttgtttatgagctgctgctgaaatttatcggatcctcgtccttggacgcgaaggtagggaagaagcactttgatcactcattcatcgtgaagctccttaatcttcttgactccgaggatccaagagagagggattgcttgaaaactattctgcacagggtatatgggaagttcatggtacaccgtcctttcatccgcaaagcagtgagcaacatattttaccagtttgtctttgagactgatcggcacaatgggatcgcggagctgctggaggtctttggcagtgtcattagtgggtttgcattgcctctgaaagaagaacacaagatctttctttggagagttctgattcctttacacaaaccaaaatctgttggtgtgtatcttcagcagttgacctactgtgtaacacagtttctggaaaaggacccaaagcttgcaagctcagtgataattggtttgttaagatattggccgataacaaactgtcagaaggaagtgatgtttctcagtgagattgaagagatcttggagtctaccagccaagcagaatttcagaaatgtatggtaccgttgtttcggcgaattgctcattgtattaccagttcccacttccaggttgctgaaagagcgctcttcgtatggaacaatgatcacattatcagcttgattgcacaaaaccgccaagtgatcatgcctcttgtcattccagcgctagagcaaaacattcagaatcactggaaccaggcggtcctgaatctgaccgtgaatgtcaagaaaatgttatctgagatggacgacgatctcttctcgtcatgcctggcgaagtacaaggacgaagaagaaaaacgcgtgtcgctagaagcgaagcgtagacttacgtgggagaagctcgagtcagctgcagctttccagccagtgactggccatacagccgtcctagtaggccaccggccgtcagcaaatctgatcgccaccatgatctagctcatgcatgtatgccgaacaagcgaatgtggtgctctcccccccttttggtgaggcgcagcaagtgtagtgttctctattttgctcctgcttattattattttccttttgctggtatgggtaatcagtgtagtagtaagttgtaactatttccggatgtttatgttcttaaggcaaggatacctgtaacttaagactgccgagtgctgacactctacatgtatctttgcctgtttatggatgaacaggtgtcctacagtttaatttcaaaaaagatgagtatatctaaaaaaacataaaaaa

SEQ ID NO: 60190 - DNA, 2226 bp, Zea Mays
caagaaacagcaaacaggcacagccctcccctcctccactcctcgccctctctctctctctctctctcatcccgtcccgagaagcggacaaagcgcggcgctgcagatttcgatccggttcccaatgcctcccatgctcgccgtcgccccgtgctagctcctctcccgtctccgcttcctccacctgccgcgccagcgccacgccgcctggatccggcgagcgcgtggccgggagcctcagatccgagcgaaacccagccttcccgtggtgacggccttcgctctagctccagattggctggcggctgccattcctcctcctcctcttctcgctcgaggtttcaaggcgggtccgttcagctctgaaatctacggaggagtcttgccgccgctttaaacgtagaggttttgcgcaagatgtggaagcagctcctcagcaagctgccccggaagtcgccggcctgcggggattcgggccagtgcagcaatggcaccggtatacagcgcacgagcagctgcgggagcatcccgcccggccgcccggcctccgccatccggcgcatgtcatccgccgtcttcccctcgagtgtcgtggccggtatcgagccgctggtctcgttcaaggatgtccccaactcggagaagcagaacctgttcgtcagcaagctgagcctgtgctgcgtcgtcttcgatttctcggacccgaacaagagctcagtggagaaggatatcaagaggcaggcattgctggatcttatagagtttgtcgagtcgaccaacgctcgcttctcggaggcagccatcgcggcctgctctaggatgtgtgccatcaacctgttccgggcgttccctccgagttgcagatctggctcatcaggtggtggtgagggcgacgaggaagagccaatgttcgaccccgcgtggtgccacctgcagcttgtttatgagctgctgctgaaatttatcggatcctcgtccttggacgcgaaggtagggaagaagcactttgatcactcattcatcgtgaagctccttaatcttcttgactccgaggatccaagagagagggattgcttgaaaactattctgcacagggtatatgggaagttcatggtacaccgtcctttcatccgcaaagcagtgagcaacatattttaccagtttgtctttgagactgatcggcacaatgggatcgcggagctgctggaggtctttggcagtgtcattagtgggtttgcattgcctctgaaagaagaacacaagatctttctttggagagttctgattcctttacacaaaccaaaatctgttggtgtgtatcttcagcagttgacctactgtgtaacacagtttctggaaaaggacccaaagcttgcaagctcagtgataattggtttgttaagatattggccgataacaaactgtcagaaggaagtgatgtttctcagtgagattgaagagatcttggagtctaccagccaagcagaatttcagaaatgtatggtaccgttgtttcggcgaattgctcattgtattaccagttcccacttccaggttgctgaaagagcgctcttcgtatggaacaatgatcacattatcagcttgattgcacaaaaccgccaagtgatcatgcctcttgtcattccagcgctagagcaaaacattcagaatcactggaaccaggcggtcctgaatctgaccgtgaatgtcaagaaaatgttatctgagatggacgacgatctcttctcgtcatgcctggcgaagtacaaggacgaagaagaaaaacgcgtgtcgctagaagcgaagcgtagacttacgtgggagaagctcgagtcagctgcagctttccagccagtgactggccatacagccgtcctagtaggccaccggccgtcagcaaatctgatcgccaccatgatctagctcatgcatgtatgccgaacaagcgaatgtggtgctctcccccccttttggtgaggcgcagcaagtgtagtgttctctattttgctcctgcttattattattttccttttgctggtatgggtaatcagtgtagtagtaagttgtaactatttccggatgtttatgttcttaaggcaaggatacctgtaacttaagactgccgagtgctgacactctacatgtatctttgcctgtttatggatgaacaggtgtcctacagtttaatttcaaaaaagatgagtatatctaaaaaaacataaaaaa

SEQ ID NO: 60191 - DNA, 2175 bp, Zea Mays
aaacaggcacagccctcccctcctccactcctcgccctctctctctctctctctctcatcccgtcccgagaagcggacaaagcgcggcgctgcagatttcgatccggttcccaatgcctcccatgctcgccgtcgccccgtgctagctcctctcccgtctccgcttcctccacctgccgcgccagcgccacgccgcctggatccggcgagcgcgtggccgggagcctcagatccgagcgaaacccagccttcccgtggtgacggccttcgctctagctccagattggctggcggctgccattcctcctcctcctcttctcgctcgaggtttcaaggcgggtccgttcagctctggttttgcgcaagatgtggaagcagctcctcagcaagctgccccggaagtcgccggcctgcggggattcgggccagtgcagcaatggcaccggtatacagcgcacgagcagctgcgggagcatcccgcccggccgcccggcctccgccatccggcgcatgtcatccgccgtcttcccctcgagtgtcgtggccggtatcgagccgctggtctcgttcaaggatgtccccaactcggagaagcagaacctgttcgtcagcaagctgagcctgtgctgcgtcgtcttcgatttctcggacccgaacaagagctcagtggagaaggatatcaagaggcaggcattgctggatcttatagagtttgtcgagtcgaccaacgctcgcttctcggaggcagccatcgcggcctgctctaggatgtgtgccatcaacctgttccgggcgttccctccgagttgcagatctggctcatcaggtggtggtgagggcgacgaggaagagccaatgttcgaccccgcgtggtgccacctgcagcttgtttatgagctgctgctgaaatttatcggatcctcgtccttggacgcgaaggtagggaagaagcactttgatcactcattcatcgtgaagctccttaatcttcttgactccgaggatccaagagagagggattgcttgaaaactattctgcacagggtatatgggaagttcatggtacaccgtcctttcatccgcaaagcagtgagcaacatattttaccagtttgtctttgagactgatcggcacaatgggatcgcggagctgctggaggtctttggcagtgtcattagtgggtttgcattgcctctgaaagaagaacacaagatctttctttggagagttctgattcctttacacaaaccaaaatctgttggtgtgtatcttcagcagttgacctactgtgtaacacagtttctggaaaaggacccaaagcttgcaagctcagtgataattggtttgttaagatattggccgataacaaactgtcagaaggaagtgatgtttctcagtgagattgaagagatcttggagtctaccagccaagcagaatttcagaaatgtatggtaccgttgtttcggcgaattgctcattgtattaccagttcccacttccaggttgctgaaagagcgctcttcgtatggaacaatgatcacattatcagcttgattgcacaaaaccgccaagtgatcatgcctcttgtcattccagcgctagagcaaaacattcagaatcactggaaccaggcggtcctgaatctgaccgtgaatgtcaagaaaatgttatctgagatggacgacgatctcttctcgtcatgcctggcgaagtacaaggacgaagaagaaaaacgcgtgtcgctagaagcgaagcgtagacttacgtgggagaagctcgagtcagctgcagctttccagccagtgactggccatacagccgtcctagtaggccaccggccgtcagcaaatctgatcgccaccatgatctagctcatgcatgtatgccgaacaagcgaatgtggtgctctcccccccttttggtgaggcgcagcaagtgtagtgttctctattttgctcctgcttattattattttccttttgctggtatgggtaatcagtgtagtagtaagttgtaactatttccggatgtttatgttcttaaggcaaggatacctgtaacttaagactgccgagtgctgacactctacatgtatctttgcctgtttatggatgaacaggtgtcctacagtttaatttcaaaaaagatgagtatatctaaaaaaacataaaaaa

SEQ ID NO: 60192 - DNA, 2223 bp, Zea Mays
aaacaggcacagccctcccctcctccactcctcgccctctctctctctctctctctcatcccgtcccgagaagcggacaaagcgcggcgctgcagatttcgatccggttcccaatgcctcccatgctcgccgtcgccccgtgctagctcctctcccgtctccgcttcctccacctgccgcgccagcgccacgccgcctggatccggcgagcgcgtggccgggagcctcagatccgagcgaaacccagccttcccgtggtgacggccttcgctctagctccagattggctggcggctgccattcctcctcctcctcttctcgctcgaggtttcaaggcgggtccgttcagctctgtggaaaggcttactgttgccatggtattggtgtgacgaacccgtcaaggttttgcgcaagatgtggaagcagctcctcagcaagctgccccggaagtcgccggcctgcggggattcgggccagtgcagcaatggcaccggtatacagcgcacgagcagctgcgggagcatcccgcccggccgcccggcctccgccatccggcgcatgtcatccgccgtcttcccctcgagtgtcgtggccggtatcgagccgctggtctcgttcaaggatgtccccaactcggagaagcagaacctgttcgtcagcaagctgagcctgtgctgcgtcgtcttcgatttctcggacccgaacaagagctcagtggagaaggatatcaagaggcaggcattgctggatcttatagagtttgtcgagtcgaccaacgctcgcttctcggaggcagccatcgcggcctgctctaggatgtgtgccatcaacctgttccgggcgttccctccgagttgcagatctggctcatcaggtggtggtgagggcgacgaggaagagccaatgttcgaccccgcgtggtgccacctgcagcttgtttatgagctgctgctgaaatttatcggatcctcgtccttggacgcgaaggtagggaagaagcactttgatcactcattcatcgtgaagctccttaatcttcttgactccgaggatccaagagagagggattgcttgaaaactattctgcacagggtatatgggaagttcatggtacaccgtcctttcatccgcaaagcagtgagcaacatattttaccagtttgtctttgagactgatcggcacaatgggatcgcggagctgctggaggtctttggcagtgtcattagtgggtttgcattgcctctgaaagaagaacacaagatctttctttggagagttctgattcctttacacaaaccaaaatctgttggtgtgtatcttcagcagttgacctactgtgtaacacagtttctggaaaaggacccaaagcttgcaagctcagtgataattggtttgttaagatattggccgataacaaactgtcagaaggaagtgatgtttctcagtgagattgaagagatcttggagtctaccagccaagcagaatttcagaaatgtatggtaccgttgtttcggcgaattgctcattgtattaccagttcccacttccaggttgctgaaagagcgctcttcgtatggaacaatgatcacattatcagcttgattgcacaaaaccgccaagtgatcatgcctcttgtcattccagcgctagagcaaaacattcagaatcactggaaccaggcggtcctgaatctgaccgtgaatgtcaagaaaatgttatctgagatggacgacgatctcttctcgtcatgcctggcgaagtacaaggacgaagaagaaaaacgcgtgtcgctagaagcgaagcgtagacttacgtgggagaagctcgagtcagctgcagctttccagccagtgactggccatacagccgtcctagtaggccaccggccgtcagcaaatctgatcgccaccatgatctagctcatgcatgtatgccgaacaagcgaatgtggtgctctcccccccttttggtgaggcgcagcaagtgtagtgttctctattttgctcctgcttattattattttccttttgctggtatgggtaatcagtgtagtagtaagttgtaactatttccggatgtttatgttcttaaggcaaggatacctgtaacttaagactgccgagtgctgacactctacatgtatctttgcctgtttatggatgaacaggtgtcctacagtttaatttcaaaaaagatgagtatatctaaaaaaacataaaaaa

SEQ ID NO: 60193 - DNA, 2238 bp, Zea Mays
aaacaggcacagccctcccctcctccactcctcgccctctctctctctctctctctcatcccgtcccgagaagcggacaaagcgcggcgctgcagatttcgatccggttcccaatgcctcccatgctcgccgtcgccccgtgctagctcctctcccgtctccgcttcctccacctgccgcgccagcgccacgccgcctggatccggcgagcgcgtggccgggagcctcagatccgagcgaaacccagccttcccgtggtgacggccttcgctctagctccagattggctggcggctgccattcctcctcctcctcttctcgctcgaggtttcaaggcgggtccgttcagctctgtgctggcgtgacagtggaaaggcttactgttgccatggtattggtgtgacgaacccgtcaaggttttgcgcaagatgtggaagcagctcctcagcaagctgccccggaagtcgccggcctgcggggattcgggccagtgcagcaatggcaccggtatacagcgcacgagcagctgcgggagcatcccgcccggccgcccggcctccgccatccggcgcatgtcatccgccgtcttcccctcgagtgtcgtggccggtatcgagccgctggtctcgttcaaggatgtccccaactcggagaagcagaacctgttcgtcagcaagctgagcctgtgctgcgtcgtcttcgatttctcggacccgaacaagagctcagtggagaaggatatcaagaggcaggcattgctggatcttatagagtttgtcgagtcgaccaacgctcgcttctcggaggcagccatcgcggcctgctctaggatgtgtgccatcaacctgttccgggcgttccctccgagttgcagatctggctcatcaggtggtggtgagggcgacgaggaagagccaatgttcgaccccgcgtggtgccacctgcagcttgtttatgagctgctgctgaaatttatcggatcctcgtccttggacgcgaaggtagggaagaagcactttgatcactcattcatcgtgaagctccttaatcttcttgactccgaggatccaagagagagggattgcttgaaaactattctgcacagggtatatgggaagttcatggtacaccgtcctttcatccgcaaagcagtgagcaacatattttaccagtttgtctttgagactgatcggcacaatgggatcgcggagctgctggaggtctttggcagtgtcattagtgggtttgcattgcctctgaaagaagaacacaagatctttctttggagagttctgattcctttacacaaaccaaaatctgttggtgtgtatcttcagcagttgacctactgtgtaacacagtttctggaaaaggacccaaagcttgcaagctcagtgataattggtttgttaagatattggccgataacaaactgtcagaaggaagtgatgtttctcagtgagattgaagagatcttggagtctaccagccaagcagaatttcagaaatgtatggtaccgttgtttcggcgaattgctcattgtattaccagttcccacttccaggttgctgaaagagcgctcttcgtatggaacaatgatcacattatcagcttgattgcacaaaaccgccaagtgatcatgcctcttgtcattccagcgctagagcaaaacattcagaatcactggaaccaggcggtcctgaatctgaccgtgaatgtcaagaaaatgttatctgagatggacgacgatctcttctcgtcatgcctggcgaagtacaaggacgaagaagaaaaacgcgtgtcgctagaagcgaagcgtagacttacgtgggagaagctcgagtcagctgcagctttccagccagtgactggccatacagccgtcctagtaggccaccggccgtcagcaaatctgatcgccaccatgatctagctcatgcatgtatgccgaacaagcgaatgtggtgctctcccccccttttggtgaggcgcagcaagtgtagtgttctctattttgctcctgcttattattattttccttttgctggtatgggtaatcagtgtagtagtaagttgtaactatttccggatgtttatgttcttaaggcaaggatacctgtaacttaagactgccgagtgctgacactctacatgtatctttgcctgtttatggatgaacaggtgtcctacagtttaatttcacaaaaagatgagtatatctaaaaaaacataaaaaa

SEQ ID NO: 60194 - DNA, 9787 bp, Zea Mays
tcggcgaggaggcggcattctctctacttccctacgaagccgggcaatgtcggcgacgcagagcctggctctcaagctccgggcggctcccgcgccgggcaggccccgtggccggacgacggtgagggcagctggagcggcgcatgccggggcgctgctgcagcaccgccgctgcgtgtcgctggcgcagggcgggcggttcctccgcggcgcgccgctccccgccgcccagcggcgcccgcgggcattgccgtgggccgagcgcgccgcgcggcgccacggcggcggctcggtggtggcggcggccgcggcgggggtcaggtccatgtcgaagctaccgcagggcgacactgggctctacgacccgtccatggaccgcgattcctgcggcgtcggcttcatcgccgagctctccgccgagcccagccgcaaaaccatcgtcgacgccgtcgagatgcttgagagaatgtcccaccgtggcgcctgtggctgtgacaagaacaccggcgatggtgcgggcatccttgttgcactgccggatgcctttctcagagaggtcaccaaggacgccggctttgagcttccaccgcaaggtgagtacgccgtagggatgttcttcatgccccacgatgatgaccgacgtgagaagaccaagcttgtgttccatgagattgccgagtcattgggacatgtagtgcttgggtggcgtcgggttccaacagacaactcggacttgggcaaagcagcgcttgaaactgaaccaacgatcgaacaagtgtttgtgtctaagagcatgcactccaaggctgactttgagcaacagttgtacatcctacgtgggctctcaatcaagtccatccgtgaagctttatgtcttgagcacggaggaccaaatgatttctatacgtgctctctatcttcaaggactgttgtttacaagggtcagctgaagccaactcaacttaaagggtacttctttgcagacttaggtgaccaaaggttcaaaagttacatggctctggttcactcaagattctccacgaacaccttccccagctgggatcgggcacaaccaatgcgtgttttgggacataatggcgagatcaatacccttagagggaacaagaactggatgacagcacgtgaaggtcttctggagtgcaagggactcggtctatcaagggatgaaatgtcaaaacttctgcctatagtggatgttacctcttcagactcaggtgcatttgataatgtacttgagcttctcatccggtctggaaggagcttgccagaggctgtgatgatgatgatccctgaggcgtggcacaatgacgttaacatggacccagagaaaaaggctttgtatgaatacttttcggcccttatggagccttgggatggacctgccctagtgtcatttactgatggccgttatcttggtgctactctggatcgtaatggcttgcggcctggccgtttttatgtgacatacagtggccgcgtgatcatggctagcgaagttggtgtggttgatgtccctaatgacgatgtgatgagaaagggcaggctaaaccctggtatgatgcttttagttgattttgagaagcattgtattgtggatgatgatgcattgaagaaacaatactctggagctcgcccgtatggggagtggcttgagagacaaaagatacaacttgcagatattatagaatctgtatctgaaactgagagaattgctcctaggattggcatgcttccacaaaagagcgagaacaaggaagccttttgtattcatggaattttggctccgctgaaagcctttgggtacacggtagaaacactccaaatgttgctgctaccaatggccaaaaatggtgtagaagctctaggatccatgggaaacgatacccctctcgctgttatgtcaaacagagagaagctgccttttgattatttcaagcaaatgtttgctcaggttacaaacccaccaatcgacccaattagagaaaaaattgtcacatccatggagtgtatgattggtccagaaggtgacttatctgaaacaacagaacatcagtgtcatcgactgaaacttcaaggtcctttactgcatatagatgaaatggaggctattaaaaatatgaactttcgtggttggcgcagcaaggttcttgacataacttatcctaaagagtatggaagggaaggtttagaacaaactttggataaactctgtgatcaagctcgtgaagctattcatgagggatacaccattctagttctctctgatagaggtttctctccagatcgtgtagctgtcagttctctattggcagttggagctgtccatcagcatcttgtcttgaatcttgagaggacacgcatagggttgcttgttgattcagctgaacctcgtgaagtgcaccatttctgtagccttcttggatttggtgcagatgctatatgcccttatttggctattgaagccatatggcggttacagattgatgagaaaatacctcttcaagatgacggacagctgtatccaaaggaacttattgacaagtatttctatgcttctaacaatggaataatgaaggttcttgcaaagatggggatttccaccctggcgtcgtacaaaggtgcccagatatttgaggcccttggtcttgcttcagaagtggtcagtaagtgttttgaaggtacacctagtagagttgagggctcaacatttgaaatgcttgcacaagatgcacttcatctccatgagttggcattcccgtcaagaactttaccacctggaagtgcagaagcaaactctcttcccaacccgggagatcatcactggaggaaaaatggagaagtacaccttaatgatcctttttctattgcaaaattacaggaagcagctagactcgacagcagggaagcatacaaagaatattctagatacactcaggagctgaataagtcttgtactctgcgtggtatgctgaagtttagagaaactccagtcaggatttccttggatgaggttgaacctgcaagtgaaatagtcaagagattttgtactggagcaatgagttatggatccatttccttggaagctcatacaacgatggctaaggctcagaatataatgggagcaaaatctaatacaggtattttccaccatggacgataatgaccaccctaaccattcttatgaataccatatatgtttaggcaaaattgatgttcttaaatgccaatgaactagaaaaattcaacctaccggggtaagacatcccatgagtattttgttaagaagacctcacacaagttgagaaaccccctaaacccttgccccacacccatccatattgacatcgtagcccatgtaagaatggtcatggccttaggccggaccttaggcctgagctttgacatatgggagacgaaatgccaagtgaactatatgttgattactttattcttggcctttttctatgtcacatgccatttgaggcacagcaaacaggttgaagttgtttcataacccttgttcactgcattttgtatgttatgatgtttaaatttcttcttgcaaccatgtgccttattttatctatgatttgctcatcatagttattcgcttcaagtataattgctaattggttactataccctcccccccggaagggaggtgagaacattggcacataatatatcagaagaaaaatagttggccaagtttttatgaaaaaaagcagggcccaaaaaccgaacaactgaaaattggcccagttttcaagaaaaagaattgacccagcattgctgcataattgccaagtacagttggtaactagttccatttcatatgctaactgggatgcatatatatgatacgaaggcgagggaggagaacaatcgtctcgcatggagcctcttcctgatggttccatgaatccattgatgagtgcgatcaagcaggttgcaagtggaagattcggagtttctattgattatctgtcaaatgctattgagctgcagataaaaatggctcaggtatatttgactacactatacacctgcttgaagtacctaagcaccatggggaacctcttccctgaattgctcgaaagaacaacttggttctgcatcactatgtactatgcttgatttgttgtacctaatcctacaacatatgctggttatttgtcatgttgaagaaatttatatcttttacagggtgctaaacctggtgaagggggcgagctcccaagtcataaggtcatcggcgacattgcaattacaagacattctacagctggcgtaggactcatcagcccacctcctcaccatgatatatattctattgaggatctcgcacaacttatctatgaccttaaggtatgctctcatgatgattttttttcttttccaggagtcttgctatatatgcttatgactatctttttaaagattatgttgttgatgttacttagtacaagcatcatatttgtagttgaagtcgcacttgccagcatagttcttccttaaaatgttgctttcttatgttaaggttctccatttttctgtagaatgcaaatcctggggctagaattagtgtgaaactagtctctgaggctggtgtgggagttgtcgcaagtggtgttgttaaaggacatgcagaccatattctcatctctgggcatgatggaggcacaggggcttctagatggacaggaattaaacatgctggacttccttgggagcttggattggctgagacacatcagactctagtggcaaatgggctccgtgcccgagttgtccttcagacagatggacaattgaaaattggtagagatgttgtcattgcttgtttacttggggcagaggaatttggatttagcacagctccactaatcgtacttggttgccttttgatgaggcaatgtcatactaatacctgtcctgttggtattgctacacaagatccaattctcagagaaaaatttgctggaaagccagagcatatcataaacttcttcttcatgcttgctgaggaggtacgagaaattatgtctcagcttggtttccgtactatcaatgaaatggttgggcgatcagatatgcttgaggttgattcagatgtactgaaaggcaacgagaaacttcagaacattgatctatcactgatcttgaaaccagctgctgagattagccccgaggctgttcaatattgcgttgagaaacaagaccatggccttgatatggcattagataacaaactcatagcatcctcaagagctgcccttgaaaaaagatttcgtgttttcattgaggcaccagtcaagaacactgatagagctgttggcactatgctcagccatgaagtgacaaaactgtttcgaatgcctggactgcctccagacaccatccgtgttaaactcaatggaagtgccggtcaaagttttggtgcctttctctgtcctggagtcactcttgagcttgaaggagacagcaatgattatgttggtaaaggattatctggtgggaagattattgtttaccctcccaaaaacagccgatttatcccgcaggacaatattgttattggtaatgtggctctatatggttctaccaaaggagaagcatattttaatggcatggcagctgaaaggttttgtgtccgcaattcaggtgcacaagcagttgttgaaggaattggcgatcatggatgtgaatacatgacaggaggcactgttgttattctgggaaaaactggtagaaactttgccgctggcatgagtggcggcattgcttatatttatgatgtggatgggatgttcagtacccgttgcaatcatgagttagttgacctgtatagtgtagatgaagaggatgacattacaacattaagggtgatgatagaacagcatcgactcaacacagaaagtgttttggccaaatatatactttctaatttcgaggatattcttccaaaatttgtaaaagtatttccaagagattacaggcgggttttggagaatatgaaggcagaaaaggttgccaaagaagcagagcaaaaaaggagaaaaaaggggtgggataagaaggcaggtgaaatgattaaagctccaaatggtgtttcagtaattacaaaggaagtacagaacaaaaagtcatctagccgaccaacacaagttctcaatgctgaaaaacctcgaggttttgtaaaatatgagcgagaggggatctcttacagacatgaaaatgagcgtattaaggattgggatgaagttataaatgaattggtttgtgggccactgataaacacacaatctgctaggtgcatgggttgtggcacgcctttctgtcatcaggtgatacttaaaatttcaagttctgctctttttaatgaaatctattatatttcaagccttttgtttaggtctgtaaaattgtatggttttttcattgactttattattgatctaaaggagtccacatacatgtgcagtatacatgggttagctccgcattccgaatagaatttaataaatgtgctactctgaaaatataatgcagaaatgaagatattactaaaaccaacaaccaaagtgtgctgtctagggtttgtcacaggcatatttttcgatcattagcccagatagttatctattgttgctgtaaagcttgctttccattgtggtagcttaaattaattatcatatcctctttgctatcaaattttcagtattttaaagctgttatctatgctgacataaaaagaaccagtaatattgtcttggtaaatttacacaagtttgtgtacacattgacatcaaacagtcaagattcatgaagggggtgtttggtttgtgtaataaagtggtccaccatcatatcactctttagtttttttggttggtttctgggatagaatgagttgatacatcgccacctcattccccacaggttaataatcagtactagtacaaggaatatggtgtttccaccaaatttaaggaacagactcatgatgcaccacccctatctagaatgggttgatttctcaaaccaaacatcccataaatgtcttgccagtaattattacatatctaggtgactaggtctcaattaaccctaatacctaagctacaagttaattgcctaaccaaaccatttaattgcattgttcttcagtaaataatagtgatattgattcatatacttttcaaatttattacaatttgaatttcttatgcttgctggttggtatgaaaatattaatattttggttgtaattttcttgaatcaaaattctacaggaaaattttggtgctgggtgtcctcttggaaataagatccctgaattcaatgaattagtttatcagaacagatggcgtgaagcgttatatcgcctacttgagaccaacaattttcctgagttcactggacgagtttgcccagccccttgtgagggttcatgtgtgcttggcattatagagaatccagtatctataaaaagcatagagtgtgccatcatagacaagggcttcaaagagggctggatggtaccatgccctccccttcatagaacagggtatgcttttgttgtcatctttggcttgctttgctactgcatgaatgaaagcatgccataatagttgcattgaaacgatttaatatgcaggatgacagttgctataattggaagtggaccggctggtttagctgctgcagatcaactgaacaagatgggccattatgtagttgtgtttgaacgtgatgatcgtattggagggctgatgatgtatggggttccaaacatgaaggcagacaaagctacaatcgttcagcgccgtgttgatttaatggataaggagggagttaaattcattgtgaatgcccatgttggaactgatcctcggtactctattgagcggctccaagctgagaatgatgcagttattttggcttgtggtgctactaggccgaggtgattcaataacacttaaaaatgagttcaaaatgcctaacatcatccttagcaccaatatgacaataatataagctctaaactatatggttatgatgttaaataggagtataattataaattgtatgaatttgagaatttgctaacacctagagcattatccttgaacagagatctctctatccctggacgtgaactgtcaggcatccattttgctatggattttcttcatgccaataccaaaagtttacttgacagcaatttagaggatggtaagtacatatctgctaaagggaaaaaggtagtcgtaattggtggtggtgacacaggtacagattgtattgggacagccatcagacatgattgcagcaaccttgtaaaccttgaacttctaccagaaccgtctaaagagagggcccctgacaatccgtggcctcagtggccgaggatattccgaatagactatgggcaccaagaagcagtcagcaagtttggaaaagacccaagaacttaccaaatcctcacgaaacgttttatcggagatgaaaatggaaaagtgagggcccttgaggtagtacgcgttgagtggagcaaagtggacggaagatttcagtccaaggagatagaaggttcacaagaaatcattgaggcagatctagtcctcttagctatggggttcctaggtcctgaggcggatattgccaagaaactgggtttagagcaagacagccgatcaaatttcaaagctgagttcggaaacttcgcgactaacgtggaaggtgtgtttgctgccggggactgcaggcgtgggcaatcactggttgtttgggcaattgcagaggggagggaagctgcagcagccgttgacaaatacctgaccagagaaaaaacgaatgctgatgaggacgttgccggcccaagttcaagtggatgcctggttcaacccgttgcggcataagcaaagaaagcatttctgtaataatagctctttggtaggtagattgttttacccctttttcatgctgaactctttgtagctctaaaaggattaaggaaagggctcatttagcagaaacagagagcccgtgtgttgcaggtaaagcagtaggaaaccttttttttttgggtgacacggttgttgttcttgttctcttcccgtgaagaaataccgggcttgtaggtttaggaaaatgtatagctgattcagatggaaagcttatgaccaattgtttataaaaaaactatactcgcttttgtcttcttttttttttcggtgcatgcgtgaacatgcccttgtacatgtgtggatctgttgtgctctgtattatagggcttctctaatgcttcagcttagcattagccccatcctttatgtctgcatctgatatccatatcacaccgtcagagactcagagtgtcttccagatgtaacaataacaagcgattcatctaacaaaaggctatatatcacatagatagactttattaaatgatataatttttcaaaaaaccataattccaattctcatgttatctcaccgtgaggcagctcagtgggcaccaaatcctagccgccgccgtccagccccgggccaaacttacattaatcaaaggaagaatgcgccggcagtggctgctgggggagtgggaggtgagtcgcacgcagcatggccggtgagggcgccaaagcccagaggctggagactgggcgtcgtgggcgaggcggcggcccggcgacggcgcgagatgccgagatccctggcgactggcggagtagcggtgggaagttggaaccgcgga

SEQ ID NO: 60195 - DNA, 888 bp, Zea Mays
cgccgcgccgtcactcccctccccttactcgcaaccgcgtcgtaaggcactccggcggcggcgatgattacgtcccccctcctcccgccggatgcatcctcccttgttaatgtggtccaaaccaacacttgcaagaactcccttgtttaagccaatggtagttgaaatgggccattgagggaggccagcattggtacacctgcaagaatggggatccaacagacatagctgcaatggcggtcactgttttcaagtcatctgattaatcacgattagtcgcgattaatcgtccaagtcggtttgaatcaatcatgattaatcgcccaaattgtccaactaaatgtgattaatcacgattaatcgtccaagtcggtcagttagaacgaccagcaagttgtccgacttgaaaacaatgatggaggctgacaggggtcccccaaagtagatgcagaagaaagcagctaaagaggcagttgttaatgttgtacataagaaaagaaagaggcaagccccttcatcatcatgtgtgaagaaaaacaagggatcagttacaaatacaacatcaactactactcctaatcctctgtctagcaagtataattttcaatgtgtccattcgttgtcgatacttggcaatgccagttatcataactgaactgagttttgtgtttctttatcacaatatatggaactggatccaatttcatcacctgttctcatccaagttgtgtaccttgccacatgttgtccagattgatggcttctacagaatcctcctttaaacactattcaatgggttagtaaagaaacccacgaaagaaattgcatattagtaagggagtttcacagcaaaacatagcttgcaacacaaatttgtgtgaattttct

SEQ ID NO: 60196 - DNA, 994 bp, Zea Mays
cgtcactcccctccccttactcgcaaccgcgtcgtaaggcactccggcggcggcgatgattacgtcccccctcctcccgccgggtaagcagccatgtgatcccaccccgccgccgttttgtttctggcgcatgacgtgcgtgcggggcacgatcattggctacaagcgaccccagcagtgtccgactctagaccgagatgcatcctcccttgttaatgtggtccaaaccaacacttgcaagaactcccttgtttaagccaatggtagttgaaatgggccattgagggaggccagcattggtacacctgcaagaatggggatccaacagacatagctgcaatggcggtcactgttttcaagtcatctgattaatcacgattagtcgcgattaatcgtccaagtcggtttgaatcaatcatgattaatcgcccaaattgtccaactaaatgtgattaatcacgattaatcgtccaagtcggtcagttagaacgaccagcaagttgtccgacttgaaaacaatgatggaggctgacaggggtcccccaaagtagatgcagaagaaagcagctaaagaggcagttgttaatgttgtacataagaaaagaaagaggcaagccccttcatcatcatgtgtgaagaaaaacaagggatcagttacaaatacaacatcaactactactcctaatcctctgtctagcaagtataattttcaatgtgtccattcgttgtcgatacttggcaatgccagttatcataactgaactgagttttgtgtttctttatcacaatatatggaactggatccaatttcatcacctgttctcatccaagttgtgtaccttgccacatgttgtccagattgatggcttctacagaatcctcctttaaacactattcaatgggttagtaaagaaacccacgaaagaaattgcatattagtaagggagtttcacagcaaaacatagcttgcaacacaaatttgtgtgaattttct

SEQ ID NO: 60197 - DNA, 1175 bp, Zea Mays
ctcccctccccttactcgcaaccgcgtcgtaaggcactccggcggcggcgatgattacgtcccccctcctcccgccggagtggtgaagccaatttgcagagcaaaggggccagataagtggcgatctttgcattgaaggttggcgacaacaaaaatgcagttctccgtgccgctcagattttcatctgttctgtgatggcctcgaacaagctgctacatcatctcttacctgtgataacctactccctatgtgcttgaataaatcaatccatagagctgtcataagtcaatatttttttgtttgattgatctcccctgttttgtgttaatgtttgagttaaatggtaactacaaaactgacatgagcgatttaagcagatgcatcctcccttgttaatgtggtccaaaccaacacttgcaagaactcccttgtttaagccaatggtagttgaaatgggccattgagggaggccagcattggtacacctgcaagaatggggatccaacagacatagctgcaatggcggtcactgttttcaagtcatctgattaatcacgattagtcgcgattaatcgtccaagtcggtttgaatcaatcatgattaatcgcccaaattgtccaactaaatgtgattaatcacgattaatcgtccaagtcggtcagttagaacgaccagcaagttgtccgacttgaaaacaatgatggaggctgacaggggtcccccaaagtagatgcagaagaaagcagctaaagaggcagttgttaatgttgtacataagaaaagaaagaggcaagccccttcatcatcatgtgtgaagaaaaacaagggatcagttacaaatacaacatcaactactactcctaatcctctgtctagcaagtataattttcaatgtgtccattcgttgtcgatacttggcaatgccagttatcataactgaactgagttttgtgtttctttatcacaatatatggaactggatccaatttcatcacctgttctcatccaagttgtgtaccttgccacatgttgtccagattgatggcttctacagaatcctcctttaaacactattcaatgggttagtaaagaaacccacgaaagaaattgcatattagtaagggagtttcacagcaaaacatagcttgcaacacaaatttgtgtgaattttct

SEQ ID NO: 60198 - DNA, 3507 bp, Zea Mays
cgagcgccaagtctccatcactgcgtcagcaggtcaccggggcagcgttcgcgtgacgtgacggcacaaactcttcatctccatctatctgcgccaggtgccgccaaaacgaggtcggcacccacaggccacaacccaacccaacccaacccaactgaatccaacgggacacgagagcgacgtcatggtgctggaggtgggcaccgccgtgggaatacgaaccacctccacttgggctgcaggtccagccgcccggcgcagatcacggggccaggtcgtctccttcgccctcgctcccgcgtcgtcccgccgggtccggcaccgttgccgcgcgatgcaacagcacgaggaggagcaggagcggccgccgaccgtccgcgcggtcaccatccccttcgccgacctcagggtgccggacagggaccttggcgacaagatcgaggaaggtctgggtccccatgggctcggcatcgtcaccattgccgatgtacctgagtttccagagctaagaaaaaggctgctgcgcttggcacccaggattgcaaaccttcctgaagaggtgaagaaacagcttgaagatccagatagcagatataactttgggtggagtcatgggaaggagaaactcgagtccgggaaacttgacacatttaaaggttccttttatgcgaaccctgttttggatgtccctactactgatgatgtgcttgtatccatcatattgccgaccaaatatatggccaaacgataatcttcctgagcttgagatagcatttaaagatcttgggaagctgatgatggaagttggtttgatgttggctcatcattgtgatcgctatgtaatgaggcaaggagtagggtcatatgatggtgacagtcttgagcagacaattgctcgttcaaggtgtcacaagggtcgtctgttgtactatttcccacgacagtttagcaagcagacagacttcgactcggtttcatcatggtgtggatggcacactgatcatggatctctaacagggcttacatgtggcttgtttacgaagaattctatggaggtaccatgtccagacagtgcagctggactatacattcggactcgtgataaccaagttgttaaggttgtgttcgacgaggatcagctagcttaccaaatcggggaaactactgaaatactgtcaagaggttatctatgtgcaaccccacactgtgtgcaggcacccagcagcgaaaatgcttcaaatgttgaccgctctacttttgccttgttcatgcaaccagattggaatgagaagctgaagtttccaagcgaaatcccctatcaccaagagttgattccaccaaacggaacgctgactttcggggagtactcagaaaggctggtagacaagtattaccagacaacaacgtagagcatacctcaagaaaagctaccgtccatacgttcgtaccatcaagtgtgttcttgtgtattcatttttagctttgatcataactctgtacaaaatatagtcgatcatcgaatcgaatacagcgcacagtaatgtatcacgcctattgctttgggtgaatttacgtatactactacgactaagaagctaatgtttagatgctaatctaatatacatcctgcagaacagtcgttttctggagttatcagaggttcccgccgcatttcttatgattactgcacagcattagtgtgttttggttgaaacccccaggactagggttttaataggacaaactttttgcgtgacagaaaaacatggttttcatgcagctgcacatagatggaacgaaagcgcgatgtacgaacttgttcgagatacaagtgcccccctagatcctcaagcacaaggaacatgacaccgtacagctccggtgatatataaaatgacctgacctacaacacaaaaaatcagctatatatgccccagaataggagagagaatcgccagacaaggggtaagaacagatatcttggccatcaggactatttggaccatgcaacggcatcaatttcggattgggcactccggtacagctcgagcctctttgcaagcattgaaatatttacatattggagatgtggtaaaggctatcatcagcccacaaacaacgaccaacaaggaagctacagtatatcgaatgatcgaacaaacaaggcaagcgctacaatataatgaaattaaagtgaagaagtgatcgagcagcgagcgcttggcctctcgcacttgacaataaacaatagattttgggatggagttcctcaaggtcgaacacaccatattaacatatgacagaacagtttgtcctgttgatcgtttagtacagtgagatgttaagcagtaaataatcaactatcaagcaaaaatgcagagatcatataggccttaccaattcgtctaagataagagtcattatatctatcaaaaatagagtggcttggatttccacccttctcaacatcctgaggaagcttcctgaagaaatctactgtcaagtagctgcattccatgtcaactagctttaatgtatttttcttgctttcatccctcattctatccaatgactcaaaagctgcattgcctacttccacacgaagggtgggaaactgcttcagttcctgcagaaaggtaatcaaacagtttaaataagcatcctatagacattattttgtcgggggtttgcatggtataatagtagaaaagaggaaaacttacatgtgtttcattgatagccttgcggacaaggtccttgagaattgcatggacctgccaatgtgacatgtcaatacatattcagccactattacatggatagtgaagacaagtgccaagtaactaaataataatgacgaactatgcaatatacactttgcactatgactacaaattaagagtctcatgccaatagtttggtccactgtttgttaaaagagaagctgaggtcatagtgcatatttgtgcaaagaatgatctccacaaaatcctcatttgttgtaacatgtcatatatgactagtcagccctcatctgagtgaaataacacctaattaatcaatgcatagttaagcaaattgtttgatatgtcgtgtgggtaaattcagcctaataacacaacatgataaaagacaaaacgacccttatttattctcaaatgtaatggcacctcagttcaaataaatataaatgtgcgcaacaacaaccccacaacccaataaaatcatacaggataaacagaatgtgtcggcttaatgaactgtttgaaacaatgggcaaactatcaagtataggcccagctgattcagcagcacagcaacaacggaagttctgccacagttccaagtgagagaaaattaaggccttggagctcatgatgaatttcgagggggcatgttcataggtataattggcataccgcgtcaacagccgcctcagcaggacctctgatactaataagacaagattctataaggcgtctatatccttgttctggagctatcaag

SEQ ID NO: 60199 - DNA, 3394 bp, Zea Mays
ccacaggccacaacccaacccaacccaacccaactgaatccaacgggacacgagagcgacgtcatggtgctggaggtgggcaccgccgtgggaatacgaaccacctccacttgggctgcaggtccagccgcccggcgcagatcacggggccaggtcgtctccttcgccctcgctcccgcgtcgtcccgccgggtccggcaccgttgccgcgcgatgcaacagcacgaggaggagcaggagcggccgccgaccgtccgcgcggtcaccatccccttcgccgacctcagggtgccggacagggaccttggcgacaagatcgaggaaggtctgggtccccatgggctcggcatcgtcaccattgccgatgtacctgagtttccagagctaagaaaaaggctgctgcgcttggcacccaggattgcaaaccttcctgaagaggtgaagaaacagcttgaagatccagatagcagatataactttgggtggagtcatgggaaggagaaactcgagtccgggaaacttgacacatttaaaggttccttttatgcgaaccctgttttggatgtccctactactgatgatgtgcttgtaagtaggtatccatcatattgccgaccaaatatatggccaaacgataatcttcctgagcttgagatagcatttaaagatcttgggaagctgatgatggaagttggtttgatgttggctcatcattgtgatcgctatgtaatgaggcaaggagtagggtcatatgatggtgacagtcttgagcagacaattgctcgttcaaggtgtcacaagggtcgtctgttgtactatttcccacgacagtttagcaagcagacagacttcgactcggtttcatcatggtgtggatggcacactgatcatggatctctaacagggcttacatgtggcttgtttacgaagaattctatggaggtaccatgtccagacagtgcagctggactatacattcggactcgtgataaccaagttgttaaggttgtgttcgacgaggatcagctagcttaccaaatcggggaaactactgaaatactgtcaagaggttatctatgtgcaaccccacactgtgtgcaggcacccagcagcgaaaatgcttcaaatgttgaccgctctacttttgccttgttcatgcaaccagattggaatgagaagctgaagtttccaagcgaaatcccctatcaccaagagttgattccaccaaacggaacgctgactttcggggagtactcagaaaggctggtagacaagtattaccagacaacaacgtagagcatacctcaagaaaagctaccgtccatacgttcgtaccatcaagtgtgttcttgtgtattcatttttagctttgatcataactctgtacaaaatatagtcgatcatcgaatcgaatacagcgcacagtaatgtatcacgcctattgctttgggtgaatttacgtatactactacgactaagaagctaatgtttagatgctaatctaatatacatcctgcagaacagtcgttttctggagttatcagaggttcccgccgcatttcttatgattactgcacagcattagtgtgttttggttgaaacccccaggactagggttttaataggacaaactttttgcgtgacagaaaaacatggttttcatgcagctgcacatagatggaacgaaagcgcgatgtacgaacttgttcgagatacaagtgcccccctagatcctcaagcacaaggaacatgacaccgtacagctccggtgatatataaaatgacctgacctacaacacaaaaaatcagctatatatgccccagaataggagagagaatcgccagacaaggggtaagaacagatatcttggccatcaggactatttggaccatgcaacggcatcaatttcggattgggcactccggtacagctcgagcctctttgcaagcattgaaatatttacatattggagatgtggtaaaggctatcatcagcccacaaacaacgaccaacaaggaagctacagtatatcgaatgatcgaacaaacaaggcaagcgctacaatataatgaaattaaagtgaagaagtgatcgagcagcgagcgcttggcctctcgcacttgacaataaacaatagattttgggatggagttcctcaaggtcgaacacaccatattaacatatgacagaacagtttgtcctgttgatcgtttagtacagtgagatgttaagcagtaaataatcaactatcaagcaaaaatgcagagatcatataggccttaccaattcgtctaagataagagtcattatatctatcaaaaatagagtggcttggatttccacccttctcaacatcctgaggaagcttcctgaagaaatctactgtcaagtagctgcattccatgtcaactagctttaatgtatttttcttgctttcatccctcattctatccaatgactcaaaagctgcattgcctacttccacacgaagggtgggaaactgcttcagttcctgcagaaaggtaatcaaacagtttaaataagcatcctatagacattattttgtcgggggtttgcatggtataatagtagaaaagaggaaaacttacatgtgtttcattgatagccttgcggacaaggtccttgagaattgcatggacctgccaatgtgacatgtcaatacatattcagccactattacatggatagtgaagacaagtgccaagtaactaaataataatgacgaactatgcaatatacactttgcactatgactacaaattaagagtctcatgccaatagtttggtccactgtttgttaaaagagaagctgaggtcatagtgcatatttgtgcaaagaatgatctccacaaaatcctcatttgttgtaacatgtcatatatgactagtcagccctcatctgagtgaaataacacctaattaatcaatgcatagttaagcaaattgtttgatatgtcgtgtgggtaaattcagcctaataacacaacatgataaaagacaaaacgacccttatttattctcaaatgtaatggcacctcagttcaaataaatataaatgtgcgcaacaacaaccccacaacccaataaaatcatacaggataaacagaatgtgtcggcttaatgaactgtttgaaacaatgggcaaactatcaagtataggcccagctgattcagcagcacagcaacaacggaagttctgccacagttccaagtgagagaaaattaaggccttggagctcatgatgaatttcgagggggcatgttcataggtataattggcataccgcgtcaacagccgcctcagcaggacctctgatactaataagacaagattctataaggcgtctatatccttgttctggagctatcaag

SEQ ID NO: 60200 - DNA, 1554 bp, Zea Mays
cacaggccacaacccaacccaacccaacccaactgaatccaacgggacacgagagcgacgtcatggtgctggaggtgggcaccgccgtgggaatacgaaccacctccacttgggctgcaggtccagccgcccggcgcagatcacggggccaggtcgtctccttcgccctcgctcccgcgtcgtcccgccgggtccggcaccgttgccgcgcgatgcaacagcacgaggaggagcaggagcggccgccgaccgtccgcgcggtcaccatccccttcgccgacctcagggtgccggacagggaccttggcgacaagatcgaggaaggtctgggtccccatgggctcggcatcgtcaccattgccgatgtacctgagtttccagagctaagaaaaaggctgctgcgcttggcacccaggattgcaaaccttcctgaagaggtgaagaaacagcttgaagatccagatagcagatataactttgggtggagtcatgggaaggagaaactcgagtccgggaaacttgacacatttaaaggttccttttatgcgaaccctgttttggatgtccctactactgatgatgtgcttgtaagtaggtatccatcatattgccgaccaaatatatggccaaacgataatcttcctgagcttgagatagatcttgggaagctgatgatggaagttggtttgatgttggctcatcattgtgatcgctatgtaatgaggcaaggagtagggtcatatgatggtgacagtcttgagcagacaattgctcgttcaaggtgtcacaagggtcgtctgttgtactatttcccacgacagtttagcaagcagacagacttcgactcggtttcatcatggtgtggatggcacactgatcatggatctctaacagggcttacatgtggcttgtttacgaagaattctatggaggtaccatgtccagacagtgcagctggactatacattcggactcgtgataaccaagttgttaaggttgtgttcgacgaggatcagctagcttaccaaatcggggaaactactgaaatactgtcaagaggttatctatgtgcaaccccacactgtgtgcaggcacccagcagcgaaaatgcttcaaatgttgaccgctctacttttgccttgttcatgcaaccagattggaatgagaagctgaagtttccaagcgaaatcccctatcaccaagagttgattccaccaaacggaacgctgactttcggggagtactcagaaaggctggtagacaagtattaccagacaacaacgtagagcatacctcaagaaaagctaccgtccatacgttcgtaccatcaagtgtgttcttgtgtattcatttttagctttgatcataactctgtacaaaatatagtcgatcatcgaatcgaatacagcgcacagtaatgtatcacgcctattgctttgggtgaatttacgtatactactacgactaagaagctaatgtttagatgctaatctaatatacatcctgcagaacagtcgttttctggagttatcagaggttcccgccgcatttctt

SEQ ID NO: 60201 - DNA, 1579 bp, Zea Mays
ggccacaacccaacccaacccaacccaactgaatccaacgggacacgagagcgacgtcatggtgctggaggtgggcaccgccgtgggaatacgaaccacctccacttgggctgcaggtccagccgcccggcgcagatcacggggccaggtcgtctccttcgccctcgctcccgcgtcgtcccgccgggtccggcaccgttgccgcgcgatgcaacagcacgaggaggagcaggagcggccgccgaccgtccgcgcggtcaccatccccttcgccgacctcagggtgccggacagggaccttggcgacaagatcgaggaaggtctgggtccccatgggctcggcatcgtcaccattgccgatgtacctgagtttccagagctaagaaaaaggctgctgcgcttggcacccaggattgcaaaccttcctgaagaggtgaagaaacagcttgaagatccagatagcagatataactttgggtggagtcatgggaaggagaaactcgagtccgggaaacttgacacatttaaaggttccttttatgcgaaccctgttttggatgtccctactactgatgatgtgcttgtaagtatccatcatattgccgaccaaatatatggccaaacgataatcttcctgagcttgagatagcatttaaagatcttgggaagctgatgatggaagttggtttgatgttggctcatcattgtgatcgctatgtaatgaggcaaggagtagggtcatatgatggtgacagtcttgagcagacaattgctcgttcaaggtgtcacaagggtcgtctgttgtactatttcccacgacagtttagcaagcagacagacttcgactcggtttcatcatggtgtggatggcacactgatcatggatctctaacagggcttacatgtggcttgtttacgaagaattctatggaggtaccatgtccagacagtgcagctggactatacattcggactcgtgataaccaagttgttaaggttgtgttcgacgaggatcagctagcttaccaaatcggggaaactactgaaatactgtcaagaggttatctatgtgcaaccccacactgtgtgcagtttttttaatgctattgtttctaggcacccagcagcgaaaatgcttcaaatgttgaccgctctacttttgccttgttcatgcaaccagattggaatgagaagctgaagtttccaagcgaaatcccctatcaccaagagttgattccaccaaacggaacgctgactttcggggagtactcagaaaggctggtagacaagtattaccagacaacaacgtagagcatacctcaagaaaagctaccgtccatacgttcgtaccatcaagtgtgttcttgtgtattcatttttagctttgatcataactctgtacaaaatatagtcgatcatcgaatcgaatacagcgcacagtaatgtatcacgcctattgctttgggtgaatttacgtatactactacgactaagaagctaatgtttagatgctaatctaatatacatcctgcagaacagtcgttttctggagttatcagaggttcccgccgcatttctt

SEQ ID NO: 60202 - DNA, 1456 bp, Zea Mays
ccacaacccaacccaacccaacccaactgaatccaacgggacacgagagcgacgtcatggtgctggaggtgggcaccgccgtgggaatacgaaccacctccacttgggctgcaggtccagccgcccggcgcagatcacggggccaggtcgtctccttcgccctcgctcccgcgtcgtcccgccgggtccggcaccgttgccgcgcgatgcaacagcacgaggaggagcaggagcggccgccgaccgtccgcgcggtcaccatccccttcgccgacctcagggtgccggacagggaccttggcgacaagatcgaggaaggtctgggtccccatgggctcggcatcgtcaccattgccgatgtacctgagtttccagagctaagaaaaaggctgctgcgcttggcacccaggattgcaaaccttcctgaagaggtgaagaaacagcttgaagatccagatagcagatataactttgggtggagtcatgggaaggagaaactcgagtccgggaaacttgacacatttaaaggttccttttatgcgaaccctgttttggatgtccctactactgatgatgtgcttgtaagtaggtatccatcatattgccgaccaaatatatggccaaacgataatcttcctgagcttgagatagcatttaaagatcttgggaagctgatgatggaagttggtttgatgttggctcatcattgtgatcgctatgtaatgaggcaaggagtagggtcatatgatggtgacagtcttgagcagacaattgctcgttcaaggtgtcacaagggtcgtctgttgtactatttcccacgacagtttagcaagcagacagacttcgactcggtttcatcatggtgtggatggcacactgatcatggatctctaacaggttgtgttcgacgaggatcagctagcttaccaaatcggggaaactactgaaatactgtcaagaggttatctatgtgcaaccccacactgtgtgcaggcacccagcagcgaaaatgcttcaaatgttgaccgctctacttttgccttgttcatgcaaccagattggaatgagaagctgaagtttccaagcgaaatcccctatcaccaagagttgattccaccaaacggaacgctgactttcggggagtactcagaaaggctggtagacaagtattaccagacaacaacgtagagcatacctcaagaaaagctaccgtccatacgttcgtaccatcaagtgtgttcttgtgtattcatttttagctttgatcataactctgtacaaaatatagtcgatcatcgaatcgaatacagcgcacagtaatgtatcacgcctattgctttgggtgaatttacgtatactactacgactaagaagctaatgtttagatgctaatctaatatacatcctgcagaacagtcgttttctggagttatcagaggttcccgccgcatttctt

SEQ ID NO: 60203 - DNA, 1559 bp, Zea Mays
cacaacccaacccaacccaacccaactgaatccaacgggacacgagagcgacgtcatggtgctggaggtgggcaccgccgtgggaatacgaaccacctccacttgggctgcaggtccagccgcccggcgcagatcacggggccaggtcgtctccttcgccctcgctcccgcgtcgtcccgccgggtccggcaccgttgccgcgcgatgcaacagcacgaggaggagcaggagcggccgccgaccgtccgcgcggtcaccatccccttcgccgacctcagggtgccggacagggaccttggcgacaagatcgaggaaggtctgggtccccatgggctcggcatcgtcaccattgccgatgtacctgagtttccagagctaagaaaaaggctgctgcgcttggcacccaggattgcaaaccttcctgaagaggtgaagaaacagcttgaagatccagatagcaggtcatataactttgggtggagtcatgggaaggagaaactcgagtccgggaaacttgacacatttaaaggttccttttatgcgaaccctgttttggatgtccctactactgatgatgtgcttgtaagtaggtatccatcatattgccgaccaaatatatggccaaacgataatcttcctgagcttgagatagcatttaaagatcttgggaagctgatgatggaagttggtttgatgttggctcatcattgtgatcgctatgtaatgaggcaaggagtagggtcatatgatggtgacagtcttgagcagacaattgctcgttcaaggtgtcacaagggtcgtctgttgtactatttcccacgacagtttagcaagcagacagacttcgactcggtttcatcatggtgtggatggcacactgatcatggatctctaacagggcttacatgtggcttgtttacgaagaattctatggaggtaccatgtccagacagtgcagctggactatacattcggactcgtgataaccaagttgttaaggttgtgttcgacgaggatcagctagcttaccaaatcggggaaactactgaaatactgtcaagaggttatctatgtgcaaccccacactgtgtgcaggcacccagcagcgaaaatgcttcaaatgttgaccgctctacttttgccttgttcatgcaaccagattggaatgagaagctgaagtttccaagcgaaatcccctatcaccaagagttgattccaccaaacggaacgctgactttcggggagtactcagaaaggctggtagacaagtattaccagacaacaacgtagagcatacctcaagaaaagctaccgtccatacgttcgtaccatcaagtgtgttcttgtgtattcatttttagctttgatcataactctgtacaaaatatagtcgatcatcgaatcgaatacagcgcacagtaatgtatcacgcctattgctttgggtgaatttacgtatactactacgactaagaagctaatgtttagatgctaatctaatatacatcctgcagaacagtcgttttctggagttatcagaggttcccgccgcatttctt

SEQ ID NO: 60204 - DNA, 1473 bp, Zea Mays
cccaacccaacccaactgaatccaacgggacacgagagcgacgtcatggtgctggaggtgggcaccgccgtgggaatacgaaccacctccacttgggctgcaggtccagccgcccggcgcagatcacggggccaggtcgtctccttcgccctcgctcccgcgtcgtcccgccgggtccggcaccgttgccgcgcgatgcaacagcacgaggaggagcaggagcggccgccgaccgtccgcgcggtcaccatccccttcgccgacctcagggtgccggacagggaccttggcgacaagatcgaggaaggtctgggtccccatgggctcggcatcgtcaccattgccgatgtacctgagtttccagagctaagaaaaaggctgctgcgcttggcacccaggattgcaaaccttcctgaagaggtgaagaaacagcttgaagatccagatagcagatataactttgggtggagtcatgggaaggagaaactcgagtccgggaaacttggtatccatcatattgccgaccaaatatatggccaaacgataatcttcctgagcttgagatagcatttaaagatcttgggaagctgatgatggaagttggtttgatgttggctcatcattgtgatcgctatgtaatgaggcaaggagtagggtcatatgatggtgacagtcttgagcagacaattgctcgttcaaggtgtcacaagggtcgtctgttgtactatttcccacgacagtttagcaagcagacagacttcgactcggtttcatcatggtgtggatggcacactgatcatggatctctaacagggcttacatgtggcttgtttacgaagaattctatggaggtaccatgtccagacagtgcagctggactatacattcggactcgtgataaccaagttgttaaggttgtgttcgacgaggatcagctagcttaccaaatcggggaaactactgaaatactgtcaagaggttatctatgtgcaaccccacactgtgtgcaggcacccagcagcgaaaatgcttcaaatgttgaccgctctacttttgccttgttcatgcaaccagattggaatgagaagctgaagtttccaagcgaaatcccctatcaccaagagttgattccaccaaacggaacgctgactttcggggagtactcagaaaggctggtagacaagtattaccagacaacaacgtagagcatacctcaagaaaagctaccgtccatacgttcgtaccatcaagtgtgttcttgtgtattcatttttagctttgatcataactctgtacaaaatatagtcgatcatcgaatcgaatacagcgcacagtaatgtatcacgcctattgctttgggtgaatttacgtatactactacgactaagaagctaatgtttagatgctaatctaatatacatcctgcagaacagtcgttttctggagttatcagaggttcccgccgcatttctt

SEQ ID NO: 60205 - DNA, 1431 bp, Zea Mays
cccaactgaatccaacgggacacgagagcgacgtcatggtgctggaggtgggcaccgccgtgggaatacgaaccacctccacttgggctgcaggtccagccgcccggcgcagatcacggggccaggtcgtctccttcgccctcgctcccgcgtcgtcccgccgggtccggcaccgttgccgcgcgatgcaacagcacgaggaggagcaggagcggccgccgaccgtccgcgcggtcaccatccccttcgccgacctcagggtgccggacagggaccttggcgacaagatcgaggaaggtctgggtccccatgggctcggcatcgtcaccattgccgatgtacctgagtttccagagctaagaaaaaggctgctgcgcttggcacccaggattgcaaaccttcctgaagaggtgaagaaacagcttgaagatccagatagcagatataactttgggtggagtcatgggaaggagaaactcgagtccgggaaacttgacacatttaaaggttccttttatgcgaaccctgttttggatgtccctactactgatgatgtgcttgtaagtatccatcatattgccgaccaaatatatggccaaacgataatcttcctgagcttgagatagcatttaaagatcttgggaagctgatgatggaagttggtttgatgttggctcatcattgtgatcgctatgtaatgaggcaaggagtagggtcatatgatggtgacagtcttgagcagacaattgctcgttcaaggtgtcacaagggtcgtctgttgtactatttcccacgacagtttagcaagcagacagacttcgactcggtttcatcatggtgtggatggcacactgatcatggatctctaacaggttgtgttcgacgaggatcagctagcttaccaaatcggggaaactactgaaatactgtcaagaggttatctatgtgcaaccccacactgtgtgcaggcacccagcagcgaaaatgcttcaaatgttgaccgctctacttttgccttgttcatgcaaccagattggaatgagaagctgaagtttccaagcgaaatcccctatcaccaagagttgattccaccaaacggaacgctgactttcggggagtactcagaaaggctggtagacaagtattaccagacaacaacgtagagcatacctcaagaaaagctaccgtccatacgttcgtaccatcaagtgtgttcttgtgtattcatttttagctttgatcataactctgtacaaaatatagtcgatcatcgaatcgaatacagcgcacagtaatgtatcacgcctattgctttgggtgaatttacgtatactactacgactaagaagctaatgtttagatgctaatctaatatacatcctgcagaacagtcgttttctggagttatcagaggttcccgccgcatttctt

SEQ ID NO: 60206 - DNA, 1422 bp, Zea Mays
ctgaatccaacgggacacgagagcgacgtcatggtgctggaggtgggcaccgccgtgggaatacgaaccacctccacttgggctgcaggtccagccgcccggcgcagatcacggggccaggtcgtctccttcgccctcgctcccgcgtcgtcccgccgggtccggcaccgttgccgcgcgatgcaacagcacgaggaggagcaggagcggccgccgaccgtccgcgcggtcaccatccccttcgccgacctcagggtgccggacagggaccttggcgacaagatcgaggaaggtctgggtccccatgggctcggcatcgtcaccattgccgatgtacctgagtttccagagctaagaaaaaggctgctgcgcttggcacccaggattgcaaaccttcctgaagaggtgaagaaacagcttgaagatccagatagcagatataactttgggtggagtcatgggaaggagaaactcgagtccgggaaacttgacacatttaaaggttccttttatgcgaaccctgttttggatgtccctactactgatgatgtgcttgtaagtaggtatccatcatattgccgaccaaatatatggccaaacgataatcttcctgagcttgagatagcatttaaagatcttgggaagctgatgatggaagttggtttgatgttggctcatcattgtgatcgctatgcaagcagacagacttcgactcggtttcatcatggtgtggatggcacactgatcatggatctctaacagggcttacatgtggcttgtttacgaagaattctatggaggtaccatgtccagacagtgcagctggactatacattcggactcgtgataaccaagttgttaaggttgtgttcgacgaggatcagctagcttaccaaatcggggaaactactgaaatactgtcaagaggttatctatgtgcaaccccacactgtgtgcaggcacccagcagcgaaaatgcttcaaatgttgaccgctctacttttgccttgttcatgcaaccagattggaatgagaagctgaagtttccaagcgaaatcccctatcaccaagagttgattccaccaaacggaacgctgactttcggggagtactcagaaaggctggtagacaagtattaccagacaacaacgtagagcatacctcaagaaaagctaccgtccatacgttcgtaccatcaagtgtgttcttgtgtattcatttttagctttgatcataactctgtacaaaatatagtcgatcatcgaatcgaatacagcgcacagtaatgtatcacgcctattgctttgggtgaatttacgtatactactacgactaagaagctaatgtttagatgctaatctaatatacatcctgcagaacagtcgttttctggagttatcagaggttcccgccgcatttctt

SEQ ID NO: 60207 - DNA, 3289 bp, Zea Mays
ctgaatccaacgggacacgagagcgacgtcatggtgctggaggtgggcaccgccgtgggaatacgaaccacctccacttgggctgcaggtccagccgcccggcgcagatcacggggccaggtcgtctccttcgccctcgctcccgcgtcgtcccgccgggtccggcaccgttgccgcgcgatgcaacagcacgaggaggagcaggagcggccgccgaccgtccgcgcggtcaccatccccttcgccgacctcagggtgccggacagggaccttggcgacaagatcgaggaaggtctgggtccccatgggctcggcatcgtcaccattgccgatgtacctgagtttccagagctaagaaaaaggctgctgcgcttggcacccaggattgcaaaccttcctgaagaggtgaagaaacagcttgaagatccagatagcagatataactttgggtggagtcatgggaaggagaaactcgagtccgggaaacttgacacatttaaaggttccttttatgcgaaccctgttttggatgtccctactactgatgatgtgcttgtaagtatccatcatattgccgaccaaatatatggccaaacgataatcttcctgagcttgagatagcatttaaagatcttgggaagctgatgatggaagttggtttgatgttggctcatcattgtgatcgctatgtaatgaggcaaggagtagggtcatatgatggtgacagtcttgagcagacaattgctcgttcaaggtgtcacaagggtcgtctgttgtactatttcccacgacagtttagggcttacatgtggcttgtttacgaagaattctatggaggtaccatgtccagacagtgcagctggactatacattcggactcgtgataaccaagttgttaaggttgtgttcgacgaggatcagctagcttaccaaatcggggaaactactgaaatactgtcaagaggttatctatgtgcaaccccacactgtgtgcaggcacccagcagcgaaaatgcttcaaatgttgaccgctctacttttgccttgttcatgcaaccagattggaatgagaagctgaagtttccaagcgaaatcccctatcaccaagagttgattccaccaaacggaacgctgactttcggggagtactcagaaaggctggtagacaagtattaccagacaacaacgtagagcatacctcaagaaaagctaccgtccatacgttcgtaccatcaagtgtgttcttgtgtattcatttttagctttgatcataactctgtacaaaatatagtcgatcatcgaatcgaatacagcgcacagtaatgtatcacgcctattgctttgggtgaatttacgtatactactacgactaagaagctaatgtttagatgctaatctaatatacatcctgcagaacagtcgttttctggagttatcagaggttcccgccgcatttcttatgattactgcacagcattagtgtgttttggttgaaacccccaggactagggttttaataggacaaactttttgcgtgacagaaaaacatggttttcatgcagctgcacatagatggaacgaaagcgcgatgtacgaacttgttcgagatacaagtgcccccctagatcctcaagcacaaggaacatgacaccgtacagctccggtgatatataaaatgacctgacctacaacacaaaaaatcagctatatatgccccagaataggagagagaatcgccagacaaggggtaagaacagatatcttggccatcaggactatttggaccatgcaacggcatcaatttcggattgggcactccggtacagctcgagcctctttgcaagcattgaaatatttacatattggagatgtggtaaaggctatcatcagcccacaaacaacgaccaacaaggaagctacagtatatcgaatgatcgaacaaacaaggcaagcgctacaatataatgaaattaaagtgaagaagtgatcgagcagcgagcgcttggcctctcgcacttgacaataaacaatagattttgggatggagttcctcaaggtcgaacacaccatattaacatatgacagaacagtttgtcctgttgatcgtttagtacagtgagatgttaagcagtaaataatcaactatcaagcaaaaatgcagagatcatataggccttaccaattcgtctaagataagagtcattatatctatcaaaaatagagtggcttggatttccacccttctcaacatcctgaggaagcttcctgaagaaatctactgtcaagtagctgcattccatgtcaactagctttaatgtatttttcttgctttcatccctcattctatccaatgactcaaaagctgcattgcctacttccacacgaagggtgggaaactgcttcagttcctgcagaaaggtaatcaaacagtttaaataagcatcctatagacattattttgtcgggggtttgcatggtataatagtagaaaagaggaaaacttacatgtgtttcattgatagccttgcggacaaggtccttgagaattgcatggacctgccaatgtgacatgtcaatacatattcagccactattacatggatagtgaagacaagtgccaagtaactaaataataatgacgaactatgcaatatacactttgcactatgactacaaattaagagtctcatgccaatagtttggtccactgtttgttaaaagagaagctgaggtcatagtgcatatttgtgcaaagaatgatctccacaaaatcctcatttgttgtaacatgtcatatatgactagtcagccctcatctgagtgaaataacacctaattaatcaatgcatagttaagcaaattgtttgatatgtcgtgtgggtaaattcagcctaataacacaacatgataaaagacaaaacgacccttatttattctcaaatgtaatggcacctcagttcaaataaatataaatgtgcgcaacaacaaccccacaacccaataaaatcatacaggataaacagaatgtgtcggcttaatgaactgtttgaaacaatgggcaaactatcaagtataggcccagctgattcagcagcacagcaacaacggaagttctgccacagttccaagtgagagaaaattaaggccttggagctcatgatgaatttcgagggggcatgttcataggtataattggcataccgcgtcaacagccgcctcagcaggacctctgatactaataagacaagattctataaggcgtctatatccttgttctggagctatcaag

SEQ ID NO: 60208 - DNA, 1495 bp, Zea Mays
cgacgtcatggtgctggaggtgggcaccgccgtgggaatacgaaccacctccacttgggctgcaggtccagccgcccggcgcagatcacggggccaggtcgtctccttcgccctcgctcccgcgtcgtcccgccgggtccggcaccgttgccgcgcgatgcaacagcacgaggaggagcaggagcggccgccgaccgtccgcgcggtcaccatccccttcgccgacctcagggtgccggacagggaccttggcgacaagatcgaggaaggtctgggtccccatgggctcggcatcgtcaccattgccgatgtacctgagtttccagagctaagaaaaaggctgctgcgcttggcacccaggattgcaaaccttcctgaagaggtgaagaaacagcttgaagatccagatagcagatataactttgggtggagtcatgggaaggagaaactcgagtccgggaaacttgacacatttaaaggttccttttatgcgaaccctgttttggatgtccctactactgatgatgtgcttgtaagtatccatcatattgccgaccaaatatatggccaaacgataatcttcctgagcttgagatagatcttgggaagctgatgatggaagttggtttgatgttggctcatcattgtgatcgctatgtaatgaggcaaggagtagggtcatatgatggtgacagtcttgagcagacaattgctcgttcaaggtgtcacaagggtcgtctgttgtactatttcccacgacagtttagcaagcagacagacttcgactcggtttcatcatggtgtggatggcacactgatcatggatctctaacagggcttacatgtggcttgtttacgaagaattctatggaggtaccatgtccagacagtgcagctggactatacattcggactcgtgataaccaagttgttaaggttgtgttcgacgaggatcagctagcttaccaaatcggggaaactactgaaatactgtcaagaggttatctatgtgcaaccccacactgtgtgcaggcacccagcagcgaaaatgcttcaaatgttgaccgctctacttttgccttgttcatgcaaccagattggaatgagaagctgaagtttccaagcgaaatcccctatcaccaagagttgattccaccaaacggaacgctgactttcggggagtactcagaaaggctggtagacaagtattaccagacaacaacgtagagcatacctcaagaaaagctaccgtccatacgttcgtaccatcaagtgtgttcttgtgtattcatttttagctttgatcataactctgtacaaaatatagtcgatcatcgaatcgaatacagcgcacagtaatgtatcacgcctattgctttgggtgaatttacgtatactactacgactaagaagctaatgtttagatgctaatctaatatacatcctgcagaacagtcgttttctggagttatcagaggttcccgccgcatttctt

SEQ ID NO: 60209 - DNA, 1494 bp, Zea Mays
gctggaggtgggcaccgccgtgggaatacgaaccacctccacttgggctgcaggtccagccgcccggcgcagatcacggggccaggtcgtctccttcgccctcgctcccgcgtcgtcccgccgggtccggcaccgttgccgcgcgatgcaacagcacgaggaggagcaggagcggccgccgaccgtccgcgcggtcaccatccccttcgccgacctcagggtgccggacagggaccttggcgacaagatcgaggaaggtctgggtccccatgggctcggcatcgtcaccattgccgatgtacctgagtttccagagctaagaaaaaggctgctgcgcttggcacccaggattgcaaaccttcctgaagaggtgaagaaacagcttgaagatccagatagcagatataactttgggtggagtcatgggaaggagaaactcgagtccgggaaacttgacatttaaaggttccttttatgcgaaccctgttttggatgtccctactactgatgatgtgcttgtaagtaggtatccatcatattgccgaccaaatatatggccaaacgataatcttcctgagcttgagatagcatttaaagatcttgggaagctgatgatggaagttggtttgatgttggctcatcattgtgatcgctatgtaatgaggcaaggagtagggtcatatgatggtgacagtcttgagcagacaattgctcgttcaaggtgtcacaagggtcgtctgttgtactatttcccacgacagtttagcaagcagacagacttcgactcggtttcatcatggtgtggatggcacactgatcatggatctctaacagggcttacatgtggcttgtttacgaagaattctatggaggtaccatgtccagacagtgcagctggactatacattcggactcgtgataaccaagttgttaaggttgtgttcgacgaggatcagctagcttaccaaatcggggaaactactgaaatactgtcaagaggttatctatgtgcaaccccacactgtgtgcaggcacccagcagcgaaaatgcttcaaatgttgaccgctctacttttgccttgttcatgcaaccagattggaatgagaagctgaagtttccaagcgaaatcccctatcaccaagagttgattccaccaaacggaacgctgactttcggggagtactcagaaaggctggtagacaagtattaccagacaacaacgtagagcatacctcaagaaaagctaccgtccatacgttcgtaccatcaagtgtgttcttgtgtattcatttttagctttgatcataactctgtacaaaatatagtcgatcatcgaatcgaatacagcgcacagtaatgtatcacgcctattgctttgggtgaatttacgtatactactacgactaagaagctaatgtttagatgctaatctaatatacatcctgcagaacagtcgttttctggagttatcagaggttcccgccgcatttctt

SEQ ID NO: 60210 - DNA, 1351 bp, Zea Mays
gttgccgcgcgatgcaacagcacgaggaggagcaggagcggccgccgaccgtccgcgcggtcaccatccccttcgccgacctcagggtgccggacagggaccttggcgacaagatcgaggaaggtctgggtccccatgggctcggcatcgtcaccattgccgatgtacctgagtttccagagctaagaaaaaggctgctgcgcttggcacccaggattgcaaaccttcctgaagaggtgaagaaacagcttgaagatccagatagcagatataactttgggtggagtcatgggaaggagaaactcgagtccgggaaacttgacacatttaaaggttccttttatgcgaaccctgttttggatgtccctactactgatgatgtgcttgtaagtatccatcatattgccgaccaaatatatggccaaacgataatcttcctgagcttgagatagcatttaaagatcttgggaagctgatgatggaagttggtttgatgttggctcatcattgtgatcgctatgtaatgaggcaaggagtagggtcatatgatggtgacagtcttgagcagacaattgctcgttcaaggtgtcacaagggtcgtctgttgtactatttcccacgacagtttagacagacttcgactcggtttcatcatggtgtggatggcacactgatcatggatctctaacagggcttacatgtggcttgtttacgaagaattctatggaggtaccatgtccagacagtgcagctggactatacattcggactcgtgataaccaagttgttaaggttgtgttcgacgaggatcagctagcttaccaaatcggggaaactactgaaatactgtcaagaggttatctatgtgcaaccccacactgtgtgcaggcacccagcagcgaaaatgcttcaaatgttgaccgctctacttttgccttgttcatgcaaccagattggaatgagaagctgaagtttccaagcgaaatcccctatcaccaagagttgattccaccaaacggaacgctgactttcggggagtactcagaaaggctggtagacaagtattaccagacaacaacgtagagcatacctcaagaaaagctaccgtccatacgttcgtaccatcaagtgtgttcttgtgtattcatttttagctttgatcataactctgtacaaaatatagtcgatcatcgaatcgaatacagcgcacagtaatgtatcacgcctattgctttgggtgaatttacgtatactactacgactaagaagctaatgtttagatgctaatctaatatacatcctgcagaacagtcgttttctggagttatcagaggttcccgccgcatttctt

SEQ ID NO: 60211 - DNA, 310 bp, Zea Mays
ccagcttctatcgccgcttcactccagtgcacttcccacaaagccaccctgcaacggtccgatagaagcgggcaaaacaccgcttccgtagaaaagctgggctagttgggcatcagcgcagccctctcgcgcgtgctagggtttccccggtccatgtcgcctcgaactgctcctgtctcgcctcccaggcggagctaggattcttctcgacgacgacgatgagactccaagttcttctcgacgattcgtaaactgaacaaggcttctactactcacgatggatgcaaatgatataccatgtctgatcgat

SEQ ID NO: 60212 - DNA, 945 bp, Zea Mays
cgcttcactccagtgcacttcccacaaagccaccctgcaacggtccgatagaagcgggcaaaacaccgcttccgtagaaaagctgggctagttgggcatcagcgcagccctctcgcgcgtgctagggtttccccggtccatgtcgcctcgaactgctcctgtctcgcctcccaggcggagctaggattcttctcgacgacgacgatgagactccaagttcttctcgacgattcgtaaactgaactaccacaaacaccatattggtgtggcaactgtacctaaagcatatgacaacttacagtctccgaggaagaagagagactcttgcagaggaagggattgtaagagacataatcagggaccaagaaggtgtaattttaaaatgttgcaacataatggtagcaccaatagcaataccaattgttgtggcaatgaaaaaggcaaaggcgatgcaagtgtctcaaggaatgtcagcgaaggttgtttcatgtatggatcttagcagtactagtctcaccaatgtagcaatgagaaacatctcattgatatgtattagaagtggaagaaacgctaaaactcagaggctcactttgtccacatgcatgtaaatgtcaagactgaatagcccatccttgagccacctaaggctgttaaacaatgtagtcatgccaacatggatattgatgccactgctgatagcaatgccctattagacaatgatgatttcaacttagataatgatgatctcctagagtagaccaagttaatgaccattagtttcatagccattttcttaactaatattttaagttcaaaaaaacttttatctggtcgtggtttaataaatgttactgttgagcatacttgatttttataattaagattgattagtgtgtgatttcaattatgcccctatatgatttaattgtgactgttatattatat

SEQ ID NO: 60213 - DNA, 876 bp, Zea Mays
ccccggtccatgtcgcctcgaactgctcctgtctcgcctcccaggcggagctaggattcttctcgacgacgacgatgagactccaagttcttctcgacgattcgtaaactggtatgtaagcggactgatcccttcgaacttcgtcggtagttagcatttgttatccacaatttgtcgtagtgaatcgaagtttccagatcgagttcatcggattccagccgatgtacactgagagatccccctttcgcactgtccagcataagtagattgcatttcttttcgtccattccgtatagcaaatcctcatttgagcacagagttcatcggatttgccggcttccgtagcgcctgaaccttctcctccacattattgtcttatagtgcatatttaaattgtatgcatgctccctattattatgtcttctgcgttttttatgttgaaataaacaaatataataatacaatcttaaaaatatttgttacatataaccattttaaaaattgttatggataattggcatgtctaattaaaatatatttaatttttgaaagggaaataggcttacaccttttcctaaattgattttggtggttgaattgcccaacacaaatgtaacatcccaaaaatcccaaccaaggtttgaaaccctaacctcctaaccccccttattttattttctcccttaactctacccttagaacacctcatcatgtgcatacacttgaaataattagagcacctcacatagactatatttatcactcaagatcatttagagaatttttgattcaaaggaaaaaaagaaacaaaaagaaacaaaaatagaaaaaaagaaaagaaaggaattagaaatcagaaaaagaaaagaaaaagag

SEQ ID NO: 60214 - DNA, 1486 bp, Zea Mays
atcctctttccttcctctgtctactgtgtgttcgcgatttgaaaatcttaaggttaggctttggttttttggggcatccggctagggtttcttccttcccttattatacatttctacttcatgttctaactagataacaacctaaatctaggattttgagaggttttctcctaaagacaaagggattatagcatatggaattaggccccatgtccgaaactatggctttcatacaactcttaataaaattgtgatattagctcgtaacattagttaaaaaaacgcaaaacgaagattatgccttcaggattggcatgaattactatagagtctggagtctggtgtcaataacgacagatactctggtagaatagaggtgacagtctttccttcgctgttaaatcgggtttcgatactgtgcacgagtcagagggtgataaaggttgatgatttaagtgagccatttctctatttatacggtacgaaggataaccacaactaataaattattgcgtcccatcggagcgcaagtatggcatgtgactgtctttgtaatcgagcaggatgagatgaactaaacgatcgataattgcattttgtgaactcttattaccacccgacagggaatcaacatgtctagtcaaacgaatcaatcatgctttttgcattgtcaagtgatatttctgtactacaaggttggacgaaccaccagcgacgactcacgacacgcaaactggtttgttttcacgcgagccacgtgatcctttggagctggtctccctgcagttggggtcagtttgacggttaaaagcagaacagccagccccggttgcgtcgcgtatgcattgagcattgtggtcgctcctgcgctgtgtgtttctggataataaaagccccgccagcccccgcagcggagaaccgcgcaagtgggtcaactcgcaactgaagaccaaaggcgagccggctgcccggattccggaagcgcccaagccccccaacgcgaccgtcgctgtcgccaccgcgctcggctcgcccgcgtccacagaagccgccagggccatacgccgatgaatcctgccgcgacggcggatcccagcagctccagcacctcggcggccacgctgcggaagcggatgatctctatagacacggctcgacgaggagccgacggcgcgtcgcctgagaccgcgcccaggccagatcgggcgggtagtgataaggcgccgcaggagcgggaggaggagggctcgatggcggcctccgcgcctgcggcggcagcagcgagggagagtgacctggaggcggtgggcgagccgatgagccccgcggggcggctgttccgcgagacgcacttcaactgctacatcgtggccgtgatcgggctgggcgcggcggtggacgtcgcggcggcgcgcgcggggctggaagtcacgctcgtccgccacccacgcttctccagcgtccagtattgccaccaaacgttttt

SEQ ID NO: 60215 - DNA, 2539 bp, Zea Mays
atcctctttccttcctctgtctactgtgtgttcgcgatttgaaaatcttaaggttaggctttggttttttggggcatccggctagggtttcttccttcccttattatacatttctacttcatgttctaactagataacaacctaaatctaggattttgagaggttttctcctaaagacaaagggattatagcatatggaattaggccccatgtccgaaactatggctttcatacaactcttaataaaattgtgatattagctcgtaacattagttaaaaaaacgcaaaacgaagattatgccttcaggattggcatgaattactatagagtctggagtctggtgtcaataacgacagatactctggtagaatagaggtgacagtctttccttcgctgttaaatcgggtttcgatactgtgcacgagtcagagggtgataaaggttgatgatttaagtgagccatttctctatttatacggtacgaaggataaccacaactaataaattattgcgtcccatcggagcgcaagtatggcatgtgactgtctttgtaatcgagcaggatgagatgaactaaacgatcgataattgcattttgtgaactcttattaccacccgacagggaatcaacatgtctagtcaaacgaatcaatcatgctttttgcattgtcaagtgatatttctgtactacaaggttggacgaaccaccagcgacgactcacgacacgcaaactggtttgttttcacgcgagccacgtgatcctttggagctggtctccctgcagttggggtcagtttgacggttaaaagcagaacagccagccccggttgcgtcgcgtatgcattgagcattgtggtcgctcctgcgctgtgtgtttctggataataaaagccccgccagcccccgcagcggagaaccgcgcaagtgggtcaactcgcaactgaagaccaaaggcgagccggctgcccggattccggaagcgcccaagccccccaacgcgaccgtcgctgtcgccaccgcgctcggctcgcccgcgtccacagaagccgccagggccatacgccgatgaatcctgccgcgacggcggatcccagcagctccagcacctcggcggccacgctgcggaagcggatgatctctatagacacggctcgacgaggagccgacggcgcgtcgcctgagaccgcgcccaggccagatcgggcgggtagtgataaggcgccgcaggagcgggaggaggagggctcgatggcggcctccgcgcctgcggcggcagcagcgagggagagtgacctggaggcggtgggcgagccgatgagccccgcggggcggctgttccgcgagacgcacttcaactgctacatcgtggccgtgatcgggctgggcgcggcggtggacgtcgcggcggcgcgcgcggggctggaagtcacgctcgtccgccacccacgcttctccagcgtccagcttttcgagcaagcgaaagtgatggggtgggggtgggctggcaccgctacgctgagtcctgcctgtacggcggcgttatgtgcggcacctgccggcggaaggaccgatgaacaggctagccgagcccgtcagcccgctaggcggtaccgtaccgcggtatcccctgacctttgtccgctcgacaagctcttcttgatatccactccaaccgttctgtgcgaaaagaatatgatgatgtttagtgttcctgaactgaaactgaaaggtcggtctttgactgtagcgttactgtactcgaaccacctgttccctgttctctcttggaggctccagaaggtgccaaactcttgcaggatagcagccgtttggaagaaacgcacaaacgtggacgcggcacgccactgcacagtgcagaccagtacgccagacagagacccatgagaccatctctaaccgtttccctcacttttctctccacatctatactttctattatattttactatatcacctaaaaaatactcaccaagcaccaacaattcaccttatacagctccccctatatactataatttatttatttgacattttttcatcagtttttaaagtttaaaaaaaatcataaactgatcgtaatatcataatatacattgttacctaattacattactttaaaaaaattaatatcacaaagacagagtaattaaagtgtgtggggagattagagatcctccatatgggattgttcggttacgccaatccagaaggggaatcccctctaacccccttctggattggcgtaaggttgtccgcggcgcctcccacacgctgccccctcccctcccgtagcagccacattgaaccgctagaagccgcaacgctcccccctacaaggtcacccacaccgcggaatttttctctcacacttcttctggcgtgcccccttggattgttcattgtatcgtgttttatgcccactagtacttgatagtggaagaaaaaatgataatgtatgaaaaaataggtataggaaatgatattttatggttgtagtggggtgctaggtatgtgct

SEQ ID NO: 60216 - DNA, 2652 bp, Zea Mays
cttgttccttgactcggcggcggcggcggcgctctgccctctgtgtctggagaaacgtgagtgttgggccgatatgggccggccgttagtttgtccaaggcccagcggtaatggctcctcctccgtccttgtccttgtgcgaacgcaatgccatcctgctcctccgcgccccactcgattgggagtttgggacgcaattcaaaaggggacgagggcaggtcaggcgctcggcgctcctcacgagcaacggctaccacacgaaacaatttcctcttcctcctcagcggcaccgtctcgtcgtcacctccctcctcttcccttcccgcggcccccgacgccctccgtccctcgtcgtcatccagtcatcccctacacccgataaaaggggtccgatcatcaaccgggcttgctcactatggccatggagcgaatatttgactatgccaaacctattagggcaactgtcagtgtttcctcttatcatgtgcttcaagacagccatgtctttgatcttttggatcctaagaacaacgaggtccttgtgcgagaggatgctgatggaaggactcatctgaagggcctctctatggttgaaatcaattcaattcaggagtttcagaatttgtgttatgatagtgacaaacaccaaaatcgcaccaaagtttccaaagctaaaggacacaatggttttattatttttatttctaaatctgatcagaatggcaaagaatcctctgtatcaaaaatgcattttcttgagttggcagaccatatcaatgataagcaaaagagccatggtgaaagatttgttcaacaaaattccaagaagtccttatatgccgtgatggatgttgtgcaagctctaaacagccaccagagcttcataccctatagaaaaagcaaaataacccatattttgcaagactctttatccaagacaggtggtgctttattaatagcatgtttggatgaagtctcatgccaagatgcaatctctactctaagcttggcttcacgctcaagccaagtggtcaatgaacaacggtacaacttatccttaatcacaaaaggttgttcaaagtcaaatgtaaagctttcagtgaacaataagaatttgtcaagatcgttattgtcttctatccaacaacaaagtcccgtgctggagaagccatacaaaacccaagttaataacattgcagtaaaagcaacaagatctctcaatgccaataagagatctgaaacaagcacacattcagcaaaaaagactgtaaacttagtctctgcttcgattaatttgaaacactctggtgctaagtctattctaagggaaaggaacttctttattccaactactaattcatcaaaggaagataagaaaacttttgtgacaactgcggtaaggaaacatgaggtttgtatacttagcatcttatatctacacttgccattgaccattagtgaacatatttatattagagttttctatatcatttcataggcggtagatacatcaatttgcatggaaatttgagccctcccaccaattgagacactaactttttttattgccactgcaagcatatgctagtattacaactaactattgcaatatattagagcgatatgcaggagaatcacaatggcacaaaaaatattgtagtatcatctgaaatgcaagtagtaccttgcagcatgaaagagatagtatcaagtgacatgaaagaagaggatcattcctctccaggttttcttgcagagaacttatttgctgacttgggctttacatgttcatctaatgcagctgataaaacaactgaggaaaatccagccaccgttctccaatcttctccgaagataagcgaccaattgagaaagatatcaaattcactgaagcttcttaattctatggcacctagtatagtaaaacagaaaacagatatagttcgtccacaatcctttgacttagttgaagcagaaccaaaaactcctgaggtcaacttaaaactttggcatgctcaagatgcacaagaatcacttaaggctcgtagcacagggattaagaaatctctagctaaggagtgtttgttgtttctaaacagcgctaataaggagcagttaaaaagtttaaagggtattggagagaaaagggcaaactatatacttgagcttcgagaggagtcaccattgaaagagattgatgatcttaaaagcataattgggatgagcaaaagagagatcgacaagatgatgtcaaagttgatttcggactcggagatgaacgagtaagggttgtattgatctcttcccacttaggaaaggaggagaaggaatgtcttctctacgtataggttttatacaggaatgtcttgtctacgtaacgtataagttttgtttttaaaaaaagaatataatcgggtggaaggctttcaggtttgctgtattagacaaaaacctatcagttaccctgtcatattgtgagtgtgcatattgtcatattgttagaactgtgagaacaagatatgtttatttggctccgccaatattgcttagcggcaaagtatctgtatcgtcagcacagtgcctggtgtcctcttggtcacaacaatctgcactgttcgcagtggtctctcctaccctaacattgctgattcc

SEQ ID NO: 60217 - DNA, 2678 bp, Zea Mays
gggacgcaattcaaaaggggacgagggcaggtcaggcgctcggcgctcctcacgagcaacggctaccacacgaaacaatttcctcttcctcctcagcggcaccgtctcgtcgtcacctccctcctcttcccttcccgcggcccccgacgccctccgtccctcgtcgtcatccagtcatcccctacacccgataaaaggtacgatggaagaagcagcctgcaccgctgctccgagcctcccttatcactctccgtggatcaggaccgctcccgtcagagtagtggcgaagatttgcccgggcggagaccccactggatccatgcaggtctccgcccgtgttcccgatccggctaactcctcctccgcttccgtctcattcgtccccataatcaaggagtctgctctttctaatatgacccaccgcaaacatcgcgagcacaaactcgattggtgctatctcaacgacgattcgtacacagacatttttcacaacgaggggtccgatcatcaaccgggcttgctcactatggccatggagcgaatatttgactatgccaaacctattagggcaactgtcagtgtttcctcttatcatgtgcttcaagacagccatgtctttgatcttttggatcctaagaacaacgaggtccttgtgcgagaggatgctgatggaaggactcatctgaagggcctctctatggttgaaatcaattcaattcaggagtttcagaatttgtgttatgatagtgacaaacaccaaaatcgcaccaaagtttccaaagctaaaggacacaatggttttattatttttatttctaaatctgatcagaatggcaaagaatcctctgtatcaaaaatgcattttcttgagttggcagaccatatcaatgataagcaaaagagccatggtgaaagatttgttcaacaaaattccaagaagtccttatatgccgtgatggatgttgtgcaagctctaaacagccaccagagcttcataccctatagaaaaagcaaaataacccatattttgcaagactctttatccaagacaggtggtgctttattaatagcatgtttggatgaagtctcatgccaagatgcaatctctactctaagcttggcttcacgctcaagccaagtggtcaatgaacaacggtacaacttatccttaatcacaaaaggttgttcaaagtcaaatgtaaagctttcagtgaacaataagaatttgtcaagatcgttattgtcttctatccaacaacaaagtcccgtgctggagaagccatacaaaacccaagttaataacattgcagtaaaagcaacaagatctctcaatgccaataagagatctgaaacaagcacacattcagcaaaaaagactgtaaacttagtctctgcttcgattaatttgaaacactctggtgctaagtctattctaagggaaaggaacttctttattccaactactaattcatcaaaggaagataagaaaacttttgtgacaactgcggtaaggaaacatgagagcgatatgcaggagaatcacaatggcacaaaaaatattgtagtatcatctgaaatgcaagtagtaccttgcagcatgaaagagatagtatcaagtgacatgaaagaagaggatcattcctctccaggttttcttgcagagaacttatttgctgacttgggctttacatgttcatctaatgcagctgataaaacaactgaggaaaatccagccaccgttctccaatcttctccgaagataagcgaccaattgagaaagatatcaaattcactgaagcttcttaattctatggcacctagtatagtaaaacagaaaacagatatagttcgtccacaatcctttgacttagttgaagcagaaccaaaaactcctgaggtcaacttaaaactttggcatgctcaagatgcacaagaatcacttaaggctcgtagcacagggattaagaaatctctagctaaggagtgtttgttgtttctaaacagcgctaataaggagcagttaaaaagtttaaagggtattggagagaaaagggcaaactatatacttgagcttcgagaggagtcaccattgaaagagattgatgatcttaaaagcataattgggatgagcaaaagagagatcgacaagatgatgtcaaagttgatttcggactcggagatgaacgagtaagggttgtattgatctcttcccacttaggaaaggaggagaaggtcatagttctaaatttaaatatcgatgcttgttgttatcagatcgctgtggaatccagatgattttgggtgttgcttgtgagaatattctgatgttttgtttttttaaaaaaaattacaggaatgtcttctctacgtataggttttatacaggaatgtcttgtctacgtaacgtataagttttgtttttaaaaaaagaatataatcgggtggaaggctttcaggtttgctgtattagacaaaaacctatcagttaccctgtcatattgtgagtgtgcatattgtcatattgttagaactgtgagaacaagatatgtttatttggctccgccaatattgcttagcggcaaagtatctgtatcgtcagcacagtgcctggtgtcctcttggtcacaacaatctgcactgttcgcagtggtctctcctaccctaacattgctgattcc

SEQ ID NO: 60218 - DNA, 2859 bp, Zea Mays
gggacgcaattcaaaaggggacgagggcaggtcaggcgctcggcgctcctcacgagcaacggctaccacacgaaacaatttcctcttcctcctcagcggcaccgtctcgtcgtcacctccctcctcttcccttcccgcggcccccgacgccctccgtccctcgtcgtcatccagtcatcccctacacccgataaaaggtacgatggaagaagcagcctgcaccgctgctccgagcctcccttatcactctccgtggatcaggaccgctcccgtcagagtagtggcgaagatttgcccgggcggagaccccactggatccatgcaggtctccgcccgtgttcccgatccggctaactcctcctccgcttccgtctcattcgtccccataatcaaggagtctgctctttctaatatgacccaccgcaaacatcgcgagcacaaactcgattggtgctatctcaacgacgattcgtacacagacatttttcacaacgaggttaaacagcttgtggataaaatcttctcctctgatggccacaaccacgcatgtgtagtcacttgcggttccactagcaaaacccaccttgttatagggtccgatcatcaaccgggcttgctcactatggccatggagcgaatatttgactatgccaaacctattagggcaactgtcagtgtttcctcttatcatgtgcttcaagacagccatgtctttgatcttttggatcctaagaacaacgaggtccttgtgcgagaggatgctgatggaaggactcatctgaagggcctctctatggttgaaatcaattcaattcaggagtttcagaatttgtgttatgatagtgacaaacaccaaaatcgcaccaaagtttccaaagctaaaggacacaatggttttattatttttatttctaaatctgatcagaatggcaaagaatcctctgtatcaaaaatgcattttcttgagttggcagaccatatcaatgataagcaaaagagccatggtgaaagatttgttcaacaaaattccaagaagtccttatatgccgtgatggatgttgtgcaagctctaaacagccaccagagcttcataccctatagaaaaagcaaaataacccatattttgcaagactctttatccaagacaggtggtgctttattaatagcatgtttggatgaagtctcatgccaagatgcaatctctactctaagcttggcttcacgctcaagccaagtggtcaatgaacaacggtacaacttatccttaatcacaaaaggttgttcaaagtcaaatgtaaagctttcagtgaacaataagaatttgtcaagatcgttattgtcttctatccaacaacaaagtcccgtgctggagaagccatacaaaacccaagttaataacattgcagtaaaagcaacaagatctctcaatgccaataagagatctgaaacaagcacacattcagcaaaaaagactgtaaacttagtctctgcttcgattaatttgaaacactctggtgctaagtctattctaagggaaaggaacttctttattccaactactaattcatcaaaggaagataagaaaacttttgtgacaactgcggtaaggaaacatgaggtttgtatacttagcatcttatatctacacttgccattgaccattagtgaacatatttatattagagttttctatatcatttcataggcggtagatacatcaatttgcatggaaatttgagccctcccaccaattgagacactaactttttttattgccactgcaagcatatgctagtattacaactaactattgcaatatattagagcgatatgcaggagaatcacaatggcacaaaaaatattgtagtatcatctgaaatgcaagtagtaccttgcagcatgaaagagatagtatcaagtgacatgaaagaagaggatcattcctctccaggttttcttgcagagaacttatttgctgacttgggctttacatgttcatctaatgcagctgataaaacaactgaggaaaatccagccaccgttctccaatcttctccgaagataagcgaccaattgagaaagatatcaaattcactgaagcttcttaattctatggcacctagtatagtaaaacagaaaacagatatagttcgtccacaatcctttgacttagttgaagcagaaccaaaaactcctgaggtcaacttaaaactttggcatgctcaagatgcacaagaatcacttaaggctcgtagcacagggattaagaaatctctagctaaggagtgtttgttgtttctaaacagcgctaataaggagcagttaaaaagtttaaagggtattggagagaaaagggcaaactatatacttgagcttcgagaggagtcaccattgaaagagattgatgatcttaaaagcataattgggatgagcaaaagagagatcgacaagatgatgtcaaagttgatttcggactcggagatgaacgagtaagggttgtattgatctcttcccacttaggaaaggaggagaaggaatgtcttctctacgtataggttttatacaggaatgtcttgtctacgtaacgtataagttttgtttttaaaaaaagaatataatcgggtggaaggctttcaggtttgctgtattagacaaaaacctatcagttaccctgtcatattgtgagtgtgcatattgtcatattgttagaactgtgagaacaagatatgtttatttggctccgccaatattgcttagcggcaaagtatctgtatcgtcagcacagtgcctggtgtcctcttggtcacaacaatctgcactgttcgcagtggtctctcctaccctaacattgctgattcc

SEQ ID NO: 60219 - DNA, 2663 bp, Zea Mays
gggacgcaattcaaaaggggacgagggcaggtcaggcgctcggcgctcctcacgagcaacggctaccacacgaaacaatttcctcttcctcctcagcggcaccgtctcgtcgtcacctccctcctcttcccttcccgcggcccccgacgccctccgtccctcgtcgtcatccagtcatcccctacacccgataaaaggtacgatggaagaagcagcctgcaccgctgctccgagcctcccttatcactctccgtggatcaggaccgctcccgtcagagtagtggcgaagatttgcccgggcggagaccccactggatccatgcaggtctccgcccgtgttcccgatccggctaactcctcctccgcttccgtctcattcgtccccataatcaaggagtctgctctttctaatatgacccaccgcaaacatcgcgagcacaaactcgattggtgctatctcaacgacgattcgtacacagacatttttcacaacgaggggtccgatcatcaaccgggcttgctcactatggccatggagcgaatatttgactatgccaaacctattagggcaactgtcagtgtttcctcttatcatgtgcttcaagacagccatgtctttgatcttttggatcctaagaacaacgaggtccttgtgcgagaggatgctgatggaaggactcatctgaagggcctctctatggttgaaatcaattcaattcaggagtttcagaatttgtgttatgatagtgacaaacaccaaaatcgcaccaaagtttccaaagctaaaggacacaatggttttattatttttatttctaaatctgatcagaatggcaaagaatcctctgtatcaaaaatgcattttcttgagttggcagaccatatcaatgataagcaaaagagccatggtgaaagatttgttcaacaaaattccaagaagtccttatatgccgtgatggatgttgtgcaagctctaaacagccaccagagcttcataccctatagaaaaagcaaaataacccatattttgcaagactctttatccaagacaggtggtgctttattaatagcatgtttggatgaagtctcatgccaagatgcaatctctactctaagcttggcttcacgctcaagccaagtggtcaatgaacaacggtacaacttatccttaatcacaaaaggttgttcaaagtcaaatgtaaagctttcagtgaacaataagaatttgtcaagatcgttattgtcttctatccaacaacaaagtcccgtgctggagaagccatacaaaacccaagttaataacattgcagtaaaagcaacaagatctctcaatgccaataagagatctgaaacaagcacacattcagcaaaaaagactgtaaacttagtctctgcttcgattaatttgaaacactctggtgctaagtctattctaagggaaaggaacttctttattccaactactaattcatcaaaggaagataagaaaacttttgtgacaactgcgagcgatatgcaggagaatcacaatggcacaaaaaatattgtagtatcatctgaaatgcaagtagtaccttgcagcatgaaagagatagtatcaagtgacatgaaagaagaggatcattcctctccaggttttcttgcagagaacttatttgctgacttgggctttacatgttcatctaatgcagctgataaaacaactgaggaaaatccagccaccgttctccaatcttctccgaagataagcgaccaattgagaaagatatcaaattcactgaagcttcttaattctatggcacctagtatagtaaaacagaaaacagatatagttcgtccacaatcctttgacttagttgaagcagaaccaaaaactcctgaggtcaacttaaaactttggcatgctcaagatgcacaagaatcacttaaggctcgtagcacagggattaagaaatctctagctaaggagtgtttgttgtttctaaacagcgctaataaggagcagttaaaaagtttaaagggtattggagagaaaagggcaaactatatacttgagcttcgagaggagtcaccattgaaagagattgatgatcttaaaagcataattgggatgagcaaaagagagatcgacaagatgatgtcaaagttgatttcggactcggagatgaacgagtaagggttgtattgatctcttcccacttaggaaaggaggagaaggtcatagttctaaatttaaatatcgatgcttgttgttatcagatcgctgtggaatccagatgattttgggtgttgcttgtgagaatattctgatgttttgtttttttaaaaaaaattacaggaatgtcttctctacgtataggttttatacaggaatgtcttgtctacgtaacgtataagttttgtttttaaaaaaagaatataatcgggtggaaggctttcaggtttgctgtattagacaaaaacctatcagttaccctgtcatattgtgagtgtgcatattgtcatattgttagaactgtgagaacaagatatgtttatttggctccgccaatattgcttagcggcaaagtatctgtatcgtcagcacagtgcctggtgtcctcttggtcacaacaatctgcactgttcgcagtggtctctcctaccctaacattgctgattcc

SEQ ID NO: 60220 - DNA, 2638 bp, Zea Mays
gggacgcaattcaaaaggggacgagggcaggtcaggcgctcggcgctcctcacgagcaacggctaccacacgaaacaatttcctcttcctcctcagcggcaccgtctcgtcgtcacctccctcctcttcccttcccgcggcccccgacgccctccgtccctcgtcgtcatccagtcatcccctacacccgataaaaggtacgatggaagaagcagcctgcaccgctgctccgagcctcccttatcactctccgtggatcaggaccgctcccgtcagagtagtggcgaagatttgcccgggcggagaccccactggatccatgcaggtctccgcccgtgttcccgatccggctaactcctcctccgcttccgtctcattcgtccccataatcaaggagtctgctctttctaatatgacccaccgcaaacatcgcgagcacaaactcgattggtgctatctcaacgacgattcgtacacagacatttttcacaacgaggttaaacagcttgtggataaaatcttctcctctgatggccacaaccacgcatgtgtagtcacttgcggttccactagcaaaacccaccttgttatagggtccgatcatcaaccgggcttgctcactatggccatggagcgaatatttgactatgccaaacctattagggcaactgtcagtgtttcctcttatcatgtgcttcaagacagccatgtctttgatcttttggatcctaagaacaacgaggtccttgtgcgagaggatgctgatggaaggactcatctgaagggcctctctatggttgaaatcaattcaattcaggagtttcagaatttgtgttatgatagtgacaaacaccaaaatcgcaccaaagtttccaaagctaaaggacacaatggttttattatttttatttctaaatctgatcagaatggcaaagaatcctctgtatcaaaaatgcattttcttgagttggcagaccatatcaatgataagcaaaagagccatggtgaaagatttgttcaacaaaattccaagaagtccttatatgccgtgatggatgttgtgcaagctctaaacagccaccagagcttcataccctatagaaaaagcaaaataacccatattttgcaagactctttatccaagacaggtggtgctttattaatagcatgtttggatgaagtctcatgccaagatgcaatctctactctaagcttggcttcacgctcaagccaagtggtcaatgaacaacggtacaacttatccttaatcacaaaaggttgttcaaagtcaaatgtaaagctttcagtgaacaataagaatttgtcaagatcgttattgtcttctatccaacaacaaagtcccgtgctggagaagccatacaaaacccaagttaataacattgcagtaaaagcaacaagatctctcaatgccaataagagatctgaaacaagcacacattcagcaaaaaagactgtaaacttagtctctgcttcgattaatttgaaacactctggtgctaagtctattctaagggaaaggaacttctttattccaactactaattcatcaaaggaagataagaaaacttttgtgacaactgcgagcgatatgcaggagaatcacaatggcacaaaaaatattgtagtatcatctgaaatgcaagtagtaccttgcagcatgaaagagatagtatcaagtgacatgaaagaagaggatcattcctctccaggttttcttgcagagaacttatttgctgacttgggctttacatgttcatctaatgcagctgataaaacaactgaggaaaatccagccaccgttctccaatcttctccgaagataagcgaccaattgagaaagatatcaaattcactgaagcttcttaattctatggcacctagtatagtaaaacagaaaacagatatagttcgtccacaatcctttgacttagttgaagcagaaccaaaaactcctgaggtcaacttaaaactttggcatgctcaagatgcacaagaatcacttaaggctcgtagcacagggattaagaaatctctagctaaggagtgtttgttgtttctaaacagcgctaataaggagcagttaaaaagtttaaagggtattggagagaaaagggcaaactatatacttgagcttcgagaggagtcaccattgaaagagattgatgatcttaaaagcataattgggatgagcaaaagagagatcgacaagatgatgtcaaagttgatttcggactcggagatgaacgagtaagggttgtattgatctcttcccacttaggaaaggaggagaaggaatgtcttctctacgtataggttttatacaggaatgtcttgtctacgtaacgtataagttttgtttttaaaaaaagaatataatcgggtggaaggctttcaggtttgctgtattagacaaaaacctatcagttaccctgtcatattgtgagtgtgcatattgtcatattgttagaactgtgagaacaagatatgtttatttggctccgccaatattgcttagcggcaaagtatctgtatcgtcagcacagtgcctggtgtcctcttggtcacaacaatctgcactgttcgcagtggtctctcctaccctaacattgctgattcc

SEQ ID NO: 60221 - DNA, 2589 bp, Zea Mays
gggacgcaattcaaaaggggacgagggcaggtcaggcgctcggcgctcctcacgagcaacggctaccacacgaaacaatttcctcttcctcctcagcggcaccgtctcgtcgtcacctccctcctcttcccttcccgcggcccccgacgccctccgtccctcgtcgtcatccagtcatcccctacacccgataaaaggaccgctcccgtcagagtagtggcgaagatttgcccgggcggagaccccactggatccatgcaggtctccgcccgtgttcccgatccggctaactcctcctccgcttccgtctcattcgtccccataatcaaggagtctgctctttctaatatgacccaccgcaaacatcgcgagcacaaactcgattggtgctatctcaacgacgattcgtacacagacatttttcacaacgaggttaaacagcttgtggataaaatcttctcctctgatggccacaaccacgcatgtgtagtcacttgcggttccactagcaaaacccaccttgttatagggtccgatcatcaaccgggcttgctcactatggccatggagcgaatatttgactatgccaaacctattagggcaactgtcagtgtttcctcttatcatgtgcttcaagacagccatgtctttgatcttttggatcctaagaacaacgaggtccttgtgcgagaggatgctgatggaaggactcatctgaagggcctctctatggttgaaatcaattcaattcaggagtttcagaatttgtgttatgatagtgacaaacaccaaaatcgcaccaaagtttccaaagctaaaggacacaatggttttattatttttatttctaaatctgatcagaatggcaaagaatcctctgtatcaaaaatgcattttcttgagttggcagaccatatcaatgataagcaaaagagccatggtgaaagatttgttcaacaaaattccaagaagtccttatatgccgtgatggatgttgtgcaagctctaaacagccaccagagcttcataccctatagaaaaagcaaaataacccatattttgcaagactctttatccaagacaggtggtgctttattaatagcatgtttggatgaagtctcatgccaagatgcaatctctactctaagcttggcttcacgctcaagccaagtggtcaatgaacaacggtacaacttatccttaatcacaaaaggttgttcaaagtcaaatgtaaagctttcagtgaacaataagaatttgtcaagatcgttattgtcttctatccaacaacaaagtcccgtgctggagaagccatacaaaacccaagttaataacattgcagtaaaagcaacaagatctctcaatgccaataagagatctgaaacaagcacacattcagcaaaaaagactgtaaacttagtctctgcttcgattaatttgaaacactctggtgctaagtctattctaagggaaaggaacttctttattccaactactaattcatcaaaggaagataagaaaacttttgtgacaactgcggtaaggaaacatgagagcgatatgcaggagaatcacaatggcacaaaaaatattgtagtatcatctgaaatgcaagtagtaccttgcagcatgaaagagatagtatcaagtgacatgaaagaagaggatcattcctctccaggttttcttgcagagaacttatttgctgacttgggctttacatgttcatctaatgcagctgataaaacaactgaggaaaatccagccaccgttctccaatcttctccgaagataagcgaccaattgagaaagatatcaaattcactgaagcttcttaattctatggcacctagtatagtaaaacagaaaacagatatagttcgtccacaatcctttgacttagttgaagcagaaccaaaaactcctgaggtcaacttaaaactttggcatgctcaagatgcacaagaatcacttaaggctcgtagcacagggattaagaaatctctagctaaggagtgtttgttgtttctaaacagcgctaataaggagcagttaaaaagtttaaagggtattggagagaaaagggcaaactatatacttgagcttcgagaggagtcaccattgaaagagattgatgatcttaaaagcataattgggatgagcaaaagagagatcgacaagatgatgtcaaagttgatttcggactcggagatgaacgagtaagggttgtattgatctcttcccacttaggaaaggaggagaaggaatgtcttctctacgtataggttttatacaggaatgtcttgtctacgtaacgtataagttttgtttttaaaaaaagaatataatcgggtggaaggctttcaggtttgctgtattagacaaaaacctatcagttaccctgtcatattgtgagtgtgcatattgtcatattgttagaactgtgagaacaagatatgtttatttggctccgccaatattgcttagcggcaaagtatctgtatcgtcagcacagtgcctggtgtcctcttggtcacaacaatctgcactgttcgcagtggtctctcctaccctaacattgctgattcc

SEQ ID NO: 60222 - DNA, 1705 bp, Zea Mays
cctcgccattgctttgcgctctccggccccccgctcctccctgttctgcactcgccgtcagatttcgcaagaaccctcgttccctgcggcctcttgttggtttggtcggccgatacgtttgatctgtagagcaagacgacgagcctggagagaggaagaagtgcaccggcgattgtagaaccagcaccggcggaggagttgaagacgccgattcgagcccggcgaagtgctcgggacgtggcctcgtcgagcccggcgaaggccgcgtcggcattgaacatgatgagatacccgaggcctagctcagatggcctcccgctgcccaatggcatcgggagcggcggcggcggcgcgagcaagaagcctgcaacgccgccgcccagatcgagcaaggatgacgtggcgccggccgtcgccaccgacagctcccgactcgcggcgttcctggcctcgacgtcgctcgagtccaaggcgcgcgcccgcgcgccgccggcgcagcccgcgcctacctcggcggccaccgctgccgtcgccgcgaccaagagccctgttcgcgaccacgaccacggccatggccacagccacggcgcctcctccgaccactccgaccccgcctccccgagctccaccggaaccggcgaattgctgctccagtggggacagaacaagcgcatgcgctgccgccgagactccgcgtccccgtcgccgcagcaccggcaggccggcggcaagatccagcggcgctcgtcgtccccggcggtggacaagctgatgccgcccccgagcgcggcgccctacacccgcgggtccaacctccgctccgtctcgtctctccctccgcgctccggctccggctccggctccggatcctctgccggcgccctcccccacccgctcagatcagcggaggaccgtgcggcggggaagttctcggcggcgagggccgagaagcagcgtgcggtgtccccgggctccgtgatgggcatgggcgtcccggtcccggacccgaggcggcagcagcagcagcagcatgccggcgcggcggcagcggcgacgtcgaagccggcgtcgaaggtggagatgccgcggatctacaccacgctgtctcggaaggagaaggaggaggacttcatggccatgaagggcaccaagctgccgcagcgccccaagcggcggcccaagatcgtcgagaagaccgtcagtcaacagaagaatcgaggcctcaaggggatggagggcatggacagcgactccgactgaccaccgacgccagcctgagttgcctgcccgaggcgcggtggcggcggaagaggaagaagggtcggcgacagtgacgggagacgaggagcgcgcgctcttgtacatggtcgcactgggttgaaggaagccataaaaaacgaaggtggattcaggggggggggggggggggggggggaagaacttccgaatgaatcgtagccggcgtcttccttcgttccttccttttttttgttcgacattgggtggtttgtgcatatcgtcggacaaccagtagactgtctccgcaagaggaaacaaggcatttagaccaccctctctctcgctcgctctatgtggttaattagagcatgtttggaaatactaggactagttgttaatcatggctaaaagctagctaaggatatctctcgcatgcttagattcttagctaaaaattagcttctag

SEQ ID NO: 60223 - DNA, 1401 bp, Zea Mays
cctcgccattgctttgcgctctccggccccccgctcctccctgttctgcactcgccgtcagatttcgcaagaaccctcgttccctgcggcctcttgttggtttggtcggccgatacgtttgatctgtagagcaagacgacgagcctggagagaggaagaagtgcaccggcgattgtagaaccagcaccggcggaggagttgaagacgccgattcgagcccggcgaagtgctcgggacgtggcctcgtcgagcccggcgaaggccgcgtcggcattgaacatgatgagatacccgaggcctagctcagatggcctcccgctgcccaatggcatcgggagcggcggcggcggcgcgagcaagaagcctgcaacgccgccgcccagatcgagcaaggatgacgtggcgccggccgtcgccaccgacagctcccgactcgcggcgttcctggcctcgacgtcgctcgagtccaaggcgcgcgcccgcgcgccgccggcgcagcccgcgcctacctcggcggccaccgctgccgtcgccgcgaccaagagccctgttcgcgaccacgaccacggccatggccacagccacggcgcctcctccgaccactccgaccccgcctccccgagctccaccggaaccggcgaattgctgctccagtggggacagaacaagcgcatgcgctgccgccgagactccgcgtccccgtcgccgcagcaccggcaggccggcggcaagatccagcggcgctcgtcgtccccggcggtggacaagctgatgccgcccccgagcgcggcgccctacacccgcgggtccaacctccgctccgtctcgtctctccctccgcgctccggctccggctccggctccggatcctctgccggcgccctcccccacccgctcagcaacagaagaatcgaggcctcaaggggatggagggcatggacagcgactccgactgaccaccgacgccagcctgagttgcctgcccgaggcgcggtggcggcggaagaggaagaagggtcggcgacagtgacgggagacgaggagcgcgcgctcttgtacatggtcgcactgggttgaaggaagccataaaaaacgaaggtggattcaggggggggggggggggggggggggaagaacttccgaatgaatcgtagccggcgtcttccttcgttccttccttttttttgttcgacattgggtggtttgtgcatatcgtcggacaaccagtagactgtctccgcaagaggaaacaaggcatttagaccaccctctctctcgctcgctctatgtggttaattagagcatgtttggaaatactaggactagttgttaatcatggctaaaagctagctaaggatatctctcgcatgcttagattcttagctaaaaattagcttctag

SEQ ID NO: 60224 - DNA, 1783 bp, Zea Mays
cctcgccattgctttgcgctctccggccccccgctcctccctgttctgcactcgccgtcagatttcgcaagaaccctcgttccctgcggcctcttgttggtttggtcggccgatacgtttgatctgtagagcaagacgacgagcctggagagaggaagaagtgcaccggcgattgtagaaccagcaccggcggaggagttgaagacgccgattcgagcccggcgaagtgctcgggacgtggcctcgtcgagcccggcgaaggccgcgtcggcattgaacatgatgagatacccgaggcctagctcagatggcctcccgctgcccaatggcatcgggagcggcggcggcggcgcgagcaagaagcctgcaacgccgccgcccagatcgagcaaggatgacgtggcgccggccgtcgccaccgacagctcccgactcgcggcgttcctggcctcgacgtcgctcgagtccaaggcgcgcgcccgcgcgccgccggcgcagcccgcgcctacctcggcggccaccgctgccgtcgccgcgaccaagagccctgttcgcgaccacgaccacggccatggccacagccacggcgcctcctccgaccactccgaccccgcctccccgagctccaccggaaccggcgaattgctgctccagtggggacagaacaagcgcatgcgctgccgccgagactccgcgtccccgtcgccgcagcaccggcaggccggcggcaagatccagcggcgctcgtcgtccccggcggtggacaagctgatgccgcccccgagcgcggcgccctacacccgcgggtccaacctccgctccgtctcgtctctccctccgcgctccggctccggctccggctccggatcctctgccggcgccctcccccacccgctcagatcagcggaggaccgtgcggcggggaagttctcggcggcgagggccgagaagcagcgtgcggtgtccccgggctccgtgatgggcatgggcgtcccggtcccggacccgaggcggcagcagcagcagcagcatgccggcgcggcggcagcggcgacgtcgaagccggcgtcgaaggtggagatgccgcggatctacaccacgctgtctcggaaggagaaggaggaggacttcatggccatgaagggcaccaagctgccgcagcgccccaagcggcggcccaagatcgtcgagaagaccgtcagtgcgatctgccccgggatgtggctgacggatgtgaccaggggccggtacgaggtgcgcgagaagaagtgccccaagaagcaacagaagaatcgaggcctcaaggggatggagggcatggacagcgactccgactgaccaccgacgccagcctgagttgcctgcccgaggcgcggtggcggcggaagaggaagaagggtcggcgacagtgacgggagacgaggagcgcgcgctcttgtacatggtcgcactgggttgaaggaagccataaaaaacgaaggtggattcaggggggggggggggggggggggggaagaacttccgaatgaatcgtagccggcgtcttccttcgttccttccttttttttgttcgacattgggtggtttgtgcatatcgtcggacaaccagtagactgtctccgcaagaggaaacaaggcatttagaccaccctctctctcgctcgctctatgtggttaattagagcatgtttggaaatactaggactagttgttaatcatggctaaaagctagctaaggatatctctcgcatgcttagattcttagctaaaaattagcttctag

SEQ ID NO: 60225 - DNA, 2312 bp, Zea Mays
ctccactagagcggcgttgtctgttggtctcattccattcggaggcacgcactcggctaggcgcagaggctttctcctcccccaagccgaaacaccagagggcgagactcgagagagaagagcggcgcggcggaggacagcactggatggagccctcgccggcggcgggagagcttggcgcgatgcttcgtgcggccgctgacttcgcgtcctacccagggttgcatagtgatgatactgtgaggcagttcctggaacgatgtccgctgcctaagctcttaggtgcattgcagagtgaagaagatgtacctgggatggttgaaactgtcacagagtgtttagacaaaatattttcctcaagatatggagcgtcacttctgccaaactacggtgcatttattcaagctggattgctcacagactcgaagcaaatcagaaaattagcctgcaaagctgtactccatcttcttgacaaggctgaagatggtggtgctgctgtggaaacagttgtgcagcataatctgtatcctcttctgatcaaatgtttgattgagggagatgaagaaatttcagcaatcattttggacactgtaaagcgtttagcccaaattcctaaaggagctgaagtcatattcccaccagatggtcaaggatctgtgcaacttggtaaagtggcagctcagtcatcttcattggcacggattcgtattctatctttgatagccaagctcttcactgtttcaagttatactgctactgctattcgtgattcaaaccttctgagcatatttgaagaggaaataaaagatagaagagatatgcttaaaaccctcagtgcgctagaggtcctatatgagcttgttgaacaccctcacagcaacattttcctgctgaagaccaacttgcttcaactcataattgatatcatcaatgattcctcagctgattctgttatacggtcaagggcagcattagttagtgggaggcttctttcttcagctgatgctttcacagcaatagataaatcctgcgttaccaatctgctcatagccataggcagaattttgaagatggaagaaagcaagaatactgatgaaattgagagtgcattggagaccttgggtctaattggtacaacaagtcaaggagcacatttcttgctgacatcatcaaatgttgccagacatgttgtcgagtcatcctttgatcgtcaaggcaggggtagacagctggctgctttacatgcctttgggaacatctgtggtgttggtagacaagaagatcagatgaaactggatagcgaagccgaggaaaacttgaagcgcttggtctatacgactgcagcaaacagtccaaaattaaccccttcagctcttctactatcagttctgcaacaagacccagacgttaggatagctggctacagagtaataacaggactggtcatccgggaatggtgcttaagggaggtttgcttaaattcagagataatcagatttgttacggatccaacaatggagacaacaaaacttggtaaataatcaatacacttggtcctaatgaagtaattattaccatctggtcttgttttaacaggagtgctgcattatgggtatttatttgttcatttagaactgtttttgtgagactggttacaattgaatgtgatgccatgattaagtcgttcatagttactaatcctaccgtggactgtgcaagtttctatttattggaccagttactgtaatggtacaatttattcactgttgtaggcatggaaacccggtatggctgctgtgtggcaatcaacaaggccctatcatcatcccatcttctgcatgaagcaagtctttctgaactcgttgggaagttgaatgatgcggtgaaacggggcccttacctttctgataggaagcgtgtggaggcacggccggtggttgatactgcagagaggttttaaggtgccctcgagtattcacccaaagtaaacgatcactctcacagcgtagctaggaggtaactgagcgtgccctgcgtctcatacggttggcttatgggtaacagacatatatatgatgtacctggacgatggggaggacaatgtgtagttgaattcactgagactggcacaatacctaaacttacaaagcaaagatgttgtttcttctattttgctttgtggatgtcttatgcagcccctacctgcgaaagaaaatcatctgttgcaggaccgtgccaaattttgatgaaattgcagatgcagccggcactaatttttcatgtattgaatgctcaatcgaatcaggtaattt

SEQ ID NO: 60226 - DNA, 1251 bp, Zea Mays
ttggtctcattccattcggaggcacgcactcggctaggcgcagaggctttctcctcccccaagccgaaacaccagagggcgagactcgagagagaagagcggcgcggcggaggacagcactggatggagccctcgccggcggcgggagagcttggcgcgatgcttcgtgcggccgctgacttcgcgtcctacccagggttgcatagtgatgatactgtgaggcagttcctggaacgatgtccgctgcctaagctcttaggtgcattgcagagtgaagaagatgtacctgggatggttgaaactgtcacagagtgtttagacaaaatattttcctcaagatatggagcgtcacttctgccaaactacggtgcatttattcaagctggattgctcacagactcgaagcaaatcagaaaattagcctgcaaagctgtactccatcttcttgacaaggctgaagatggtggtgctgctgtggaaacagttgtgcagcataatctgtatcctcttctgatcaaatgtttgattgagggagatgaagaaatttcagcaatcattttggacactgtaaagcgtttagcccaaattcctaaaggagctgaagtcatattcccaccagatggtcaaggatctgtgcaacttggtaaagtggcagctcagtcatcttcattggcacggattcgtattctatctttgatagccaagctcttcactgtttcaagttatactgctactgctattcgtgattcaaaccttctgagcatatttgaagaggaaataaaagatagaagagatatgcttaaaaccctcagtgcgctagaggtcctatatgagcttgttgaacaccctcacagcaacattttcctgctgaagaccaacttgcttcaactcataattgatatcatcaatgattcctcagctgattctgttatacggtcaagggcagcattagttagtgggaggcttctttcttcagctgatgctttcacagcaatagataaatcctgcgttaccaatctgctcatagccataggcagaattttgaagatggaagaaagcaagaatactgatgaaattgagagtgcattggagaccttgggtctaattggtacaacaagtcaaggagcacatttcttgctgacatcatcaaatgttgccagacatgttgtcgagtcatcctttgatcgtcaaggcaggggtagacagctgccacagacgtggtcaaaccatggcctccccacggcaactaac

SEQ ID NO: 60227 - DNA, 2040 bp, Zea Mays
ttggtctcattccattcggaggcacgcactcggctaggcgcagaggctttctcctcccccaagccgaaacaccagagggcgagactcgagagagaagagcggcgcggcggaggacagcactggatggagccctcgccggcggcgggagagcttggcgcgatgcttcgtgcggccgctgacttcgcgtcctacccagggttgcatagtgatgatactgtgaggcagttcctggaacgatgtccgctgcctaagctcttaggagtgaagaagatgtacctgggatggttgaaactgtcacagagtgtttagacaaaatattttcctcaagatatggagcgtcacttctgccaaactacggtgcatttattcaagctggattgctcacagactcgaagcaaatcagaaaattagcctgcaaagctgtactccatcttcttgacaaggctgaagatggtggtgctgctgtggaaacagttgtgcagcataatctgtatcctcttctgatcaaatgtttgattgagggagatgaagaaatttcagcaatcattttggacactgtaaagcgtttagcccaaattcctaaaggagctgaagtcatattcccaccagatggtcaaggatctgtgcaacttggtaaagtggcagctcagtcatcttcattggcacggattcgtattctatctttgatagccaagctcttcactgtttcaagttatactgctactgctattcgtgattcaaaccttctgagcatatttgaagaggaaataaaagatagaagagatatgcttaaaaccctcagtgcgctagaggtcctatatgagcttgttgaacaccctcacagcaacattttcctgctgaagaccaacttgcttcaactcataattgatatcatcaatgattcctcagctgattctgttatacggtcaagggcagcattagttagtgggaggcttctttcttcagctgatgctttcacagcaatagataaatcctgcgttaccaatctgctcatagccataggcagaattttgaagatggaagaaagcaagaatactgatgaaattgagagtgcattggagaccttgggtctaattggtacaacaagtcaaggagcacatttcttgctgacatcatcaaatgttgccagacatgttgtcgagtcatcctttgatcgtcaaggcaggggtagacagctggctgctttacatgcctttgggaacatctgtggtgttggtagacaagaagatcagatgaaactggatagcgaagccgaggaaaacttgaagcgcttggtctatacgactgcagcaaacagtccaaaattaaccccttcagctcttctactatcagttctgcaacaagacccagacgttaggatagctggctacagagtaataacaggactggtcatccgggaatggtgcttaagggaggtttgcttaaattcagagataatcagatttgttacggatccaacaatggagacaacaaaacttggcatggaaacccggtatggctgctgtgtggcaatcaacaaggccctatcatcatcccatcttctgcatgaagcaagtctttctgaactcgttgggaagttgaatgatgcggtgaaacggggcccttacctttctgataggaagcgtgtggaggcacggccggtggttgatactgcagagaggttttaaggtgccctcgagtattcacccaaagtaaacgatcactctcacagcgtagctaggaggtaactgagcgtgccctgcgtctcatacggttggcttatgggtaacagacatatatatgatgtacctggacgatggggaggacaatgtgtagttgaattcactgagactggcacaatacctaaacttacaaagcaaagatgttgtttcttctattttgctttgtggatgtcttatgcagcccctacctgcgaaagaaaatcatctgttgcaggaccgtgccaaattttgatgaaattgcagatgcagccggcactaatttttcatgtattgaatgctcaatcgaatcaggtaattt

SEQ ID NO: 60228 - DNA, 348 bp, Zea Mays
atggtgtccctaaacgcccaatatgtctcgcttatgtctttaccagaagatctagacagggatatatacatagactacctacagaaagcagttagacgatcggcagctcaggcatcaaacttgctgtgttgtgttgcatcggtgtggcccaactccccatcgaccgaggatagcttgaatggcaggtttatttccaacagcaagcccgactccgccttacagcctcaacgtggtgtccgctgccgatgtggaagctccggaccttgccttctcgctgaggaacttgccacagtccgcgcccttcgcggtgaactccgccagaagttcctcgtgaagcctcttcagtga

SEQ ID NO: 60229 - DNA, 758 bp, Zea Mays
gtattaccttccagaatcacttcttgatattctcgtataagttatgtgcaggcaggcagcacacttgactgataatgccaaaggagaattacccagatatagatgctagtgcgcacagcggaaggagatttactaaaaatagtaaatataattggtatttagtgccaaaggagatttgcccgaagagcgatgtgaaactaaaggtagaactagtgccaaaggagatttgcccagtgagaaatcttaaagctaatgccaaaggagatttgcccccaaaagagctattaataagtactgccaaaggagatttgcccagcaaatcagatggtacgaaaccttatgaaacttccatcaaactaaatgagaatttcctgatggatatcatttggaagtctcttcgctgctgatagttcattcgacgaggagaatatgctcaggataaccagcaaagtgatgcaccctgaacaatgtttgccaaaggagatttgccctaaaacaaggatactttcataaagggaagcgattccatagagaaaagatcagctgacagatgatatactctggatgatcacaagagataagtgaccaggagtgtcagtccacaatcaagcctaatcacacagaagagaacatgctactatctggtgaccagtactcaagaaagcaaccaaggtaacagcttttcatcagtgggggcttcaattatgatgagatcacagaataaaatggtctgtcgggtccaattgctaggatcagct

SEQ ID NO: 60230 - DNA, 703 bp, Zea Mays
ccggcgccccatcgacaacacgcgaaacgaacctcgaaagcaggtaccaaatttggagcctgacgcaatggtgtccatacctgtcgcaatcccaacccgccgccatgctcgctcccgagagcccagacccgcgcaccgaagaagaagaagaagaggaagctactgcgctcctctccccccacgcctcaatccatcccctaacccttggaccatggccagcagcaagctcctgagttcaaacggctccaatccctccgaggaagcagaggccaagacgtgtagcaccaccaccaacaacaccaagtcgcaccaaatcacagcccggagcagttgaacactggagcggtcgtgtgcccaccggtatttcaagtggcagtgaggacgcgagggggcgcgagaggacagagagccactgggaggagtgggaggttctcgctgggtgctcggcggcttgctcgagtgggcgtggtggcggtgccggtaacgatttctacggtgcgcgagcgcaaaggcctcgcctttccggtgccgcgcgcaattcttttggcttcttttatttagccgagggcgcgcctaattgcgctgcgctaatgggatcccatcccccaccctgccacttttacgagctcgcgtgttcttcctccactctccctttttctctctccaatagaccaatacaggtgttgggaactgaagacgaaag

SEQ ID NO: 60231 - DNA, 2286 bp, Zea Mays
tgagagaaaatgcacagcgccagtttcataatgcaaataatgcagcctaaaataccagatagaaccatcgttatttaggagacagatcatgaggggtacttcagtgagggcaggacaacataagcatattcttagaagatcaacaattgatcgttgagagtcgagcaaagcacatagtcttaacaagaaacagatttgccatactaacaagaaacagttttgccatacttctataacccatacatttgagctactaagctaacaaaacctgaagaaaaacctgaggggccaagttctgcagtataattgattggtggccatctcaagtgaagcctacatcatataaaccttggtcctcaacttcttgacatgtcatctgatttctcccccttgatcttcttaccgacgatcaccctttatgctcttcttcctcttctttccctcctcggtagcacgcttgcccttcactctacccttcttgccaacctcctggctatcatcaaccatgatgctcttcgtcttcttctttttctctgtatccacctgaacttcttcctgcatcacaacaccctcctcaatctgctccttcttattcctcttcctcttggaactcacattggcaaatacctctcttccatcggcaccagcattcgccttcttttcgatgacctccccagatccaacaatgtcaggctcaggcacctcgattttcatacccaactccggcacaacctggtaaattggtagggcaactgaatccacagccttcagatgcagcgccctgacattgccccacttctttggcaccttctcgacagcctcctccaccgcggccatcacattgtccacgatatcctcctcctccatgtccagcctacccaccttaatccccgagcaggtccctgaccgcaggtacagaaaagcagagccaagaaccctgcggacctgctccggccatccgatgcgggtgaaatcgactccaatcggagccttcttggtggagtagaacgccttcccgaggacgcgcggcagcagggggaggatggcgcggtcggcgacgaagaggtcgtgggaggctgcgagacggcgccgagactcgtacgggcggtaatccgtgcggagcgtagagagcgggatgacctcggagacggggaaacggtggagcgacatggacgcgtggaggtcggaggcggaaggggaccgcgacttggtgcggtcgtccgagatgacgcagacggaggcgccgtcgtgcccaacaacgggatgtggcatcgggaggaggcgcggcttggtgctgcgcgaggcggggatgcggcgtagcgagagctggaggaccacgatgtcgtcgcgctcgtcggcgaggaggttcgggcgcgcctccgcagcgcgcttcttcatccacgttgtcagggaagcgacagcgctggccaccgtctctcggggcaccgggtgtggtggctgcggcggcgacatggtggcggcggcgcgagagggagatcagaggggtttagggtttggttgatgtggggtgggaaggttgtgtttttatagacttcacagcatttgtccctatggcaagtgggtccaggctccgtcatttgcccatatgtctctctatggtaggtgggtccagactgcggagaggacgctccgcaactagcaaaggcggggtgctgtagcgccggcggcccttcgccgactcgcccaggtgcgcgcgggacaggcaacaacgaccagcaggagtccggcggtgtggggcagcagaagctcatcgggactttattcttgattgttcctgatcgaaacccgaactttttggcaaatgagtgccggtggtgcttttggcggaaataggggggtgaggcctgtacctcctgaaaaaggtgtgttcccattggatcacttacatgagtgcgacttggagaagaaagattatcttggctgcctgaaatctacaggattccagtctgaaaaatgtcggcagttctcaaagaagtatttggagtgtcggatggagagaaacttgatggccaagcaagacatgtcagagcttgggttcagaattgtggatgaagcgggtacatctcctgacaagaacagcaaaccggagagccctcctaatcagccaaaggattaaaaaaatagctgtttggctttgatgtagcttttgtatgtttcttcatcccaaagatctgtcaagatctcaaacaaataagggtataatgaaaggacgatgttagtttacatagtaaccaaatttgaaacttatctgttggctgttttgag

SEQ ID NO: 60232 - DNA, 2228 bp, Zea Mays
tgagagaaaatgcacagcgccagtttcataatgcaaataatgcagcctaaaataccagatagaaccatcgttatttaggagacagatcatgaggggtacttcagtgagggcaggacaacataagcatattcttagaagatcaacaattgatcgttgagagtcgagcaaagcacatagtcttaacaagaaacagatttgccatactaacaagaaacagttttgccatacttctataacccatacatttgagctactaagctaacaaaacctgaagaaaaacctgaggggccaagttctgcagtataattgattggtggccatctcaagtgaagcctacatcatataaaccttggtcctcaacttcttgacatgtcatctgatttctcccccttgatcttcttaccgacgatcaccctttatgctcttcttcctcttctttccctcctcggtagcacgcttgcccttcactctacccttcttgccaacctcctggctatcatcaaccatgatgctcttcgtcttcttctttttctctgtatccacctgaacttcttcctgcatcacaacaccctcctcaatctgctccttcttattcctcttcctcttggaactcacattggcaaatacctctcttccatcggcaccagcattcgccttcttttcgatgacctccccagatccaacaatgtcaggctcaggcacctcgattttcatacccaactccggcacaacctggtaaattggtagggcaactgaatccacagccttcagatgcagcgccctgacattgccccacttctttggcaccttctcgacagcctcctccaccgcggccatcacattgtccacgatatcctcctcctccatgtccagcctacccaccttaatccccgagcaggtccctgaccgcaggtacagaaaagcagagccaagaaccctgcggacctgctccggccatccgatgcgggtgaaatcgactccaatcggagccttcttggtggagtagaacgccttcccgaggacgcgcggcagcagggggaggatggcgcggtcggcgacgaagaggtcgtgggaggctgcgagacggcgccgagactcgtacgggcggtaatccgtgcggagcgtagagagcgggatgacctcggagacggggaaacggtggagcgacatggacgcgtggaggtcggaggcggaaggggaccgcgacttggtgcggtcgtccgagatgacgcagacggaggcgccgtcgtgcccaacaacgggatgtggcatcgggaggaggcgcggcttggtgctgcgcgaggcggggatgcggcgtagcgagagctggaggaccacgatgtcgtcgcgctcgtcggcgaggaggttcgggcgcgcctccgcagcgcgcttcttcatccacgttgtcagggaagcgacagcgctggccaccgtctctcggggcaccgggtgtggtggctgcggcggcgacatggtggcggcggcgcgagagggagatcagaggggtttagggtttggttgatgtggggtgggaaggttgtgtttttatagacttcacagcatttgtccctatggcaagtgggtccaggctccgtcatttgcccatatgtctctctatggtaggtgggtccagactgcggagaggacgctccgcaactagcaaaggcggggtgctgtagcgccggcggcccttcgccgactcgcccaggtgcgcgcgggacaggcaacaacgaccagcaggagtccggcggtgtggggcagcagaagctcatcggtgcggagcattgttcacacaaactgactttattcctgcaggactttattcttgattgttcctgatcgaaacccgaactttttggcaaatgagtgccggtggtgcttttggcggaaataggggggtgaggcctgtacctcctgaaaaaggtgtgttcccattggatcacttacatgagtgcgacttgaaacttgatggccaagcaagacatgtcagagcttgggttcagaattgtggatgaagcgggtacatctcctgacaagaacagcaaaccggagagccctcctaatcagccaaaggattaaaaaaatagctgtttggctttgatgtagcttttgtatgtttcttcatcccaaagatctgtcaagatctcaaacaaataagggtataatgaaaggacgatgttagtttacatagtaaccaaatttgaaacttatctgttggctgttttgag

SEQ ID NO: 60233 - DNA, 2326 bp, Zea Mays
tgagagaaaatgcacagcgccagtttcataatgcaaataatgcagcctaaaataccagatagaaccatcgttatttaggagacagatcatgaggggtacttcagtgagggcaggacaacataagcatattcttagaagatcaacaattgatcgttgagagtcgagcaaagcacatagtcttaacaagaaacagatttgccatactaacaagaaacagttttgccatacttctataacccatacatttgagctactaagctaacaaaacctgaagaaaaacctgaggggccaagttctgcagtataattgattggtggccatctcaagtgaagcctacatcatataaaccttggtcctcaacttcttgacatgtcatctgatttctcccccttgatcttcttaccgacgatcaccctttatgctcttcttcctcttctttccctcctcggtagcacgcttgcccttcactctacccttcttgccaacctcctggctatcatcaaccatgatgctcttcgtcttcttctttttctctgtatccacctgaacttcttcctgcatcacaacaccctcctcaatctgctccttcttattcctcttcctcttggaactcacattggcaaatacctctcttccatcggcaccagcattcgccttcttttcgatgacctccccagatccaacaatgtcaggctcaggcacctcgattttcatacccaactccggcacaacctggtaaattggtagggcaactgaatccacagccttcagatgcagcgccctgacattgccccacttctttggcaccttctcgacagcctcctccaccgcggccatcacattgtccacgatatcctcctcctccatgtccagcctacccaccttaatccccgagcaggtccctgaccgcaggtacagaaaagcagagccaagaaccctgcggacctgctccggccatccgatgcgggtgaaatcgactccaatcggagccttcttggtggagtagaacgccttcccgaggacgcgcggcagcagggggaggatggcgcggtcggcgacgaagaggtcgtgggaggctgcgagacggcgccgagactcgtacgggcggtaatccgtgcggagcgtagagagcgggatgacctcggagacggggaaacggtggagcgacatggacgcgtggaggtcggaggcggaaggggaccgcgacttggtgcggtcgtccgagatgacgcagacggaggcgccgtcgtgcccaacaacgggatgtggcatcgggaggaggcgcggcttggtgctgcgcgaggcggggatgcggcgtagcgagagctggaggaccacgatgtcgtcgcgctcgtcggcgaggaggttcgggcgcgcctccgcagcgcgcttcttcatccacgttgtcagggaagcgacagcgctggccaccgtctctcggggcaccgggtgtggtggctgcggcggcgacatggtggcggcggcgcgagagggagatcagaggggtttagggtttggttgatgtggggtgggaaggttgtgtttttatagacttcacagcatttgtccctatggcaagtgggtccaggctccgtcatttgcccatatgtctctctatggtaggtgggtccagactgcggagaggacgctccgcaactagcaaaggcggggtgctgtagcgccggcggcccttcgccgactcgcccaggtgcgcgcgggacaggcaacaacgaccagcaggagtccggcggtgtggggcagcagaagctcatcggtgcggagcattgttcacacaaactgactttattcctgcaggactttattcttgattgttcctgatcgaaacccgaactttttggcaaatgagtgccggtggtgcttttggcggaaataggggggtgaggcctgtacctcctgaaaaaggtgtgttcccattggatcacttacatgagtgcgacttggagaagaaagattatcttggctgcctgaaatctacaggattccagtctgaaaaatgtcggcagttctcaaagaagtatttggagtgtcggatggagagaaacttgatggccaagcaagacatgtcagagcttgggttcagaattgtggatgaagcgggtacatctcctgacaagaacagcaaaccggagagccctcctaatcagccaaaggattaaaaaaatagctgtttggctttgatgtagcttttgtatgtttcttcatcccaaagatctgtcaagatctcaaacaaataagggtataatgaaaggacgatgttagtttacatagtaaccaaatttgaaacttatctgttggctgttttgag

SEQ ID NO: 60234 - DNA, 309 bp, Zea Mays
gtaaccagctcgccaaccacaagtgctcagctcctacttttgaaacttgatggccaagcaagacatgtcagagcttgggttcagaattgtggatgaagcgggtacatctcctgacaagaacagcaaaccggagagccctcctaatcagccaaaggattaaaaaaatagctgtttggctttgatgtagcttttgtatgtttcttcatcccaaagatctgtcaagatctcaaacaaataagggtataatgaaaggacgatgttagtttacatagtaaccaaatttgaaacttatctgttggctgttttgag

SEQ ID NO: 60235 - DNA, 2529 bp, Zea Mays
gacagatcgatccgtccgtcctccgtcgtgttcgttcaggccgagcgagatccactgctgactgctcactgcaccgaaccgagagagcgtggcaggcaggcgggcggccgatcaccgacgccgacgcggcgtccacacgcgccaacggccgaacgcactctctcccacccctccgtcgtgctccacggcccaacccaaccctacgcactcctcccccctccccccccgcagctacatctcccctcccgcttcgccagtcgccaccgcgcggcgggagctcgctgaagagcttcccccctctccccccaggcccgcggcggcgccggctcggcccccgtcatcgcgctatcgtaggctcgcgggctcagctgatctggtcagcgaggcgaggttgccggggggccagattccgctcccgcccgcgcgtggtctggggtgtgggcggtggatcggctgcgcgggtcattagatctatgcccgagatctaaggcgccagcgccaggtgcggaggcggaggccgtgagccggtggcggtcggaggccggggacagggatggcgtggtggtccgggaaggtgtcgctcagcggcctgcaggacatcgccggagccgtcaacaagatcagcgagagcgtgaagaacatcgagaagaacttcgacagcgcgctcggcctagaggagaagcgcgacgatgaagaagcatcaggatcgcggacatccaactctgatggaataggattcttcaatcctgtcatggctttcatgggacacaatggtgaagaagatggcactgaagtatcagaaaagccacaatttccaaaggatctgtcagtagaggaagaaaatcatagcaccccaactaagaaacagacatccgaggtagatcattcagaagtatcagtaacaacatttccagaacagccttcaaaatcagaagaagctcatagtatctccaatgagtcacctgtttctaaggcagatgtttctgagcagtccataacaccacaaactccagcacatccttcagtagcagaagaaaagcttgatggctgcactgaggcacttgcatctaaggtgggtgatgatgaagcatcagaaacatcacaatctccaggacatccttcaacagttgaagaaaaccaggaccatcaatatagtaaacattcttgtcctagtgatgaagcagagccaaatcagcttagagagtctgctggagacttacctgatggtagtgcattttcttcgcctatcaaaatagataaatcaggtgacaccgaaacaggtgaatctattgatacaggaaaggaagacacatctgatgggaatgcctctcagtcacaaccagcagaatccatgctagctagttccgataatataactgaagttgaggacaagattgctcaagaatacaatgtcccaaaagaacttagtagcccacaggagaattgcgatacagtagacaaagttactcgtcttgaagtcaaattacatgatggcaatattgataccaaaaaaagtgaggaagaaagcaataagatggaggcaggggaagtatctgttgttgtacaggaggataatgtaatggagcaacctgaagatttaatgtcaaagtccataactgcagctcatgattcacattcgcagaatgagtcagtggtcagtttgaccgatgtacctgctggactagggggagtaggccccgcagataattttacagaagaagaaaagattgctagaatcacagattttcagattgtggactctgttgtttctgttggtgagctagagaaattaagacgtgaaatgaagatgatggaagctgcattgcaaggtgctgcaagacagtcacagtccaaagctgatgaaattgcaaggttgatgaatgagaatgaacaactaaaatcaacgatcgatgatctcaagagtaagtcttctgaagccgaaatggatgcacttaaagatgaatatcaccaaagagtagcaactcttgaaaggaaggtgtatgcattaaccaaagagcgtgatacactaaggagagaacagaataaaaaaagtgacgcagctgcccttttgaaagaaaaggatgagatcatcaatcaggtcatggctgaaggtgaagaactatccaaaaaacaagctgcccaagaagctacaatacgaaaactgagagcacagattcgtgagtttgaagaagagaaacaacgtctgaactcaaagatccaggttgaggaggctaaggtcgaaagcattaagagagacaagatggcaaccgagaagttgcttcaagaaacaatagaaagaaatcagactgaacttgcagctcagaaggagttctacaccaatgctcttaatgcagctaaagaggctgaggcattggctgaagcaagagtcaacagcgaagccaaagttgaactggagaaccttttaagagaagctggcgaaaaagaaaatatgctgattaagacaatcgaggagttgaggctttctctcacccgacaagaacaagagttatatgcttcaataggaacgac

SEQ ID NO: 60236 - DNA, 3921 bp, Zea Mays
gacagatcgatccgtccgtcctccgtcgtgttcgttcaggccgagcgagatccactgctgactgctcactgcaccgaaccgagagagcgtggcaggcaggcgggcggccgatcaccgacgccgacgcggcgtccacacgcgccaacggccgaacgcactctctcccacccctccgtcgtgctccacggcccaacccaaccctacgcactcctcccccctccccccccgcagctacatctcccctcccgcttcgccagtcgccaccgcgcggcgggagctcgctgaagagcttcccccctctccccccaggcccgcggcggcgccggctcggcccccgtcatcgcgctatcgtaggctcgcgggctcagctgatctggtcagcgaggcgaggttgccggggggccagattccgctcccgcccgcgcgtggtctggggtgtgggcggtggatcggctgcgcgggtcattagatctatgcccgagatctaaggcgccagcgccaggtgcggaggcggaggccgtgagccggtggcggtcggaggccggggacagggatggcgtggtggtccgggaaggtgtcgctcagcggcctgcaggacatcgccggagccgtcaacaagatcagcgagagcgtgaagaacatcgagaagaacttcgacagcgcgctcggcctagaggagaagcgcgacgatgaagaagcatcaggatcgcggacatccaactctgatggaataggattcttcaatcctgtcatggctttcatgggacacaatggtgaagaagatggcactgaagtatcagaaaagccacaatttccaaaggatctgtcagtagaggaagaaaatcatagcaccccaactaagaaacagacatccgaggtagatcattcagaagtatcagtaacaacatttccagaacagccttcaaaatcagaagaagctcatagtatctccaatgagtcacctgtttctaaggcagatgtttctgagcagtccataacaccacaaactccagcacatccttcagtagcagaagaaaagcttgatggctgcactgaggcacttgcatctaaggtgggtgatgatgaagcatcagaaacatcacaatctccaggacatccttcaacagttgaagaaaaccaggaccatcaatatagtaaacattcttgtcctagtgatgaagcagagccaaatcagcttagagagtctgctggagacttacctgatggtagtgcattttcttcgcctatcaaaatagataaatcaggtgacaccgaaacaggtgaatctattgatacaggaaaggaagacacatctgatgggaatgcctctcagtcacaaccagcagaatccatgctagctagttccgataatataactgaagttgaggacaagattgctcaagaatacaatgtcccaaaagaacttagtagcccacaggagaattgcgatacagtagacaaagttactcgtcttgaagtcaaattacatgatggcaatattgataccaaaaaaagtgaggaagaaagcaataagatggaggcaggggaagtatctgttgttgtacaggaggataatgtaatggagcaacctgaagatttaatgtcaaagtccataactgcagctcatgattcacattcgcagaatgagtcagtggtcagtttgaccgatgtacctgctggactagggggagtaggccccgcagataattttacagaagaagaaaagattgctagaatcacagattttcagattgtggactctgttgtttctgttggtgagctagagaaattaagacgtgaaatgaagatgatggaagctgcattgcaaggtgctgcaagacagtcacagtccaaagctgatgaaattgcaaggttgatgaatgagaatgaacaactaaaatcaacgatcgatgatctcaagagtaagtcttctgaagccgaaatggatgcacttaaagatgaatatcaccaaagagtagcaactcttgaaaggaaggtgtatgcattaaccaaagagcgtgatacactaaggagagaacagaataaaaaaagtgacgcagctgcccttttgaaagaaaaggatgagatcatcaatcaggtcatggctgaaggtgaagaactatccaaaaaacaagctgcccaagaagctacaatacgaaaactgagagcacagattcgtgagtttgaagaagagaaacaacgtctgaactcaaagatccaggttgaggaggctaaggtcgaaagcattaagagagacaagatggcaaccgagaagttgcttcaagaaacaatagaaagaaatcagactgaacttgcagctcagaaggagttctacaccaatgctcttaatgcagctaaagaggctgaggcattggctgaagcaagagtcaacagcgaagccaaagttgaactggagaaccttttaagagaagctggcgaaaaagaaaatatgctgattaagacaatcgaggagttgaggctttctctcacccgacaagaacaagaggctgctttcagggaagaaagactaaaaagggactatgacgatcttcaaaagcggtatcaagctagtgaacttcgttataatgaactggtgacacaagttcccgagtctaccagacccctcctaaggcaaattgaagccatgcaggagacatctgctcaaagggaagaagcttgggctggcgtggagagaaccttaaactctcgccttcaggaagcagaagctaaagctgctgcttcagaagaaaaggagcggtctgtaaatgaacgactgtcgcaaagtttatcccgcataactgttcttgagacccagattacaattcttaggacagagcaaacacagctgagccgatctcttgaaaaggagaggcagagagcatctgaaagtagacaggagtacctagcaattaaagaggaggcagcaatgcaagaagggcgggctaagcagctcgaagaagagataaaggatcttagagttaagcacaaggaggagctgcaagaagcagcagaacacagggaacttcttgagaaggaccttgaaagggaaaaggctgccagggcagaaattgagaaaacatcttcccgtgaagcgcctaaagtcccacttcccgatcagacaagaaatgcccctctcagaaagctgcctagttctggcagtataaatagtctagaagaaagccatttccttcaggcttcgttggatttatctgacaatgcttcattagagaggcgaatgtcttcagaaagtaatatgtcatattatctgaggaccatgactccaagtgcttttgagtcagcacttcgtcaaaaggatggagagcttgcttcttacatgtctcgcttggcctcattggaatctattcggaattcactggcagaggagttggtgaaactgacagaacaatgtgaaaagttacggactgaagccgctgctgtgcctggcttaagggctgaattggaagctctgaaacaaaggcacttccaagctctagagttaatgggggaacgtgatgaagagttggaggagctaagaaatgatattgttgacctaaaagagatgtacagggagcaggtggatcttcttgttagccaggcattgggtgctcgtgtatagtgccggtatggatttgtcgtgccatcgggcaaggcaagacaggtctgagacttgagcatgttttcctttttattttgtaaccgtacaacggcactgaaaatattcgtctgtacacatcaaaaacaccttcggcgttgggtttaggaggatacgttgttgtatactagatcaagtagtttcacagttttacgtgcattcttttttatctgtgttcattgaaatgtatcaaatttgaatccatttgcatgtgtacctcagaggaatgcaatcaatcaataatatcgagagctctttttatgtcctaa

SEQ ID NO: 60237 - DNA, 3927 bp, Zea Mays
gacagatcgatccgtccgtcctccgtcgtgttcgttcaggccgagcgagatccactgctgactgctcactgcaccgaaccgagagagcgtggcaggcaggcgggcggccgatcaccgacgccgacgcggcgtccacacgcgccaacggccgaacgcactctctcccacccctccgtcgtgctccacggcccaacccaaccctacgcactcctcccccctccccccccgcagctacatctcccctcccgcttcgccagtcgccaccgcgcggcgggagctcgctgaagagcttcccccctctccccccaggcccgcggcggcgccggctcggcccccgtcatcgcgctatcgtaggctcgcgggctcagctgatctggtcagcgaggcgaggttgccggggggccagattccgctcccgcccgcgcgtggtctggggtgtgggcggtggatcggctgcgcgggtcattagatctatgcccgagatctaaggcgccagcgccaggtgcggaggcggaggccgtgagccggtggcggtcggaggccggggacagggatggcgtggtggtccgggaaggtgtcgctcagcggcctgcaggacatcgccggagccgtcaacaagatcagcgagagcgtgaagaacatcgagaagaacttcgacagcgcgctcggcctagaggagaagcgcgacgatgaagaagcatcaggatcgcggacatccaactctgatggaataggattcttcaatcctgtcatggctttcatgggacacaatggtgaagaagatggcactgaagtatcagaaaagccacaatttccaaaggatctgtcagtagaggaagaaaatcatagcaccccaactaagaaacagacatccgaggtagatcattcagaagtatcagtaacaacatttccagaacagccttcaaaatcagaagaagctcatagtatctccaatgagtcacctgtttctaaggcagatgtttctgagcagtccataacaccacaaactccagcacatccttcagtagcagaagaaaagcttgatggctgcactgaggcacttgcatctaaggtgggtgatgatgaagcatcagaaacatcacaatctccaggacatccttcaacagttgaagaaaaccaggaccatcaatatagtaaacattcttgtcctagtgatgaagcagagccaaatcagcttagagagtctgctggagacttacctgatggtagtgcattttcttcgcctatcaaaatagataaatcaggtgacaccgaaacaggtgaatctattgatacaggaaaggaagacacatctgatgggaatgcctctcagtcacaaccagcagaatccatgctagctagttccgataatataactgaagttgaggacaagattgctcaagaatacaatgtcccaaaagaacttagtagcccacaggagaattgcgatacagtagacaaagttactcgtcttgaagtcaaattacatgatggcaatattgataccaaaaaaagtgaggaagaaagcaataagatggaggcaggggaagtatctgttgttgtacaggaggataatgtaatggagcaacctgaagatttaatgtcaaagtccataactgcagctcatgattcacattcgcagaatgagtcagtggtcagtttgaccgatgtacctgctggactagggggagtaggccccgcagataattttacagaagaagaaaagattgctagaatcacagattttcagattgtggactctgttgtttctgttggtgagctagagaaattaagacgtgaaatgaagatgatggaagctgcattgcaaggtgctgcaagacagtcacagtccaaagctgatgaaattgcaaggttgatgaatgagaatgaacaactaaaatcaacgatcgatgatctcaagagtaagtcttctgaagccgaaatggatgcacttaaagatgaatatcaccaaagagtagcaactcttgaaaggaaggtgtatgcattaaccaaagagcgtgatacactaaggagagaacagaataaaaaaagtgacgcagctgcccttttgaaagaaaaggatgagatcatcaatcaggtcatggctgaaggtgaagaactatccaaaaaacaagctgcccaagaagctacaatacgaaaactgagagcacagattcgtgagtttgaagaagagaaacaacgtctgaactcaaagatccaggttgaggaggctaaggtcgaaagcattaagagagacaagatggcaaccgagaagttgcttcaagaaacaatagaaagaaatcagactgaacttgcagctcagaaggagttctacaccaatgctcttaatgcagctaaagaggctgaggcattggctgaagcaagagtcaacagcgaagccaaagttgaactggagaaccttttaagagaagctggcgaaaaagaaaatatgctgattaagacaatcgaggagttgaggctttctctcacccgacaagaacaagaggctgctttcagggaagaaagactaaaaagggactatgacgatcttcaaaagcggtatcaagctagtgaacttcgttataatgaactggtgacacaagttcccgagtctaccagacccctcctaaggcaaattgaagccatgcaggagacatctgctcaaagggaagaagcttgggctggcgtggagagaaccttaaactctcgccttcaggaagcagaagctaaagctgctgcttcagaagaaaaggagcggtctgtaaatgaacgactgtcgcaaagtttatcccgcataactgttcttgagacccagattacaattcttaggacagagcaaacacagctgagccgatctcttgaaaaggagaggcagagagcatctgaaagtagacaggagtacctagcaattaaagaggaggcagcaatgcaagaagggcgggctaagcagctcgaagaagagataaaggatcttagagttaagcacaaggaggagctgcaagaagcagcagaacacagggaacttcttgagaaggaccttgaaagggaaaaggctgccagggcagaaattgagaaaacatcttcccgtgaagcgcctaaagtcccacttcccgatcagacaagaaatgcccctctcagaaagctgcctagttctggcagtataaatagtctagaagaaagccatttccttcaggcttcgttggatttatctgacaatgcttcattagagaggcgaatgtcttcagaaagtaatatgtcatattatctgaggaccatgactccaagtgcttttgagtcagcacttcgtcaaaaggatggagagcttgcttcttacatgtctcgcttggcctcattggaatctattcggaattcactggcagaggagttggtgaaactgacagaacaatgtgaaaagttacggactgaagccgctgctgtgcctggcttaagggctgaattggaagctctgaaacaaaggcacttccaagctctagagttaatgggggaacgtgatgaagagttggaggagctaagaaatgatattgttgacctaaaagagatgtacagggagcaggtggatcttcttgttagccagctccaggcattgggtgctcgtgtatagtgccggtatggatttgtcgtgccatcgggcaaggcaagacaggtctgagacttgagcatgttttcctttttattttgtaaccgtacaacggcactgaaaatattcgtctgtacacatcaaaaacaccttcggcgttgggtttaggaggatacgttgttgtatactagatcaagtagtttcacagttttacgtgcattcttttttatctgtgttcattgaaatgtatcaaatttgaatccatttgcatgtgtacctcagaggaatgcaatcaatcaataatatcgagagctctttttatgtcctaa

SEQ ID NO: 60238 - DNA, 2056 bp, Zea Mays
ccctcgtgtgctttcactctcactcacactctgtttctctctctctcgtggagacgactgggcgaccgccggcgccgacctacgccaggtgcccaagccttcgacgggaccatcgccgacgacgagcactcacgagtcagaaatgtcttcagtcgggagcggcagtggcaccagggctgcgaatggtgcagctgccatcagtgctgccgcgacggcagcaggctcggccgacgccagattccacccccaactactacagcagcaggacaggcaaagtagatgggctggctgcttttcaggcttatcatgtttcggatcgcagaagggcgggaaaagaattgttcctgcagcacgtacttctgatgggaatggatcaaatgctcgcggaaatggtctccagtctggtgccaattcaaaccaaaatatgcctatgaatttatctcttctggctccaccatcatcaccggcatccttctcaaactctgcacttccttcgactgctcaatcgccaaattgctttctgtctgtatccgcaaactctcctggtggcccaacgtctaatatgttcgccgttgggccatatgctaatgaacctcaacttgtctcaccacctgtcttctcaacttacacaactgagccatccacagcaccgttgaccccaccacctgaactagcccatgcaactacaccttcttctccagatgttccatatgctagatttctttcttcttctatggatatcaaaactgctagcaaggagcataacatgcctttcttatcaacaacctattctggtggttcaggactccaagcatcctacccactttaccctgaaagcccttgtagcagcctcatctcaccggcttcagtaactccgaggactggtctatcctcacctatacctgagcaagaggttcctcctgcccattggaagacctctaggtccgcgtgcgacacaccatatttcagggcttcgcccattcctgagcaagaaaccactgcacaatggaagacctctagatctgcttgtgacacaccgtatgccaggacctcaccaaccaatatttttggtctggattcaaataccccgagaaactatatgctagatagcaatttctttcggccagcggcatctgctcagttctacctggaccaggctcagcaggcatttccacataatggcgggagggttagcgtatccagggagaagcaagatgccgatgaaatcgaagcttaccgagcttcatttgggtttagtgccgatgaaattgtccaatctcaatcttatgttgggataccagatgcggttgacgagtcattcagtatatcaccatttggaaacaatgctcctgctactgagatctgcccattcagtgatctgcctagtgaggttcagaaggcggataaatcatgcacctacgttaaagatggcacgagcccaaagaaatcagcaaaccaactctcgattgattctccaaataaagttctgcgcttggacgtgttcaaagtaacaaaagggggtcatctgtctgaggacgagggtattgcgagagatggtcatcctttcagaaggacaacggatgaaatatctctaaaaccgatagaggtaaggaagaaatctcctcctggccattcttgctcagacgcagagattgagtacagaaggacaaggagtctgagggatgccaacggtgttttatcgcggcgtagcgcattggcaagacaactgcactaataagtcactagtatgcatggcaatttcatagttcatgtagagcagtgtgtgcattgaatttgagctgtcattagagtgatctgtaggcgaagagtagcctttatcgtatatgaggattatattatcagattgtgtgttctgggtatgtgatgatgagctttgtactctgtttgaactccaagatcctctttgtagacacctgcagtctttcccaggagcagtgaaatgaaatatcgttggcaaattacaggaactgtgttctggtcttcctgaatcctgatgatgtaggctgcgtttgaattctgcagcatgttgattggg

SEQ ID NO: 60239 - DNA, 2646 bp, Zea Mays
cactctcactcacactctgtttctctctctctcgtggagacgactgggcgaccgccggcgccgacctacgccaggtgcccaagccttcgacgggaccatcgccgacgacgagcactcacgagctggatctgatctaattacagtcagaaatgtcttcagtcgggagcggcagtggcaccagggctgcgaatggtgcagctgccatcagtgctgccgcgacggcagcaggctcggccgacgccagattccacccccaactactacagcagcaggacagggtacatacactacacgacttgttgttccataggcggatgcaatcggacttgtgctttagctgcagcttttgccctgcatgctttagatatgtggacggcaggatcagtaccggaattttagtaggccttgagtccttgacgacctagattggccatttggcccagcctttgcttactcagtacgaattgtactgctctgcagtggttacagtttcaaactgggcatctttaccagcaataatttggcttcagtactatatatatgcttggttacttcgatccaataatttgttcagttcgattttgccgataatccttgctttatgataaaatattttttccatgtgaatacctttgatttttttgcgaaacactaacacttcttgtgttctattgcacgattgccttttatgcctatcgttatgtagtttttctccgcataatgatagtggattttttttttgtatacaaagtgtagtttactgtttctttaaaattctgttgtcatgcattttctttttatttctgcggtgacagctaagttatttgtttggacttacatgtgcttctctactctaaacagcaaagtagatgggctggctgcttttcaggcttatcatgtttcggatcgcagaagggcgggaaaagaattgttcctgcagcacgtacttctgatgggaatggatcaaatgctcgcggaaatggtctccagtctggtgccaattcaaaccaaaatatgcctatgaatttatctcttctggctccaccatcatcaccggcatccttctcaaactctgcacttccttcgactgctcaatcgccaaattgctttctgtctgtatccgcaaactctcctggtggcccaacgtctaatatgttcgccgttgggccatatgctaatgaacctcaacttgtctcaccacctgtcttctcaacttacacaactgagccatccacagcaccgttgaccccaccacctgaactagcccatgcaactacaccttcttctccagatgttccatatgctagatttctttcttcttctatggatatcaaaactgctagcaaggagcataacatgcctttcttatcaacaacctattctggtggttcaggactccaagcatcctacccactttaccctgaaagcccttgtagcagcctcatctcaccggcttcagtaactccgaggactggtctatcctcacctatacctgagcaagaggttcctcctgcccattggaagacctctaggtccgcgtgcgacacaccatatttcagggcttcgcccattcctgagcaagaaaccactgcacaatggaagacctctagatctgcttgtgacacaccgtatgccaggacctcaccaaccaatatttttggtctggattcaaataccccgagaaactatatgctagatagcaatttctttcggccagcggcatctgctcagttctacctggaccaggctcagcaggcatttccacataatggcgggagggttagcgtatccagggagaagcaagatgccgatgaaatcgaagcttaccgagcttcatttgggtttagtgccgatgaaattgtccaatctcaatcttatgttgggataccagatgcggttgacgagtcattcagtatatcaccatttggaaacaatgctcctgctactgagatctgcccattcagtgatctgcctagtgaggttcagaaggcggataaatcatgcacctacgttaaagatggcacgagcccaaagaaatcagcaaaccaactctcgattgattctccaaataaagttctgcgcttggacgtgttcaaagtaacaaaagggggtcatctgtctgaggacgagggtattgcgagagatggtcatcctttcagaaggacaacggatgaaatatctctaaaaccgatagaggtaaggaagaaatctcctcctggccattcttgctcagacgcagagattgagtacagaaggacaaggagtctgagggatgccaacggtgttttatcgcggcgtagcgcattggcaagacaactgcactaataagtcactagtatgcatggcaatttcatagttcatgtagagcagtgtgtgcattgaatttgagctgtcattagagtgatctgtaggcgaagagtagcctttatcgtatatgaggattatattatcagattgtgtgttctgggtatgtgatgatgagctttgtactctgtttgaactccaagatcctctttgtagacacctgcagtctttcccaggagcagtgaaatgaaatatcgttggcaaattacaggaactgtgttctggtcttcctgaatcctgatgatgtaggctgcgtttgaattctgcagcatgttgattggg

SEQ ID NO: 60240 - DNA, 2014 bp, Zea Mays
cactctcactcacactctgtttctctctctctcgtggagacgactgggcgaccgccggcgccgacctacgccaggtgcccaagccttcgacgggaccatcgccgacgacgagcactcacgagtcagaaatgtcttcagtcgggagcggcagtggcaccagggctgcgaatggtgcagctgccatcagtgctgccgcgacggcagcaggctcggccgacgccagattccacccccaactactacagcagcaggacagggcttatcatgtttcggatcgcagaagggcgggaaaagaattgttcctgcagcacgtacttctgatgggaatggatcaaatgctcgcggaaatggtctccagtctggtgccaattcaaaccaaaatatgcctatgaatttatctcttctggctccaccatcatcaccggcatccttctcaaactctgcacttccttcgactgctcaatcgccaaattgctttctgtctgtatccgcaaactctcctggtggcccaacgtctaatatgttcgccgttgggccatatgctaatgaacctcaacttgtctcaccacctgtcttctcaacttacacaactgagccatccacagcaccgttgaccccaccacctgaactagcccatgcaactacaccttcttctccagatgttccatatgctagatttctttcttcttctatggatatcaaaactgctagcaaggagcataacatgcctttcttatcaacaacctattctggtggttcaggactccaagcatcctacccactttaccctgaaagcccttgtagcagcctcatctcaccggcttcagtaactccgaggactggtctatcctcacctatacctgagcaagaggttcctcctgcccattggaagacctctaggtccgcgtgcgacacaccatatttcagggcttcgcccattcctgagcaagaaaccactgcacaatggaagacctctagatctgcttgtgacacaccgtatgccaggacctcaccaaccaatatttttggtctggattcaaataccccgagaaactatatgctagatagcaatttctttcggccagcggcatctgctcagttctacctggaccaggctcagcaggcatttccacataatggcgggagggttagcgtatccagggagaagcaagatgccgatgaaatcgaagcttaccgagcttcatttgggtttagtgccgatgaaattgtccaatctcaatcttatgttgggataccagatgcggttgacgagtcattcagtatatcaccatttggaaacaatgctcctgctactgagatctgcccattcagtgatctgcctagtgaggttcagaaggcggataaatcatgcacctacgttaaagatggcacgagcccaaagaaatcagcaaaccaactctcgattgattctccaaataaagttctgcgcttggacgtgttcaaagtaacaaaagggggtcatctgtctgaggacgagggtattgcgagagatggtcatcctttcagaaggacaacggatgaaatatctctaaaaccgatagaggtaaggaagaaatctcctcctggccattcttgctcagacgcagagattgagtacagaaggacaaggagtctgagggatgccaacggtgttttatcgcggcgtagcgcattggcaagacaactgcactaataagtcactagtatgcatggcaatttcatagttcatgtagagcagtgtgtgcattgaatttgagctgtcattagagtgatctgtaggcgaagagtagcctttatcgtatatgaggattatattatcagattgtgtgttctgggtatgtgatgatgagctttgtactctgtttgaactccaagatcctctttgtagacacctgcagtctttcccaggagcagtgaaatgaaatatcgttggcaaattacaggaactgtgttctggtcttcctgaatcctgatgatgtaggctgcgtttgaattctgcagcatgttgattggg

SEQ ID NO: 60241 - DNA, 2665 bp, Zea Mays
cttatctctcccctctatctcctctttcggcgcctaaactcaagccgaccgacggcgaccacctcagcagtcacccgcgatcccacgctctgcccccacctgacacaccctcgcccgcgcgcctcccgtgccccgaggccacgtgaattccccgccctgcccctaccgcccagcatccccagggggcatgccagtaatttccttccgccaccgtgtgccgtccggtctccggaccccggtgggctgtatcctcgcctgacctgcccgcctgcgctacgacgctgcaggccgggctctcgctcgtcgcgtttttatctccacccacctctctctctccgaaaccaaaaccgaccggcctcgctttcgccggttacccggtcaaacgcatcaaccgccggcacgtctccgatcggatcacgatggctgccccgtgcccccgccggtcaggccaggtcgcgtggtcacgtgcgacgcgcatgccgtcctcggccggcgccccagccccctcgccgtgtccttttattctcccccgcctcaccgcccgcatccccaattcacgcccccaccacgacttccgtgctcgccgccttctcggactaggggggttcggctcgagatctgatttcgggcgccggaggactacatggaggttagggagatggcgatggccgcggcggctgcggctgcggcgtccggcgggggaggcgtcaagctgccgccgcccaatcccaacctgccctacagggaggactgctggagcgacggcgagacggcagctctcgtctccgcctggggcagccgctacgtcgagctcaaccgcggtaacctgcgccagaagcagtggcaggaggtggcggacgccgtcaactcgcgccggggagcctccgcgcggcgccgcccgccgcgcaccgacatccagtgcaagaaccgcgtcgataccctcaagaagaagtacaaggccgagctcgcccgcaacgcgccgtccgcctggtcctacttccccgagctcgaccgcctcgtcggcccaaccctcagcgcctccgcctccaagagacccttggcgtctctgcctcctcaattcgctttgcccatgcatccaccagccgtgcggaggcccccgtcgccttcgccgtcatcgtcctccccgccgcagccgcctatggctttgcctctacccaattaccgccgtgggtccccgctccctgctgctgccctcatccagaaggaagccgcggctgctgcggctgctgcgtctgattcagaggactccgatgatgcggctggcggcaataatcacaaattgccccggtcgccttcgcgctcggtgtcgtcactctctgccagtaacaagaagcgctgcagagatgaggctggcagcagtgctgacaaaggtttcagagagttagcaagggcgatcgaagcttttgcggagatgtatgagcgtgtggagagtgctaagcaaaagcatgtggtggagatggagcgccagcgaattgaattcctgaagcaactggaggtgaaacgcatggagaatttcgttgatgcccatgtgaagctggctagagcaaagcgcacgaagaagactacagggggtgctgccgacggtgctggtggtatggagttggttgccaccgttgctgcgctgcctttcgtctccacctccaccttcctctgatattgaggaagagtttagagaaagagggagcaaaaaatggtggtccaaggaagcaagctaatccgaaagatagcaagtgaagcgtttggccgggcgtttgggtggtgcgaatttctgggtgatcaaaactggaatgtggattctgcagttggagatagcctttcttttagttgatgacttgaatctgtgccttttgttttcgcctgtctgtcgtgatctggttgtaaataagaaagtcttatgccgctagtcgcaggtcgaactttatcttctatcctaggccctctacttatctaggttgatagtgtaaggtgtctagatagagatctgacctaattgctattctgtcggatcgtttgatcgcgatggatgtcgttgttctgaaactttcctatttcctaatgaaatagggggcttcgccccttcgtcaattttttttgggatggatggactagttggtaaagtacttgcacatgtgttctaaactgttgatataaaaaagggctgtcaagggcacggtgatcccaagtagctggccctcgactgcggagctcgtagtcggcggccgattcctccaaggcggaggttatgcccctcacgtataggtgtatatttgggccgggcctaatgggccggctcgaagcacggaaaaaaacacggtctaggcacggcacgacacgaaatattttagtgccgggccgacacggcccgatatatcggcccgggtttgggccgaggtcgcggcccatgggcgggcacgacccgtttaaggcaggcacgaaatggcccatatagaggcacgaaaagactcatatatttattaaaatcacacttcattccacactttcatgtatttgataaagaacacaaagctagagataatgttagttagatgttttttatagctttgaattagagtatgtgatgtaattttatttttgttacgaacattagataatgaactgaacttacgaactttatatagagctg

SEQ ID NO: 60242 - DNA, 965 bp, Zea Mays
atcggcccattcgtgtccatgtccatccatgcccagcggcccattcgacctccctcgacccaccccctcgtctcgtctcgtctcgtctcgtccacctccccagcggcgcgtgcgcgtgaagcttgaggcaatccccgctccgtctagcggccctgcgcaatcagtcagggttccatggccaacagcaacctcccgcgccgaatcatcaaggagacgcagcggctcctcagcgaaccagcgccggggattagcgcgtcgccgtcggaagagaacatgcggtacttcaatgtcatgatccttggccccgcacagtcaccctatgaaggtggagttttcaagcttgagctattcttgcctgaggaatatccaatggctgccccgaaagttaggtttctcaccaaaatttaccatccgaacattgacaaggatatgcctcgacattcttaaggacaaatggagtcccgctcttcagatacgtacagttctgctcagcattcaggcacttctgagtgccccaaatccagatgatcctctctcagacaacattgcgaaacactggaaatcaaatgaagctgaagcttttgagacagcgaaggagtggactcgcctgtatgcaagtggggcattgtaaccaagtgttgtttcagatgtgatgttataacatttccatagtttggggccgactgaatacccctcttgcttgatgagagcaaatttgtgaaatgttgcaatggggtcaaaaaaaattgtctaatcgtgctttgtacttgtggctgtacctcctcgctgcagtgcccgtgagcatcaaagcaggtgttcctttgtatacccctatctgaccatcagttgcatgtgtttcttgtgctgtgctctgaggattcagatttatgctgccggaacgttgccggattgttcttagtttgcttctttactcgagagcgctgaaactgcctaggctacctcgg

SEQ ID NO: 60243 - DNA, 780 bp, Zea Mays
gtccgcctcgcgttctggagacgcagcggctcctcagcgaaccagcgccggggattagcgcgtcgccgtcggaagagaacatgcggtacttcaatgtcatgatccttggccccgcacagtcaccctatgaaggtggagttttcaagcttgagctattcttgcctgaggaatatccaatggctgccccgaaagttaggtttctcaccaaaatttaccatccgaacattgacaagcttggtaggatatgcctcgacattcttaaggacaaatggagtcccgctcttcagatacgtacagttctgctcagcattcaggcacttctgagtgccccaaatccagatgatcctctctcagacaacattgcgaaacactggaaatcaaatgaagctgaagcttttgagacagcgaaggagtggactcgcctgtatgcaagtggggcattgtaaccaagtgttgtttcagatgtgatgttataacatttccatagtttggggccgactgaatacccctcttgcttgatgagagcaaatttgtgaaatgttgcaatggggtcaaaaaaaattgtctaatcgtgctttgtacttgtggctgtacctcctcgctgcagtgcccgtgagcatcaaagcaggtgttcctttgtatacccctatctgaccatcagttgcatgtgtttcttgtgctgtgctctgaggattcagatttatgctgccggaacgttgccggattgttcttagtttgcttctttactcgagagcgctgaaactgcctaggctacctcgg

SEQ ID NO: 60244 - DNA, 257 bp, Zea Mays
ttataggctacctgtctcttcctgtcttccatacttgcaagttaggtttctcaccaaaatttaccatccgaacattgacaagcttggtaggatatgcctcgacattcttaaggacaaatggagtcccgctcttcagatacgtacagttctgctcaggcacttctgagtgccccaaatccagatgatcctctctcagacaacattgcgaaacactggaaatcaaatgaagctgaagcttttgagacagtctcttgcag

SEQ ID NO: 60245 - DNA, 618 bp, Zea Mays
caatgagacagctctcgccactgcaccaggttaggtttctcaccaaaatttaccatccgaacattgacaagcttggtaggatatgcctcgacattcttaaggacaaatggagtcccgctcttcagatacgtacagttctgctcagcattcaggcacttctgagtgccccaaatccagatgatcctctctcagacaacattgcgaaacactggaaatcaaatgaagctgaagcttttgagacagcgaaggagtggactcgcctgtatgcaagtggggcattgtaaccaagtgttgtttcagatgtgatgttataacatttccatagtttggggccgactgaatacccctcttgcttgatgagagcaaatttgtgaaatgttgcaatggggtcaaaaaaaattgtctaatcgtgctttgtacttgtggctgtacctcctcgctgcagtgcccgtgagcatcaaagcaggtgttcctttgtatacccctatctgaccatcagttgcatgtgtttcttgtgctgtgctctgaggattcagatttatgctgccggaacgttgccggattgttcttagtttgcttctttactcgagagcgctgaaactgcctaggctacctcgg

SEQ ID NO: 60246 - DNA, 2969 bp, Zea Mays
tcggttagcttttactcatcttttctcttgccttctactcctcgcccacgcctcctcctccctccctcccgtcgtcgcttcgcttcgcttcccttcccttcttcccttgcgaatcctctgaccaccgcagagccacccccggaggaaacgaaccgtagcgcagccgccgatcaccatggcgtccccggcacggcccgccgccgcatccgtctccgccgccttcggcctctcgcccgaccccaaacgctgctccttcgaccaggcgctccggcacaagactgttgatgtcatttgttaattaccacgatcaagaaaaggtctctaaagaaatcgtaacagacgctatagaaagctgcatgaagaaacaggcagataacttgttgaattcgctggaagttatcagtggtaggctgtcgcaattggagctgtattgctataagctggaaaggtccattggagaattacgaagtgacgtgatggattatcataacgaagcaaatctcaacttccagtgccttgataagcaattgaaagaggttcagaaatctgtgcaggtcgttcaggaaaggcaggagcttgctgaaactcagaaagaaatgaccaaacttcagatagtacatgaggattccgcacaaaagagtgaacgtagtgctccatcagttttcataaatagggaaaatgagattgcccttgtgccattgcaccaagtaaattctgtccagtctcctgctgtgcaattccaaagttgcagtggccttattctacagcaactggtgccagtccaagaccagcagcgctcaaaccaaactgccatgtactgcatgcgaggccaaagtcatctggagcacagacaggcccaaatgttccaagctgctgctcaacctgtgcagacacacactactaggaaaactcaggcacatacagtacttgaggtacctcaggtaaccaccagacagacaccagagttctacgctcaaccgcagcatcaatggcaacatcaaacaggtcagcagcttcagtcccaggtaaggcaaccacaaccacaggtggttcaacaacagcagcagtacaacaatatccagcaaggtccagcacagatggtccagccgcaaacatcctctccacatgctcatagcacgccacagatcacactagtatatcctccatacggagctcatcagtctgcatgtggtaacgctgaggcacgcactgggagcattgtcgtgccaccttcgcactctacaatttcctcatcccagcggaagcatcatgaagctgctcctatttatgtacaaagcaacacagtttctgttccattgacggagcagcaccagcaacttcattcacttggcaatggctcatttgtacctcagccaagtaaagttagtccatgcggtgtagcatcatatacggtacaagggaatgcacaggcctacagccctgcttacggaagcccttccagcaatcctgctactattgttgctgtccttaatcaacaagcacattgcagtgctcccatggtgcttcatcacctgggaccatctcagtcagtgcagaaccatccgataggcattgctgataaggttgctcgaatgggttacccaaaggatcaagtagttgatggccttgcgctccgtatggtggatgcaggccagcctgcagaatgtaacaccctgcacgataggttgagctctgtcacccatgcggtggctcctcaggcatggtctggatagttaagaatgaattagtcatgagatgctcgtgtgataatgtacctcattatcgttggaaatcttcaggtatttcctctggcgtcttcttatctgccaggactacatatccaccagcttattttttgcagctggatggtcaagatgaaataagactgattagattagttgaaatgatgctggcatatgtcctgccttttaatggacatatgtgattgtaacctgtttgtgacttgcacacgcatgcttgcaatataaaaagatacgatgatttgttggttgctgctactttgctgtggtgaagtgttgagctcgttccatctgctccggcgccagttgaagtgtgggagaaagatggatgcgaagttaagttgacttgtttttgaaataaattcaattggattgcgagtttgagcggatgatattatattttttatgagagggatacccccaactctattacttgcataatagaaatacaacatgtttacagaaaggttttcagcgcataacagcatggtggccaagttcagaacccattattacatcatggtggagtacctgattgaggcatcacaaccatcagaccacaacaagtgcgacaacacatcaatcaagcatccacctagactgggcgatgaagtctacatactacagtcacaaaggggctgaaacccagagagataacaccagaaagcagtagcacacaaaacagagagacgacgttgtcgcagctggaagccaggattactccgcatcatcaactttatcattggtgcccgtgatctgccttccacttgcagcccggacaagaagtttagcaccctcctaaagatcctgcaaatctttttgctgagtcctgcccaacacaaaatcaaagcaccagcatggcaaataatcacattaggtgatttgattaagattttttcgaagctcattttgtttctggtcttccatatggcccaacaagtaacggcaattagaactacacgagtagacttgtcaattttgagatatctctgtaaccacacaatacaatgatctaagttccccaggcacataaggtgtgtcgaggcacttggccaccactccccatatcactttagcaacagagcatgtaaagaaaaggtgatcaactgtttcgacttggggacagaaactacaggaggaatccctccctgtccagtttttcttgagcaaattatctttagttaaaatggccttattgctcactaacca

SEQ ID NO: 60247 - DNA, 2971 bp, Zea Mays
tcggttagcttttactcatcttttctcttgccttctactcctcgcccacgcctcctcctccctccctcccgtcgtcgcttcgcttcgcttcccttcccttcttcccttgcgaatcctctgaccaccgcagagccacccccggaggaaacgaaccgtagcgcagccgccgatcaccatggcgtccccggcacggcccgccgccgcatccgtctccgccgccttcggcctctcgcccgaccccaaacgctgctccttcgaccaggcgctccggcacaaggagaacagactgttgatgtcatttgttaattaccacgatcaagaaaaggtctctaaagaaatcgtaacagacgctatagaaagctgcatgaagaaacaggcagataacttgttgaattcgctggaagttatcagtggtaggctgtcgcaattggagctgtattgctataagctggaaaggtccattggagaattacgaagtgacgtgatggattatcataacgaagcaaatctcaacttccagtgccttgataagcaattgaaagagaaatctgtgcaggtcgttcaggaaaggcaggagcttgctgaaactcagaaagaaatgaccaaacttcagatagtacatgaggattccgcacaaaagagtgaacgtagtgctccatcagttttcataaatagggaaaatgagattgcccttgtgccattgcaccaagtaaattctgtccagtctcctgctgtgcaattccaaagttgcagtggccttattctacagcaactggtgccagtccaagaccagcagcgctcaaaccaaactgccatgtactgcatgcgaggccaaagtcatctggagcacagacaggcccaaatgttccaagctgctgctcaacctgtgcagacacacactactaggaaaactcaggcacatacagtacttgaggtacctcaggtaaccaccagacagacaccagagttctacgctcaaccgcagcatcaatggcaacatcaaacaggtcagcagcttcagtcccaggtaaggcaaccacaaccacaggtggttcaacaacagcagcagtacaacaatatccagcaaggtccagcacagatggtccagccgcaaacatcctctccacatgctcatagcacgccacagatcacactagtatatcctccatacggagctcatcagtctgcatgtggtaacgctgaggcacgcactgggagcattgtcgtgccaccttcgcactctacaatttcctcatcccagcggaagcatcatgaagctgctcctatttatgtacaaagcaacacagtttctgttccattgacggagcagcaccagcaacttcattcacttggcaatggctcatttgtacctcagccaagtaaagttagtccatgcggtgtagcatcatatacggtacaagggaatgcacaggcctacagccctgcttacggaagcccttccagcaatcctgctactattgttgctgtccttaatcaacaagcacattgcagtgctcccatggtgcttcatcacctgggaccatctcagtcagtgcagaaccatccgataggcattgctgataaggttgctcgaatgggttacccaaaggatcaagtagttgatggccttgcgctccgtatggtggatgcaggccagcctgcagaatgtaacaccctgcacgataggttgagctctgtcacccatgcggtggctcctcaggcatggtctggatagttaagaatgaattagtcatgagatgctcgtgtgataatgtacctcattatcgttggaaatcttcaggtatttcctctggcgtcttcttatctgccaggactacatatccaccagcttattttttgcagctggatggtcaagatgaaataagactgattagattagttgaaatgatgctggcatatgtcctgccttttaatggacatatgtgattgtaacctgtttgtgacttgcacacgcatgcttgcaatataaaaagatacgatgatttgttggttgctgctactttgctgtggtgaagtgttgagctcgttccatctgctccggcgccagttgaagtgtgggagaaagatggatgcgaagttaagttgacttgtttttgaaataaattcaattggattgcgagtttgagcggatgatattatattttttatgagagggatacccccaactctattacttgcataatagaaatacaacatgtttacagaaaggttttcagcgcataacagcatggtggccaagttcagaacccattattacatcatggtggagtacctgattgaggcatcacaaccatcagaccacaacaagtgcgacaacacatcaatcaagcatccacctagactgggcgatgaagtctacatactacagtcacaaaggggctgaaacccagagagataacaccagaaagcagtagcacacaaaacagagagacgacgttgtcgcagctggaagccaggattactccgcatcatcaactttatcattggtgcccgtgatctgccttccacttgcagcccggacaagaagtttagcaccctcctaaagatcctgcaaatctttttgctgagtcctgcccaacacaaaatcaaagcaccagcatggcaaataatcacattaggtgatttgattaagattttttcgaagctcattttgtttctggtcttccatatggcccaacaagtaacggcaattagaactacacgagtagacttgtcaattttgagatatctctgtaaccacacaatacaatgatctaagttccccaggcacataaggtgtgtcgaggcacttggccaccactccccatatcactttagcaacagagcatgtaaagaaaaggtgatcaactgtttcgacttggggacagaaactacaggaggaatccctccctgtccagtttttcttgagcaaattatctttagttaaaatggccttattgctcactaacca

SEQ ID NO: 60248 - DNA, 3125 bp, Zea Mays
cctcacgcaccctgcgtcttttccggctgccgctgctggctggctggctctggctcacagctacaggctacagtgaccgccacgcaacccacactgtctctgtcctcgtctccctctcccctcctagctctagctggataggtgggctctggggaggaggaggagggtagctaggtagtagctgcctataggcctcggcccccattcatggccattaccacgatgtgtcaccccaccacaccgccctctccgatgctgcctccctcatgataaccctctccctggtggttgttctttgccttgttgccgtgcagcctccacccccaccctcctcattaatcacttgctagctccctgcctccctcccggctcccgctcccccttctcgtgcttcgcgcccccgcagcagccatggcggggatcgacctcaacgacaccgtggaggaggacgaggaggaggcggagcccggcaacgcctgctcccagcagagccggaccagctccgcggccacgttcccgccgccgccgccgaaccagccgaggccgagcgccgcggtgtgcctcgagctgtggcacgcctgcgccggccccgtcgcgccgctgccgaggaaagggagcgtcgtggtgtacctcccgcagggacacatcgagcacctcggcgacgccgcggccgccggcggaggcgcgccgccgcccgtcgccctgccgccccacgtcttctgccgcgtcgtcgacgtcactctccatgcggacgcgtccacggacgaggtgtacgcccagctcgccctcgtcgccgagaacgaggatgtcgcgaggcggctgcgcggacggtcggaggacggcagcgccgaggacggcgacgaaggggaaaccgtgaagcagcggttctcgcggatgccgcacatgttctgcaagacgctcacggcctccgacaccagcacgcacggcggcttctccgtgccacgccgcgccgccgaggactgcttcccgcctctggactacagccagcagcgaccgtcgcaggagcttgtggccaaggatttgcacggaaccgagtggaggttccgccacatttatcgagggcagccccgcagacaccttttaaccactggatggagtgcctttgtcaacaagaagaagcttgtctcaggggacgccgtactatttttgaggggtgataatggggagctaagacttggagtgcgccgtgcagctcagcttaaaaatggatctgcttttccagctctttataaccagtgcttaaatcttggttcactacctaatgttgcacatgctgtggccaccaaaagtgtgttccacatctactacaaccccagattaagccaatctgaattcattataccattttcgaagtttatcaagagcttcagtcaaccattttctgctggttcgaggttcaaagtgaaatatgagagtgatgatgcttctgaaagaagatgcacagggatcatagcaggaattggtgatgctgaccccatgtggcgtggttcgaaatggaaatgtttgatggttcgatgggatgacgatgtagattttcgtcaaccaaacaggatttctccttgggagattgagctgactagttcagtttcaggatctcacatgtctgcaccaaatgcaaagagactgaaaccatgtcttccccatgttaatccagactacctagttccaaatggaagcggtcgtcctgattttgcggaatctgcccaattccacaaggtcttgcaaggtcaagaattactgggttatagaactcatgacaatgctgctgttgcaacttctcagccatgcgaagcaacgaacatgcagtacattgatgaacgaagttgctccaacgatgcgagtaacattatcccgggggttccaagaattggtgtcagaacaccactcggaagccctaggttttcctaccgttgctcaggctttggggagtctccaagattccaaaaggtcttgcaaggtcaagaagtatttcatccctacagaggaactctggtcgatgcaagcttgagtaatagtggcttccatcagcaagatggttctcatgtgcctactcaggccagcaagtggcacgcacagctacatggatgtgcttttcgtggccaacaagcaccagctgttccatctcaatcctcatccccaccatctgtcctgatgtttcaacgaggtgatccaaagatgtccccatttgaatttgggcatttccacgtgaataagaaagaggatagacgcgcaatgtttgtccatgctggaggcatcggaggaactgagcaaacgacgatgctccaggctcatcatgtttctggaggaacgggaaacagagatgtgaccgttgagaaatctcatcccgctgttgccgctgcttcagacaacagggaagttagcaaaaacagttgcaaaatatttggcatatctttgaccgagaaggttccagcaatgaaagaaaagggctgtggtgacatcaacaccaactatccatcccccttcctgtctttgaagcaacaagtgccgaaatcgctgggcaacagctgtgccaccggtgattgacgtttcaacagtggatatgatgatctgatgtattggaaaactgtcctggaggctgtgttgcgtagtgtggacagtgtcggtttgatggttcggtatcgtgaagacgggatttgattgaggatctggccagatttgtatcctagttgtagctgttagagcactttgtatgacaaccgtgagtgctccgtgttatcagcactagttgctgctcacaacttgcctctatgttcataatctgtatgccatgtcagacccatttatagagggtttgtttgcttggcatagttctagacttaaagcattattatgagaacaaatttgctctgcaccgtatctttcttactttcaagttggcaacggattaacggtggaggagatgatctgagaggttagttgtgcgacgtattaatggtgttacatatattatgcttaggagcattctgccagctcatttatcatatacatgtcagcacttgatttgttaagtgtagttagtagccttgcactttggattggagctatcctcttagggtgtgtttggttggagagttaaataaaat

SEQ ID NO: 60249 - DNA, 3078 bp, Zea Mays
ccgctgctggctggctggctctggctcacagctacaggctacagtgaccgccacgcaacccacactgtctctgtcctcgtctccctctcccctcctagctctagctggataggtgggctctggggaggaggaggagggtagctaggtagtagctgcctataggcctcggcccccattcatggccattaccacgatgtgtcaccccaccacaccgccctctccgatgctgcctccctcatgataaccctctccctggtggttgttctttgccttgttgccgtgcagcctccacccccaccctcctcattaatcacttgctagctccctgcctccctcccggctcccgctcccccttctcgtgcttcgcgcccccgcagcagccatggcggggatcgacctcaacgacaccgtggaggaggacgaggaggaggcggagcccggcaacgcctgctcccagcagagccggaccagctccgcggccacgttcccgccgccgccgccgaaccagccgaggccgagcgccgcggtgtgcctcgagctgtggcacgcctgcgccggccccgtcgcgccgctgccgaggaaagggagcgtcgtggtgtacctcccgcagggacacatcgagcacctcggcgacgccgcggccgccggcggaggcgcgccgccgcccgtcgccctgccgccccacgtcttctgccgcgtcgtcgacgtcactctccatgcggacgcgtccacggacgaggtgtacgcccagctcgccctcgtcgccgagaacgaggatgtcgcgaggcggctgcgcggacggtcggaggacggcagcgccgaggacggcgacgaaggggaaaccgtgaagcagcggttctcgcggatgccgcacatgttctgcaagacgctcacggcctccgacaccagcacgcacggcggcttctccgtgccacgccgcgccgccgaggactgcttcccgcctctggactacagccagcagcgaccgtcgcaggagcttgtggccaaggatttgcacggaaccgagtggaggttccgccacatttatcgagggcagccccgcagacaccttttaaccactggatggagtgcctttgtcaacaagaagaagcttgtctcaggggacgccgtactatttttgaggggtgataatggggagctaagacttggagtgcgccgtgcagctcagcttaaaaatggatctgcttttccagctctttataaccagtgcttaaatcttggttcactacctaatgttgcacatgctgtggccaccaaaagtgtgttccacatctactacaaccccagattaagccaatctgaattcattataccattttcgaagtttatcaagagcttcagtcaaccattttctgctggttcgaggttcaaagtgaaatatgagagtgatgatgcttctgaaagaagatgcacagggatcatagcaggaattggtgatgctgaccccatgtggcgtggttcgaaatggaaatgtttgatggttcgatgggatgacgatgtagattttcgtcaaccaaacaggatttctccttgggagattgagctgactagttcagtttcaggatctcacatgtctgcaccaaatgcaaagagactgaaaccatgtcttccccatgttaatccagactacctagttccaagtcttgcaaggtcaagaattactgggttatagaactcatgacaatgctgctgttgcaacttctcagccatgcgaagcaacgaacatgcagtacattgatgaacgaagttgctccaacgatgcgagtaacattatcccgggggttccaagaattggtgtcagaacaccactcggaagccctaggttttcctaccgttgctcaggctttggggagtctccaagattccaaaaggtcttgcaaggtcaagaagtatttcatccctacagaggaactctggtcgatgcaagcttgagtaatagtggcttccatcagcaagatggttctcatgtgcctactcaggccagcaagtggcacgcacagctacatggatgtgcttttcgtggccaacaagcaccagctgttccatctcaatcctcatccccaccatctgtcctgatgtttcaacgaggtgatccaaagatgtccccatttgaatttgggcatttccacgtgaataagaaagaggatagacgcgcaatgtttgtccatgctggaggcatcggaggaactgagcaaacgacgatgctccaggctcatcatgtttctggaggaacgggaaacagagatgtgaccgttgagaaatctcatcccgctgttgccgctgcttcagacaacagggaagttagcaaaaacagttgcaaaatatttggcatatctttgaccgagaaggttccagcaatgaaagaaaagggctgtggtgacatcaacaccaactatccatcccccttcctgtctttgaagcaacaagtgccgaaatcgctgggcaacagctgtgccaccgttcatgagcagaggcctgttgttgctagggtgattgacgtttcaacagtggatatgatgatctgatgtattggaaaactgtcctggaggctgtgttgcgtagtgtggacagtgtcggtttgatggttcggtatcgtgaagacgggatttgattgaggatctggccagatttgtatcctagttgtagctgttagagcactttgtatgacaaccgtgagtgctccgtgttatcagcactagttgctgctcacaacttgcctctatgttcataatctgtatgccatgtcagacccatttatagagggtttgtttgcttggcatagttctagacttaaagcattattatgagaacaaatttgctctgcaccgtatctttcttactttcaagttggcaacggattaacggtggaggagatgatctgagaggttagttgtgcgacgtattaatggtgttacatatattatgcttaggagcattctgccagctcatttatcatatacatgtcagcacttgatttgttaagtgtagttagtagccttgcactttggattggagctatcctcttagggtgtgtttggttggagagttaaataaaat

SEQ ID NO: 60250 - DNA, 3123 bp, Zea Mays
ctctcccctcctagctctagctggataggtgggctctggggaggaggaggagggtagctaggtagtagctgcctataggcctcggcccccattcatggccattaccacgatgtgtcaccccaccacaccgccctctccgatgctgcctccctcatgataaccctctccctggtggttgttctttgccttgttgccgtgcagcctccacccccaccctcctcattaatcacttgctagctccctgcctccctcccggctcccgctcccccttctcgtgcttcgcgcccccgcagcagccatggcggggatcgacctcaacgacaccgtggaggaggacgaggaggaggcggagcccggcaacgcctgctcccagcagagccggaccagctccgcggccacgttcccgccgccgccgccgaaccagccgaggccgagcgccgcggtgtgcctcgagctgtggcacgcctgcgccggccccgtcgcgccgctgccgaggaaagggagcgtcgtggtgtacctcccgcagggacacatcgagcacctcggcgacgccgcggccgccggcggaggcgcgccgccgcccgtcgccctgccgccccacgtcttctgccgcgtcgtcgacgtcactctccatgcggacgcgtccacggacgaggtgtacgcccagctcgccctcgtcgccgagaacgaggatgtcgcgaggcggctgcgcggacggtcggaggacggcagcgccgaggacggcgacgaaggggaaaccgtgaagcagcggttctcgcggatgccgcacatgttctgcaagacgctcacggcctccgacaccagcacgcacggcggcttctccgtgccacgccgcgccgccgaggactgcttcccgcctctggactacagccagcagcgaccgtcgcaggagcttgtggccaaggatttgcacggaaccgagtggaggttccgccacatttatcgagggcagccccgcagacaccttttaaccactggatggagtgcctttgtcaacaagaagaagcttgtctcaggggacgccgtactatttttgaggggtgataatggggagctaagacttggagtgcgccgtgcagctcagcttaaaaatggatctgcttttccagctctttataaccagtgcttaaatcttggttcactacctaatgttgcacatgctgtggccaccaaaagtgtgttccacatctactacaaccccagattaagccaatctgaattcattataccattttcgaagtttatcaagagcttcagtcaaccattttctgctggttcgaggttcaaagtgaaatatgagagtgatgatgcttctgaaagaaggttggtgtgctacagttctcatcttttacatagatttatgatggttgacacatgagagtattatgcagatgcacagggatcatagcaggaattggtgatgctgaccccatgtggcgtggttcgaaatggaaatgtttgatggttcgatgggatgacgatgtagattttcgtcaaccaaacaggatttctccttgggagattgagctgactagttcagtttcaggatctcacatgtctgcaccaaatgcaaagagactgaaaccatgtcttccccatgttaatccagactacctagttccaaatggaagcggtcgtcctgattttgcggaatctgcccaattccacaaggtcttgcaaggtcaagaattactgggttatagaactcatgacaatgctgctgttgcaacttctcagccatgcgaagcaacgaacatgcagtacattgatgaacgaagttgctccaacgatgcgagtaacattatcccgggggttccaagaattggtgtcagaacaccactcggaagccctaggttttcctaccgttgctcaggctttggggagtctccaagattccaaaaggtcttgcaaggtcaagaagtatttcatccctacagaggaactctggtcgatgcaagcttgagtaatagtggcttccatcagcaagatggttctcatgtgcctactcaggccagcaagtggcacgcacagctacatggatgtgcttttcgtggccaacaagcaccagctgttccatctcaatcctcatccccaccatctgtcctgatgtttcaacgaggtgatccaaagatgtccccatttgaatttgggcatttccacgtgaataagaaagaggatagacgcgcaatgtttgtccatgctggaggcatcggaggaactgagcaaacgacgatgctccaggctcatcatgtttctggaggaacgggaaacagagatgtgaccgttgagaaatctcatcccgctgttgccgctgcttcagacaacagggaagttagcaaaaacagttgcaaaatatttggcatatctttgaccgagaaggttccagcaatgaaagaaaagggctgtggtgacatcaacaccaactatccatcccccttcctgtctttgaagcaacaagtgccgaaatcgctgggcaacagctgtgccaccgttcatgagcagaggcctgttgttgctagggtgattgacgtttcaacagtggatatgatgatctgatgtattggaaaactgtcctggaggtgaagtcatgctagctgtgttgcgtagtgtggacagtgtcggtttgatggttcggtatcgtgaagacgggatttgattgaggatctggccagatttgtatcctagttgtagctgttagagcactttgtatgacaaccgtgagtgctccgtgttatcagcactagttgctgctcacaacttgcctctatgttcataatctgtatgccatgtcagacccatttatagagggtttgtttgcttggcatagttctagacttaaagcattattatgagaacaaatttgctctgcaccgtatctttcttactttcaagttggcaacggattaacggtggaggagatgatctgagaggttagttgtgcgacgtattaatggtgttacatatattatgcttaggagcattctgccagctcatttatcatatacatgtcagcacttgatttgttaagtgtagttagtagccttgcactttggattggagctatcctcttagggtgtgtttggttggagagttaaataaaat

SEQ ID NO: 60251 - DNA, 3024 bp, Zea Mays
agctctagctggataggtgggctctggggaggaggaggagggtagctaggtagtagctgcctataggcctcggcccccattcatggccattaccacgatgtgtcaccccaccacaccgccctctccgatgctgcctccctcatgataaccctctccctggtggttgttctttgccttgttgccgtgcagcctccacccccaccctcctcattaatcacttgctagctccctgcctccctcccggctcccgctcccccttctcgtgcttcgcgcccccgcagcagccatggcggggatcgacctcaacgacaccgtggaggaggacgaggaggaggcggagcccggcaacgcctgctcccagcagagccggaccagctccgcggccacgttcccgccgccgccgccgaaccagccgaggccgagcgccgcggtgtgcctcgagctgtggcacgcctgcgccggccccgtcgcgccgctgccgaggaaagggagcgtcgtggtgtacctcccgcagggacacatcgagcacctcggcgacgccgcggccgccggcggaggcgcgccgccgcccgtcgccctgccgccccacgtcttctgccgcgtcgtcgacgtcactctccatgcggacgcgtccacggacgaggtgtacgcccagctcgccctcgtcgccgagaacgaggatgtcgcgaggcggctgcgcggacggtcggaggacggcagcgccgaggacggcgacgaaggggaaaccgtgaagcagcggttctcgcggatgccgcacatgttctgcaagacgctcacggcctccgacaccagcacgcacggcggcttctccgtgccacgccgcgccgccgaggactgcttcccgcctctggactacagccagcagcgaccgtcgcaggagcttgtggccaaggatttgcacggaaccgagtggaggttccgccacatttatcgagccccgcagacaccttttaaccactggatggagtgcctttgtcaacaagaagaagcttgtctcaggggacgccgtactatttttgaggggtgataatggggagctaagacttggagtgcgccgtgcagctcagcttaaaaatggatctgcttttccagctctttataaccagtgcttaaatcttggttcactacctaatgttgcacatgctgtggccaccaaaagtgtgttccacatctactacaaccccagattaagccaatctgaattcattataccattttcgaagtttatcaagagcttcagtcaaccattttctgctggttcgaggttcaaagtgaaatatgagagtgatgatgcttctgaaagaagatgcacagggatcatagcaggaattggtgatgctgaccccatgtggcgtggttcgaaatggaaatgtttgatggttcgatgggatgacgatgtagattttcgtcaaccaaacaggatttctccttgggagattgagctgactagttcagtttcaggatctcacatgtctgcaccaaatgcaaagagactgaaaccatgtcttccccatgttaatccagactacctagttccaaatggaagcggtcgtcctgattttgcggaatctgcccaattccacaaggtcttgcaaggtcaagaattactgggttatagaactcatgacaatgctgctgttgcaacttctcagccatgcgaagcaacgaacatgcagtacattgatgaacgaagttgctccaacgatgcgagtaacattatcccgggggttccaagaattggtgtcagaacaccactcggaagccctaggttttcctaccgttgctcaggctttggggagtctccaagattccaaaaggtcttgcaaggtcaagaagtatttcatccctacagaggaactctggtcgatgcaagcttgagtaatagtggcttccatcagcaagatggttctcatgtgcctactcaggccagcaagtggcacgcacagctacatggatgtgcttttcgtggccaacaagcaccagctgttccatctcaatcctcatccccaccatctgtcctgatgtttcaacgaggtgatccaaagatgtccccatttgaatttgggcatttccacgtgaataagaaagaggatagacgcgcaatgtttgtccatgctggaggcatcggaggaactgagcaaacgacgatgctccaggctcatcatgtttctggaggaacgggaaacagagatgtgaccgttgagaaatctcatcccgctgttgccgctgcttcagacaacagggaagttagcaaaaacagttgcaaaatatttggcatatctttgaccgagaaggttccagcaatgaaagaaaagggctgtggtgacatcaacaccaactatccatcccccttcctgtctttgaagcaacaagtgccgaaatcgctgggcaacagctgtgccaccgttcatgagcagaggcctgttgttgctagggtgattgacgtttcaacagtggatatgatgatctgatgtattggaaaactgtcctggaggctgtgttgcgtagtgtggacagtgtcggtttgatggttcggtatcgtgaagacgggatttgattgaggatctggccagatttgtatcctagttgtagctgttagagcactttgtatgacaaccgtgagtgctccgtgttatcagcactagttgctgctcacaacttgcctctatgttcataatctgtatgccatgtcagacccatttatagagggtttgtttgcttggcatagttctagacttaaagcattattatgagaacaaatttgctctgcaccgtatctttcttactttcaagttggcaacggattaacggtggaggagatgatctgagaggttagttgtgcgacgtattaatggtgttacatatattatgcttaggagcattctgccagctcatttatcatatacatgtcagcacttgatttgttaagtgtagttagtagccttgcactttggattggagctatcctcttagggtgtgtttggttggagagttaaataaaat

SEQ ID NO: 60252 - DNA, 1685 bp, Zea Mays
gtttcttattgccctgcccctgagtgcacattgtaggggtacataataccctcttgacttagttcgatgggatgacgatgtagattttcgtcaaccaaacaggatttctccttgggagattgagctgactagttcagtttcaggatctcacatgtctgcaccaaatgcaaagagactgaaaccatgtcttccccatgttaatccagactacctagttccaaatggaagcggtcgtcctgattttgcggaatctgcccaattccacaaggtcttgcaaggtcaagaattactgggttatagaactcatgacaatgctgctgttgcaacttctcagccatgcgaagcaacgaacatgcagtacattgatgaacgaagttgctccaacgatgcgagtaacattatcccgggggttccaagaattggtgtcagaacaccactcggaagccctaggttttcctaccgttgctcaggctttggggagtctccaagattccaaaaggtcttgcaaggtcaagaagtatttcatccctacagaggaactctggtcgatgcaagcttgagtaatagtggcttccatcagcaagatggttctcatgtgcctactcaggccagcaagtggcacgcacagctacatggatgtgcttttcgtggccaacaagcaccagctgttccatctcaatcctcatccccaccatctgtcctgatgtttcaacgaggtgatccaaagatgtccccatttgaatttgggcatttccacgtgaataagaaagaggatagacgcgcaatgtttgtccatgctggaggcatcggaggaactgagcaaacgacgatgctccaggctcatcatgtttctggaggaacgggaaacagagatgtgaccgttgagaaatctcatcccgctgttgccgctgcttcagacaacagggaagttagcaaaaacagttgcaaaatatttggcatatctttgaccgagaaggttccagcaatgaaagaaaagggctgtggtgacatcaacaccaactatccatcccccttcctgtctttgaagcaacaagtgccgaaatcgctgggcaacagctgtgccaccgttcatgagcagaggcctgttgttgctagggtgattgacgtttcaacagtggatatgatgatctgatgtattggaaaactgtcctggaggctgtgttgcgtagtgtggacagtgtcggtttgatggttcggtatcgtgaagacgggatttgattgaggatctggccagatttgtatcctagttgtagctgttagagcactttgtatgacaaccgtgagtgctccgtgttatcagcactagttgctgctcacaacttgcctctatgttcataatctgtatgccatgtcagacccatttatagagggtttgtttgcttggcatagttctagacttaaagcattattatgagaacaaatttgctctgcaccgtatctttcttactttcaagttggcaacggattaacggtggaggagatgatctgagaggttagttgtgcgacgtattaatggtgttacatatattatgcttaggagcattctgccagctcatttatcatatacatgtcagcacttgatttgttaagtgtagttagtagccttgcactttggattggagctatcctcttagggtgtgtttggttggagagttaaataaaat

SEQ ID NO: 60253 - DNA, 1619 bp, Zea Mays
gtcgtctcttctgtatcatccgccattccatccaaagtacgtagtacgtagtcttagttgagctcgtcatggactcattgcgaagcctagtgttatcttcgtcatccgatgattcggacgatgagatcgataacttgttgctttggcaacatgttgagcaccttgtactcggagacacgaggacgcgtcgtaggcgctcctcattgcctcgccgtgttatccatagggaccacgctgctggagaaaatctcatcaagcaccactacttcggaccaaatccagtgtatccatcccatgtatttcgtcgaaggtttcggatgcaacgtcctttgtttctacgtatccttcgtgccgttcaacgagaagacgattacttcacattaagatgtgatgcaactggtttagcaggtcttggtccattgcaaaaagtttgtgctgctttgcgtatccttgcgtacgggttaccaagcgatgcggtcgatgagtacatacagattggacagactacggctagggactgccttatccgtttctgtcgcgcaatcatatcttcctttagcgaacaatacctccgtatcccaaaccacgacgacattgctcgcatacttagtgttaacgcggacagggggtttccgggtatgctaggctccatcgaccgtatgcattgggaatggcgcaactgtcctactgcatggcgcggacagttttgtgggcgcaattcgaggccaacaatgatactagaggctgtcgcagggtatgacctatggatttggcatgccttctttggaatgcctggtactaacaatgatctcaacgtccttcatcgatcaccagtgtttgatccgttacgtaatgggacgatgccaccagtgcacttcactattaatggtaccacgtacaattttggatactacttagccgatggtatatatcccaattggcctacctttgtaaaagcaattcgtcacgcttttgaggaaaaaaaggttcacttcacaaccaagcaggagagttgtcgaaaggacatagagcgagcatttggggttttgcaggcgaggtgggcagttctacgtgggcctgcttatggttgggatcgtaatcacctcgcagagatgatgactgcttgtattattatgcacaacatgattgtcgaggacgaaggtgatggtgcagcaaatctggattttgttggccccacaggtccccccgaagtttgtaacaatattcctgaggtccgcaacgagtggctaaacaatcatatccgttctgaattacccaacgaccccgaccaggacatcacatctcagacgacatacttgtctttgcagcacaacctgatagaacacctttgggcacgtcgagggtcgatgggttgaaggtcttcatccatattatgtggttcaacaatgttgttatgtttcatttatgaactaagtacaagtagttgtagcaatggaagtcatgtatgttgggcgtcagtgaagaagtcatggtaactgtcctctgtaatgcatctgcaacaaataatttgcatatgttgccaaacgtttagtcatgtatgacaacaacgttattatgaatatcaatattattacaataaacaatgttcaaaaaccatg

SEQ ID NO: 60254 - DNA, 1686 bp, Zea Mays
aaccgacttcagcacataccccatccatcctaggataaaagaaagcactggtctcgtttttttactttttctttaatgaacagccaattaatgtttaactaagggctagtttggacaccattttcccaagaaagcttctagttttcaaacggaaaatgaactaatttcccttttaaaaatgaaaatctcttgggaaaatagtattcccaaactagccctaaatatactattctaccaattgacttcgcgccatttgatggatgattatatggaatatacgtatctaacacgtgaccggccgcgccgagagcgctcggtcagcagtggagagcctggaaatgttcagccaggaaatcgcgcgcggccggccggcgaccacctcggagggaaacgcgggcgccgctctgtgacctgccgacggccgacgcggacgccatcatttgcgaggaaaaattctggtggctccgacgccgctctctctcgccggtcgtcaccctgtcatattggcctcggcctcgaccagatttcacgctaatctgaaagcagggcagcagctgccgtcacgagggccccgcagcgtggccgcagtatcgtcaccaaccgcgtcacctcccacgcccccatcacttcccccgccccacgtgctgccgtcacggactggccgtcacgactcacgaccagtgacctggggcgtgacgggcccaccgaagcacctcaaccgcggctgacgccccgccacgccaccgcggctcgcgcgaacaaacgcggtcaccgtcgtcccctccgccaccaccagattacgccatccccgtcccccgctgacctcaccacccttttatatatcaggatctgccagcccgccctgcccatgcccatccatcatcacacgacgacgcacacaagtcgcagctagctagctcccaaccgagccaggaaaacggacgccgtgcagctcgctcgcgcgcgccccacggaaagagagggcaggtaggaataatgtaccaggccatcccgtacagcgccggccagccgtggccgcggccggccccgacgatcggtcctgacgtggcggaggaggaggggttgctggcggcttcgcagcagcaggcgtcgacgccagcggaggcggcggcgagggtggaggaggaggaggtgcggcgcgcggtggcggagtgccccgtgctcgtggtgggcgtgcgcgggtgctgcctcagccacgtggtgaagcggctgctgcaggggctcggggtgaaccccgccgtgcacgaggtggccggcgccgaggcggacctcgcggccgccggggtcgccgccctcccggcggtgttcgtcgggggcaggctgctcgggggcctcgaccggctcatggccgcgcacatctccggcgacctcgtccccatactcaaggacgccggcgcgctgtggctctgacacgagcagccaccaagctagccgccctctgattgcctctccgtcgtcagctgctttgctttgaattaaacgatggtggtgttgtcaactcgtttttatttactcattgactagagatagacatgcacataggacttcaattcttgtacttgtactactagggaaaagagagtgaattatagtactttaatattatttgttacttgtattttccatcctgtgaatacgaaataccgactccagcttctgtttgtt

SEQ ID NO: 60255 - DNA, 1012 bp, Zea Mays
aatataaaatttgacaagggtctcacgcctaagattctcttcactgtctcctccaccgccgctcacggaatcgcatccgtccaaaacccttagcttcgcttcagtgtcttcacgggccgccggcggagatgcggttcacggcgtctccggtggtggagcttccggtcagcggcgcggtgttgactttcgaacaggacaacgactccttcgaggtgggcacctctgtgtggccctcgtccctggtcctcgtcaagttcgtcgagcgctgcatccgcgacccggccctcccctttgccgacgtgctccgcttcccgggaacccgggccgtggagctcgggtccgggtgcggaccggcaggacttggcctctcccgcctcggcctcaccgatctcgtcctcaccgacatcgccgccgtgctcccggcgctccgccgcaacctgcggcgcaaccgagttcacctcgcgcgcgcgccccgcctcgcccagctccactggaactgccccgcgcatctcgcgacgctagccaccccgcgccgcttcgatctcgtcgtcgccgcagacgtggtctacgtgcaggagtccgtgccgcacctcatcgcggccatggatgcgctcgccgacgccgagcgcggcgtggtgctgctcggctaccagatccggtcgcccgaggcgcaccaggtgttctgggagaccgttccggctgtcttcccggtcatcgagaaggtggcacgggagcacctcgaccctgagtacgcctacgaggaatccgatgtattcatactccgaagaagcccgcgtcagtgagggtcgaccttatgaagcctctcgaagcacataagctacagagaaactcaaaagttatattttctatgaagaactatgttctatctaacagaaatataagctccccggtatacactcccttgttgactctgaactttgtccgcaaagtaagagtcctttttttataaacaataaaaaagcgtgatattaaatctttttcgatgcagaaa

SEQ ID NO: 60256 - DNA, 2035 bp, Zea Mays
gttgtttatcttgcgtccggcgtcctctctctctcgtggcgacgactgggcgacctccccgcccccgccgctctacgccaggtgcccagatcttcgtcgggcccttcgccgaagagcagccaacaggtatgcgcaccccttctcttcccttcccgctgtgcgaagctgaggacccaaaccctagctgacactgttttggctatttgcgttcggatcggatctaatttcaggtgtataatgtagtattatgctttctaacttgattttcttgcaaaataaaaacatggggccgctcatctcccctactgggtccgcatggcatatgtaggaattttagctgtcttttagccgattgaatcaacttctagaatcactacataaacttgtattcgttgagatttacttctttaggttggtgacatattttgccagattactgggtatattgtcagctatattagtctactaatggattttgccttctcttggtggtagctttaactgcgatttcggttgtttgtttcgtttctatcagatattaataatctaaaatggtgtgcagcttaggttaaaatcaaaaaaatttgtcgggcggataatacaaggcctacaccagaaggaacaccctttgtgcgacaggcgaacagctgttgccggtctgcgggttgaatcatggcggagcacttggcttcgatcttcggcactgagaaggacagggtcaactgccctttttacttcaagattggggcctgtcgtcatggggatcgctgctctcgtctgcacaacaggccaactatatcaccaactcttgtgcttgctaacatgtatcagcgccctgatatgataacccctggagttgatgctcaaggccaacctattgaccctgagaagatgcaggagcattttgaggacttctatgaggacatctatgaggagttggggaagtttggtgagattgagaatctgaatgtttgtgataaccttgctgaccacatgattgggaatgtctatgtccagttcagggaggaagagcaagcagccgcagcatacaatgctcttcaggggcgcttttactctggccgccctataattgttgagtattctcctgtgaccgacttccgtgaagcaacctgtaggcagtttgaggagaacagctgcaaccgtggtggctactgtaatttcatgcatgtgaagcaaattggcagggatctcaggaggaagctgtatgggcgttctgcttccaggaggtaccatgggagaagccgaagccgaagcccgccaccacaaaggaggggccaccgtgaccgtgatgactaccaccaccgtgaccgtgatgactaccgtggtggcggcggtggtggaaggggaagaggtagcaggtatgacaggtacgatgacggagcaggcagaggtggcaggcatggcaggtatgatgatggagcaggcagaggcggcagacatgacaggtatgatgatggaggaaggcgcaggcatggtagcccctcaaggcgtgcaaggagcccagtcagggaaagcagcgaggagcgaagggccaagattgagcagtggaaccgtgaacgggagggaaaacagtgagctctccgtggctactgtttgccggacttgttgcttagctccggctctcatcgctatattctaagtatgcttgtgtggattgcattctgcatggctaagtaaaaccttttaagatcaggattcctcggttcattttatggttaaaccagacatcatttgtttccatctgtgttgtgtcggatcctttgctattatgttattttgacaattggtgtcaaatcttttgtggtgtgctattagcttatgatgatgtcagttgtggtttgtcactagatttgccatctggctttcagtcgtgtgttatgctgttccatggcggatttcttgttttccctcttctcatttttgctcaatgctcctagacagtgcttgggctgccgtcattgtactatgtgcagtagcacggagcaggttctattcagtttgagctgtcttttgt

SEQ ID NO: 60257 - DNA, 1512 bp, Zea Mays
gttgtttatcttgcgtccggcgtcctctctctctcgtggcgacgactgggcgacctccccgcccccgccgctctacgccaggtgcccagatcttcgtcgggcccttcgccgaagagcagccaacaggttgccggtctgcgggttgaatcatggcggagcacttggcttcgatcttcggcactgagaaggacagggtcaactgccctttttacttcaagattggggcctgtcgtcatggggatcgctgctctcgtctgcacaacaggccaactatatcaccaactcttgtgcttgctaacatgtatcagcgccctgatatgataacccctggagttgatgctcaaggccaacctattgaccctgagaagatgcaggagcattttgaggacttctatgaggacatctatgaggagttggggaagtttggtgagattgagaatctgaatgtttgtgataaccttgctgaccacatgattgggaatgtctatgtccagttcagggaggaagagcaagcagccgcagcatacaatgctcttcaggggcgcttttactctggccgccctataattgttgagtattctcctgtgaccgacttccgtgaagcaacctgtaggcagtttgaggagaacagctgcaaccgtggtggctactgtaatttcatgcatgtgaagcaaattggcagggatctcaggaggaagctgtatgggcgttctgcttccaggaggtaccatgggagaagccgaagccgaagcccgccaccacaaaggaggggccaccgtgaccgtgatgactaccaccaccgtgaccgtgatgactaccgtggtggcggcggtggtggaaggggaagaggtagcaggtatgacaggtacgatgacggagcaggcagaggtggcaggcatggcaggtatgatgatggagcaggcagaggcggcagacatgacaggtatgatgatggaggaaggcgcaggcatggtagcccctcaaggcgtgcaaggagcccagtcagggaaagcagcgaggagcgaagggccaagattgagcagtggaaccgtgaacgggagggaaaacagtgagctctccgtggctactgtttgccggacttgttgcttagctccggctctcatcgctatattctaagtatgcttgtgtggattgcattctgcatggctaagtaaaaccttttaagatcaggattcctcggttcattttatggttaaaccagacatcatttgtttccatctgtgttgtgtcggatcctttgctattatgttattttgacaattggtgtcaaatcttttgtggtgtgctattagcttatgatgatgtcagttgtggtttgtcactagatttgccatctggctttcagtcgtgtgttatgctgttccatggcggatttcttgttttccctcttctcatttttgctcaatgctcctagacagtgcttgggctgccgtcattgtactatgtgcagtagcacggagcaggttctattcagtttgagctgtcttttgt

SEQ ID NO: 60258 - DNA, 2585 bp, Zea Mays
gttgtttatcttgcgtccggcgtcctctctctctcgtggcgacgactgggcgacctccccgcccccgccgctctacgccaggtgcccagatcttcgtcgggcccttcgccgaagagcagccaacaggtatgcgcaccccttctcttcccttcccgctgtgcgaagctgaggacccaaaccctagctgacactgttttggctatttgcgttcggatcggatctaatttcaggtgtataatgtagtattatgctttctaacttgattttcttgcaaaataaaaacatggggccgctcatctcccctactgggtccgcatggcatatgtaggaattttagctgtcttttagccgattgaatcaacttctagaatcactacataaacttgtattcgttgagatttacttctttaggttggtgacatattttgccagattactgggtatattgtcagctatattagtctactaatggattttgccttctcttggtggtagctttaactgcgatttcggttgtttgtttcgtttctatcagatattaataatctaaaatggtgtgcagcttaggttaaaatcaaaaaaatttgtcgggcggataatacaaggcctacaccagaaggaacaccctttgtgcgacaggcgaacagctgtctctatctctctctgcagtgttatttggtttattatatgcagttgcaggggagaaaactaaggcatgttcactgcagctagaagcacagccgcagcagatgcagcaggcttcttatagtatttgcagcttagaagttggagtggcaactgcagctagctgcagcaaacactcctaacaataatagtggagagagactttcacgctgtttaaatttaggtgatttttgggaattaacttgcagatttattaattattatataggtaaaaagtgtagtatcagttactaggagcaagaacttgccctgatgacacagttattttggtttttctgttcacttctcctaatatttaaccttttgagtaagtgtgcagattaggtcttaaaaagggattgcgattaagattttattgccagagcctgagctgtagaattttccatttacacacgtggctgtacagggggtaaacttgcaggattattacttggtgatcctataagatacacatgctgtgaaccctgatttgttttagctgcttttgttcgtttttgtctacttagccttgcacactgaggacctttattgaggttgccggtctgcgggttgaatcatggcggagcacttggcttcgatcttcggcactgagaaggacagggtcaactgccctttttacttcaagattggggcctgtcgtcatggggatcgctgctctcgtctgcacaacaggccaactatatcaccaactcttgtgcttgctaacatgtatcagcgccctgatatgataacccctggagttgatgctcaaggccaacctattgaccctgagaagatgcaggagcattttgaggacttctatgaggacatctatgaggagttggggaagtttggtgagattgagaatctgaatgtttgtgataaccttgctgaccacatgattgggaatgtctatgtccagttcagggaggaagagcaagcagccgcagcatacaatgctcttcaggggcgcttttactctggccgccctataattgttgagtattctcctgtgaccgacttccgtgaagcaacctgtaggcagtttgaggagaacagctgcaaccgtggtggctactgtaatttcatgcatgtgaagcaaattggcagggatctcaggaggaagctgtatgggcgttctgcttccaggaggtaccatgggagaagccgaagccgaagcccgccaccacaaaggaggggccaccgtgaccgtgatgactaccaccaccgtgaccgtgatgactaccgtggtggcggcggtggtggaaggggaagaggtagcaggtatgacaggtatgatgatggagcaggcagaggcggcagacatgacaggtatgatgatggaggaaggcgcaggcatggtagcccctcaaggcgtgcaaggagcccagtcagggaaagcagcgaggagcgaagggccaagattgagcagtggaaccgtgaacgggagggaaaacagtgagctctccgtggctactgtttgccggacttgttgcttagctccggctctcatcgctatattctaagtatgcttgtgtggattgcattctgcatggctaagtaaaaccttttaagatcaggattcctcggttcattttatggttaaaccagacatcatttgtttccatctgtgttgtgtcggatcctttgctattatgttattttgacaattggtgtcaaatcttttgtggtgtgctattagcttatgatgatgtcagttgtggtttgtcactagatttgccatctggctttcagtcgtgtgttatgctgttccatggcggatttcttgttttccctcttctcatttttgctcaatgctcctagacagtgcttgggctgccgtcattgtactatgtgcagtagcacggagcaggttctattcagtttgagctgtcttttgt

SEQ ID NO: 60259 - DNA, 1589 bp, Zea Mays
gttgtttatcttgcgtccggcgtcctctctctctcgtggcgacgactgggcgacctccccgcccccgccgctctacgccaggtgcccagatcttcgtcgggcccttcgccgaagagcagccaacagcttaggttaaaatcaaaaaaatttgtcgggcggataatacaaggcctacaccagaaggaacaccctttgtgcgacaggttgccggtctgcgggttgaatcatggcggagcacttggcttcgatcttcggcactgagaaggacagggtcaactgccctttttacttcaagattggggcctgtcgtcatggggatcgctgctctcgtctgcacaacaggccaactatatcaccaactcttgtgcttgctaacatgtatcagcgccctgatatgataacccctggagttgatgctcaaggccaacctattgaccctgagaagatgcaggagcattttgaggacttctatgaggacatctatgaggagttggggaagtttggtgagattgagaatctgaatgtttgtgataaccttgctgaccacatgattgggaatgtctatgtccagttcagggaggaagagcaagcagccgcagcatacaatgctcttcaggggcgcttttactctggccgccctataattgttgagtattctcctgtgaccgacttccgtgaagcaacctgtaggcagtttgaggagaacagctgcaaccgtggtggctactgtaatttcatgcatgtgaagcaaattggcagggatctcaggaggaagctgtatgggcgttctgcttccaggaggtaccatgggagaagccgaagccgaagcccgccaccacaaaggaggggccaccgtgaccgtgatgactaccaccaccgtgaccgtgatgactaccgtggtggcggcggtggtggaaggggaagaggtagcaggtatgacaggtacgatgacggagcaggcagaggtggcaggcatggcaggtatgatgatggagcaggcagaggcggcagacatgacaggtatgatgatggaggaaggcgcaggcatggtagcccctcaaggcgtgcaaggagcccagtcagggaaagcagcgaggagcgaagggccaagattgagcagtggaaccgtgaacgggagggaaaacagtgagctctccgtggctactgtttgccggacttgttgcttagctccggctctcatcgctatattctaagtatgcttgtgtggattgcattctgcatggctaagtaaaaccttttaagatcaggattcctcggttcattttatggttaaaccagacatcatttgtttccatctgtgttgtgtcggatcctttgctattatgttattttgacaattggtgtcaaatcttttgtggtgtgctattagcttatgatgatgtcagttgtggtttgtcactagatttgccatctggctttcagtcgtgtgttatgctgttccatggcggatttcttgttttccctcttctcatttttgctcaatgctcctagacagtgcttgggctgccgtcattgtactatgtgcagtagcacggagcaggttctattcagtttgagctgtcttttgt

SEQ ID NO: 60260 - DNA, 1917 bp, Zea Mays
attttttcctctccttccgtccgtccccgaaaagctcctcgcgcttataaggagaggtgatgataaaggatatttgctgaccaaacttgcagtagttcttctttaaggaaatagaacttggcgtcatgacacatagaaatatgctctggacacatcagtctgttaatcctgaatgggagcaaagacatgcccaagttcaaccaggaagttcctattatgcaggcactgcaagtgattcatccaacctgggtgtgcaagttgctgtgggagttccaggaaatactgctaatgttggtatatgtgatttgcggaatcatgagtgcccgcatgttcataattcatacccacatgccggtgttacatcaagatttgtcttcccaactactatgtacaaccctagcatgtcagcagcagctgtcaacatatatattcctcagactcaaagctttggactaggcagtgtgctaccaccatctttacataatcaagttcccacaggaactattgatgagagtagcagcagtgtcaattttggtgatagtgctattggattcatgaaaaggaaaaatgcagtagttgctggaagccatcattttcttcatggatttgctgggtcaagttcatctgttcatgtgcctcagaatcctgtgcatgggccatggaatccttcatctcaatcaaattgtttacccagttctgcagcttcaaacctaccagaataccacaatagtaatgggtggccatacttagaagaatcttctgcagatgcttcaaacagtttcagttctgtggctgcttgccaggagctggcacctcatgcctgcaggttatggagtaccacagtggggatatagtaatgcagtggtcaatcctccaggaactgcagacatgtcaaatgggccactgcctcatttctgccagaatagtatgcaggcacctcaaatacaagtgtcccatcaacagttcatcggtaacaatgcggtgcatggtttaaatccttctgccacaggccttcctttacatccaagaatgctggctctcccattcaatgctgagcacacttttgggcatccaatgcacccacctctgataaaccaagttaacaatggggctttaagaattctgccataccagaatgctacagtgatggaccattcaaggatttatgaagcaggacatgttatcgatgaacatagcgatatgcgtttagatgtggataacatgacttatgaggaacttgtagcattgcaagagcagataggcgatgtcaatactggtttgacagaaagctatatccaggaaaacttgaggtccagttttcatgttccaggagcagctagcatgtctgatcagttttctgagctttctttggagaatgatgcttgcataatatgccaggaggagtataaagctaaagaacttataggaacccttgaatgcggtcacaagtaccatgtgaattgcataaagcaatggttgatgatgaaaaacctgtgccccatatgcaagacgacagctttgtcatcagatagaaggaacggatgaccgtcgccaataatgttgttggttgtttaccgcgtggcaaattagcgtggattttgtatatagacatggttgcctttatttgcccgtcccctttgctgtggacataaactgagcttcgaaacactgtacagatattttgtaggatgttttagacgttaaatggcacaatggtgtgtaaagctcccatgactgccttggtagatgccctcttcctttacattgtacattgtatttatctttactcttcaaaaaaagaagcttgaaaaccgtaagttctgtacattctggaattgaaagaaccggaaattttcttcacctgtagagctttttgctagagctttatgagattcagtggtgaatcttgaagtcgtg

SEQ ID NO: 60261 - DNA, 2169 bp, Zea Mays
ttccgccggtcgaccgatcccccccacccccaccggataccaccgcctccaccaaccgattccgttccatcccccctcccccctcgctcgagcgcgaggcttctctcccctcccctcccttctcctccccccccggcgcggattcctacagccagctccctcgccgatcgcggtcccgtcccgagatttatgagtctcgacaacttaactttgcaatataagctccgtaacaagggcacggatgggcacagaggaacagaaacgccaaactccaagaaaggcgcagactcggtaacggacaaggagaggtgatgataaaggatatttgctgaccaaacttgcagtagttcttctttaaggaaatagaacttggcgtcatgacacatagaaatatgctctggacacatcagtctgttaatcctgaatgggagcaaagacatgcccaagttcaaccaggaagttcctattatgcaggcactgcaagtgattcatccaacctgggtgtgcaagttgctgtgggagttccaggaaatactgctaatgttggtatatgtgatttgcggaatcatgagtgcccgcatgttcataattcatacccacatgccggtgttacatcaagatttgtcttcccaactactatgtacaaccctagcatgtcagcagcagctgtcaacatatatattcctcagactcaaagctttggactaggcagtgtgctaccaccatctttacataatcaagttcccacaggaactattgatgagagtagcagcagtgtcaattttggtgatagtgctattggattcatgaaaaggaaaaatgcagtagttgctggaagccatcattttcttcatggatttgctgggtcaagttcatctgttcatgtgcctcagaatcctgtgcatgggccatggaatccttcatctcaatcaaattgtttacccagttctgcagcttcaaacctaccagaataccacaatagtaatgggtggccatacttagaagaatcttctgcagatgcttcaaacagtttcagttctgtggctgcttgccaggagctggcacctcatgcctgcaggttatggagtaccacagtggggatatagtaatgcagtggtcaatcctccaggaactgcagacatgtcaaatgggccactgcctcatttctgccagaatagtatgcaggcacctcaaatacaagtgtcccatcaacagttcatcggtaacaatgcggtgcatggtttaaatccttctgccacaggccttcctttacatccaagaatgctggctctcccattcaatgctgagcacacttttgggcatccaatgcacccacctctgataaaccaagttaacaatggggctttaagaattctgccataccagaatgctacagtgatggaccattcaaggatttatgaagcaggacatgttatcgatgaacatagcgatatgcgtttagatgtggataacatgacttatgaggaacttgtagcattgcaagagcagataggcgatgtcaatactggtttgacagaaagctatatccaggaaaacttgaggtccagttttcatgttccaggagcagctagcatgtctgatcagttttctgagctttctttggagaatgatgcttgcataatatgccaggaggagtataaagctaaagaacttataggaacccttgaatgcggtcacaagtaccatgtgaattgcataaagcaatggttgatgatgaaaaacctgtgccccatatgcaagacgacagctttgtcatcagatagaaggaacggatgaccgtcgccaataatgttgttggttgtttaccgcgtggcaaattagcgtggattttgtatatagacatggttgcctttatttgcccgtcccctttgctgtggacataaactgagcttcgaaacactgtacagatattttgtaggatgttttagacgttaaatggcacaatggtgtgtaaagctcccatgactgccttggtagatgccctcttcctttacattgtacattgtatttatctttactcttcaaaaaaagaagcttgaaaaccgtaagttctgtacattctggaattgaaagaaccggaaattttcttcacctgtagagctttttgctagagctttatgagattcagtggtgaatcttgaagtcgtg

SEQ ID NO: 60262 - DNA, 2158 bp, Zea Mays
ttccgccggtcgaccgatcccccccacccccaccggataccaccgcctccaccaaccgattccgttccatcccccctcccccctcgctcgagcgcgaggcttctctcccctcccctcccttctcctccccccccggcgcggattcctacagccagctccctcgccgatcgcggtcccgtcccgagatttatgagtctcgacaacttaactttgcaatataagctccgtaacaagggcacggatgggcacagaggaacagaaacgccaaactccaagaaaggcgcagactcgggagaggtgatgataaaggatatttgctgaccaaacttgcagtagttcttctttaaggaaatagaacttggcgtcatgacacatagaaatatgctctggacacatcagtctgttaatcctgaatgggagcaaagacatgcccaagttcaaccaggaagttcctattatgcaggcactgcaagtgattcatccaacctgggtgtgcaagttgctgtgggagttccaggaaatactgctaatgttggtatatgtgatttgcggaatcatgagtgcccgcatgttcataattcatacccacatgccggtgttacatcaagatttgtcttcccaactactatgtacaaccctagcatgtcagcagcagctgtcaacatatatattcctcagactcaaagctttggactaggcagtgtgctaccaccatctttacataatcaagttcccacaggaactattgatgagagtagcagcagtgtcaattttggtgatagtgctattggattcatgaaaaggaaaaatgcagtagttgctggaagccatcattttcttcatggatttgctgggtcaagttcatctgttcatgtgcctcagaatcctgtgcatgggccatggaatccttcatctcaatcaaattgtttacccagttctgcagcttcaaacctaccagaataccacaatagtaatgggtggccatacttagaagaatcttctgcagatgcttcaaacagtttcagttctgtggctgcttgccaggagctggcacctcatgcctgcaggttatggagtaccacagtggggatatagtaatgcagtggtcaatcctccaggaactgcagacatgtcaaatgggccactgcctcatttctgccagaatagtatgcaggcacctcaaatacaagtgtcccatcaacagttcatcggtaacaatgcggtgcatggtttaaatccttctgccacaggccttcctttacatccaagaatgctggctctcccattcaatgctgagcacacttttgggcatccaatgcacccacctctgataaaccaagttaacaatggggctttaagaattctgccataccagaatgctacagtgatggaccattcaaggatttatgaagcaggacatgttatcgatgaacatagcgatatgcgtttagatgtggataacatgacttatgaggaacttgtagcattgcaagagcagataggcgatgtcaatactggtttgacagaaagctatatccaggaaaacttgaggtccagttttcatgttccaggagcagctagcatgtctgatcagttttctgagctttctttggagaatgatgcttgcataatatgccaggaggagtataaagctaaagaacttataggaacccttgaatgcggtcacaagtaccatgtgaattgcataaagcaatggttgatgatgaaaaacctgtgccccatatgcaagacgacagctttgtcatcagatagaaggaacggatgaccgtcgccaataatgttgttggttgtttaccgcgtggcaaattagcgtggattttgtatatagacatggttgcctttatttgcccgtcccctttgctgtggacataaactgagcttcgaaacactgtacagatattttgtaggatgttttagacgttaaatggcacaatggtgtgtaaagctcccatgactgccttggtagatgccctcttcctttacattgtacattgtatttatctttactcttcaaaaaaagaagcttgaaaaccgtaagttctgtacattctggaattgaaagaaccggaaattttcttcacctgtagagctttttgctagagctttatgagattcagtggtgaatcttgaagtcgtg

SEQ ID NO: 60263 - DNA, 2052 bp, Zea Mays
ttccgccggtcgaccgatcccccccacccccaccggataccaccgcctccaccaaccgattccgttccatcccccctcccccctcgctcgagcgcgaggcttctctcccctcccctcccttctcctccccccccggcgcggattcctacagccagctccctcgccgatcgcggtcccgtcccgagggagaggtgatgataaaggatatttgctgaccaaacttgcagtagttcttctttaaggaaatagaacttggcgtcatgacacatagaaatatgctctggacacatcagtctgttaatcctgaatgggagcaaagacatgcccaagttcaaccaggaagttcctattatgcaggcactgcaagtgattcatccaacctgggtgtgcaagttgctgtgggagttccaggaaatactgctaatgttggtatatgtgatttgcggaatcatgagtgcccgcatgttcataattcatacccacatgccggtgttacatcaagatttgtcttcccaactactatgtacaaccctagcatgtcagcagcagctgtcaacatatatattcctcagactcaaagctttggactaggcagtgtgctaccaccatctttacataatcaagttcccacaggaactattgatgagagtagcagcagtgtcaattttggtgatagtgctattggattcatgaaaaggaaaaatgcagtagttgctggaagccatcattttcttcatggatttgctgggtcaagttcatctgttcatgtgcctcagaatcctgtgcatgggccatggaatccttcatctcaatcaaattgtttacccagttctgcagcttcaaacctaccagaataccacaatagtaatgggtggccatacttagaagaatcttctgcagatgcttcaaacagtttcagttctgtggctgcttgccaggagctggcacctcatgcctgcaggttatggagtaccacagtggggatatagtaatgcagtggtcaatcctccaggaactgcagacatgtcaaatgggccactgcctcatttctgccagaatagtatgcaggcacctcaaatacaagtgtcccatcaacagttcatcggtaacaatgcggtgcatggtttaaatccttctgccacaggccttcctttacatccaagaatgctggctctcccattcaatgctgagcacacttttgggcatccaatgcacccacctctgataaaccaagttaacaatggggctttaagaattctgccataccagaatgctacagtgatggaccattcaaggatttatgaagcaggacatgttatcgatgaacatagcgatatgcgtttagatgtggataacatgacttatgaggaacttgtagcattgcaagagcagataggcgatgtcaatactggtttgacagaaagctatatccaggaaaacttgaggtccagttttcatgttccaggagcagctagcatgtctgatcagttttctgagctttctttggagaatgatgcttgcataatatgccaggaggagtataaagctaaagaacttataggaacccttgaatgcggtcacaagtaccatgtgaattgcataaagcaatggttgatgatgaaaaacctgtgccccatatgcaagacgacagctttgtcatcagatagaaggaacggatgaccgtcgccaataatgttgttggttgtttaccgcgtggcaaattagcgtggattttgtatatagacatggttgcctttatttgcccgtcccctttgctgtggacataaactgagcttcgaaacactgtacagatattttgtaggatgttttagacgttaaatggcacaatggtgtgtaaagctcccatgactgccttggtagatgccctcttcctttacattgtacattgtatttatctttactcttcaaaaaaagaagcttgaaaaccgtaagttctgtacattctggaattgaaagaaccggaaattttcttcacctgtagagctttttgctagagctttatgagattcagtggtgaatcttgaagtcgtg

SEQ ID NO: 60264 - DNA, 2423 bp, Zea Mays
aggagatagctgtgccgccctgctgtcgtgttcattgctgcttagcaatgatacttggttttaatgatcagggaatggtttggactttgaatgttgtatctgagcttaggtttggtttgaagaatttagttagagcacgttctttgtttcaattttagaatcaagtgttttcagttatttgctacttgggtatgaagtttttcagttgctagtgttgtggatcttggtagttttttgttgggcctttttagggtctgttgagggggaaagggtttttcctacctgctatattgcactggaagacaatgcattctgcaaatgagtttacaacactagccaacaagagtttggtagggttgttgcgcttgcaatcatatatccatataacatctcgtcaaagttaatgccatttaatctatcctttttgtggttgctttagatttatgagtctcgacaacttaactttgcaatataagctccgtaacaagggcacggatgggcacagaggaacagaaacgccaaactccaagaaaggcgcagactcggtaacggacaaggagaggtgatgataaaggatatttgctgaccaaacttgcagtagttcttctttaaggaaatagaacttggcgtcatgacacatagaaatatgctctggacacatcagtctgttaatcctgaatgggagcaaagacatgcccaagttcaaccaggaagttcctattatgcaggcactgcaagtgattcatccaacctgggtgtgcaagttgctgtgggagttccaggaaatactgctaatgttggtatatgtgatttgcggaatcatgagtgcccgcatgttcataattcatacccacatgccggtgttacatcaagatttgtcttcccaactactatgtacaaccctagcatgtcagcagcagctgtcaacatatatattcctcagactcaaagctttggactaggcagtgtgctaccaccatctttacataatcaagttcccacaggaactattgatgagagtagcagcagtgtcaattttggtgatagtgctattggattcatgaaaaggaaaaatgcagtagttgctggaagccatcattttcttcatggatttgctgggtcaagttcatctgttcatgtgcctcagaatcctgtgcatgggccatggaatccttcatctcaatcaaattgtttacccagttctgcagcttcaaacctaccagaataccacaatagtaatgggtggccatacttagaagaatcttctgcagatgcttcaaacagtttcagttctgtggctgcttgccaggagctggcacctcatgcctgcaggttatggagtaccacagtggggatatagtaatgcagtggtcaatcctccaggaactgcagacatgtcaaatgggccactgcctcatttctgccagaatagtatgcaggcacctcaaatacaagtgtcccatcaacagttcatcggtaacaatgcggtgcatggtttaaatccttctgccacaggccttcctttacatccaagaatgctggctctcccattcaatgctgagcacacttttgggcatccaatgcacccacctctgataaaccaagttaacaatggggctttaagaattctgccataccagaatgctacagtgatggaccattcaaggatttatgaagcaggacatgttatcgatgaacatagcgatatgcgtttagatgtggataacatgacttatgaggaacttgtagcattgcaagagcagataggcgatgtcaatactggtttgacagaaagctatatccaggaaaacttgaggtccagttttcatgttccaggagcagctagcatgtctgatcagttttctgagctttctttggagaatgatgcttgcataatatgccaggaggagtataaagctaaagaacttataggaacccttgaatgcggtcacaagtaccatgtgaattgcataaagcaatggttgatgatgaaaaacctgtgccccatatgcaagacgacagctttgtcatcagatagaaggaacggatgaccgtcgccaataatgttgttggttgtttaccgcgtggcaaattagcgtggattttgtatatagacatggttgcctttatttgcccgtcccctttgctgtggacataaactgagcttcgaaacactgtacagatattttgtaggatgttttagacgttaaatggcacaatggtgtgtaaagctcccatgactgccttggtagatgccctcttcctttacattgtacattgtatttatctttactcttcaaaaaaagaagcttgaaaaccgtaagttctgtacattctggaattgaaagaaccggaaattttcttcacctgtagagctttttgctagagctttatgagattcagtggtgaatcttgaagtcgtg

SEQ ID NO: 60265 - DNA, 2323 bp, Zea Mays
aggagatagctgtgccgccctgctgtcgtgttcattgctgcttagcaatgatacttggttttaatgatcagggaatggtttggactttgaatgttgtatctgagcttaggtttggtttgaagaatttagttagagcacgttctttgtttcaattttagaatcaagtgttttcagttatttgctacttgggtatgaagtttttcagttgctagtgttgtggatcttggtagttttttgttgggcctttttagggtctgttgagggggaaagggtttttcctacctgctatattgcactggaagacaatgcattctgcaaatgagtttacaacactagccaacaagagtttgatttatgagtctcgacaacttaactttgcaatataagctccgtaacaagggcacggatgggcacagaggaacagaaacgccaaactccaagaaaggcgcagactcgggagaggtgatgataaaggatatttgctgaccaaacttgcagtagttcttctttaaggaaatagaacttggcgtcatgacacatagaaatatgctctggacacatcagtctgttaatcctgaatgggagcaaagacatgcccaagttcaaccaggaagttcctattatgcaggcactgcaagtgattcatccaacctgggtgtgcaagttgctgtgggagttccaggaaatactgctaatgttggtatatgtgatttgcggaatcatgagtgcccgcatgttcataattcatacccacatgccggtgttacatcaagatttgtcttcccaactactatgtacaaccctagcatgtcagcagcagctgtcaacatatatattcctcagactcaaagctttggactaggcagtgtgctaccaccatctttacataatcaagttcccacaggaactattgatgagagtagcagcagtgtcaattttggtgatagtgctattggattcatgaaaaggaaaaatgcagtagttgctggaagccatcattttcttcatggatttgctgggtcaagttcatctgttcatgtgcctcagaatcctgtgcatgggccatggaatccttcatctcaatcaaattgtttacccagttctgcagcttcaaacctaccagaataccacaatagtaatgggtggccatacttagaagaatcttctgcagatgcttcaaacagtttcagttctgtggctgcttgccaggagctggcacctcatgcctgcaggttatggagtaccacagtggggatatagtaatgcagtggtcaatcctccaggaactgcagacatgtcaaatgggccactgcctcatttctgccagaatagtatgcaggcacctcaaatacaagtgtcccatcaacagttcatcggtaacaatgcggtgcatggtttaaatccttctgccacaggccttcctttacatccaagaatgctggctctcccattcaatgctgagcacacttttgggcatccaatgcacccacctctgataaaccaagttaacaatggggctttaagaattctgccataccagaatgctacagtgatggaccattcaaggatttatgaagcaggacatgttatcgatgaacatagcgatatgcgtttagatgtggataacatgacttatgaggaacttgtagcattgcaagagcagataggcgatgtcaatactggtttgacagaaagctatatccaggaaaacttgaggtccagttttcatgttccaggagcagctagcatgtctgatcagttttctgagctttctttggagaatgatgcttgcataatatgccaggaggagtataaagctaaagaacttataggaacccttgaatgcggtcacaagtaccatgtgaattgcataaagcaatggttgatgatgaaaaacctgtgccccatatgcaagacgacagctttgtcatcagatagaaggaacggatgaccgtcgccaataatgttgttggttgtttaccgcgtggcaaattagcgtggattttgtatatagacatggttgcctttatttgcccgtcccctttgctgtggacataaactgagcttcgaaacactgtacagatattttgtaggatgttttagacgttaaatggcacaatggtgtgtaaagctcccatgactgccttggtagatgccctcttcctttacattgtacattgtatttatctttactcttcaaaaaaagaagcttgaaaaccgtaagttctgtacattctggaattgaaagaaccggaaattttcttcacctgtagagctttttgctagagctttatgagattcagtggtgaatcttgaagtcgtg

SEQ ID NO: 60266 - DNA, 2459 bp, Zea Mays
aggagatagctgtgccgccctgctgtcgtgttcattgctgcttagcaatgatacttggttttaatgatcagggaatggtttggactttgaatgttgtatctgagcttaggtttggtttgaagaatttagttagagcacgttctttgtttcaattttagaatcaagtgttttcagttatttgctacttgggtatgaagtttttcagttgctagtgttgtggatcttggtagttttttgttgggcctttttagggtctgttgagggggaaagggtttttcctacctgctatattgcactggaagacaatgcattctgcaaatgagtttacaacactagccaacaagagtttggtagggttgttgcgcttgcaatcatatatccatataacatctcgtcaaagttaatgccatttaatctatcctttttgtggttgctttagatttatgagtctcgacaacttaactttgcaatataagctccgtaacaagggcacggatgggcacagaggaacagaaacgccaaactccaagaaaggcgcagactcgggagaggtgatgataaaggatatttgctgaccaaacttgcagtagttcttctttaaggaaatagaacttggcgtcatgacacatagaaatatgctctggacacatcagtctgttaatcctgaatgggagcaaagacatgcccaagttcaaccaggaagttcctattatgcaggcactgcaagtgattcatccaacctgggtgtgcaagttgctgtgggagttccaggaaatactgctaatgttggtatatgtgatttgcggaatcatgagtgcccgcatgttcataattcatacccacatgccggtgttacatcaagatttgtcttcccaactactatgtacaaccctagcatgtcagcagcagctgtcaacatatatattcctcagactcaaagctttggactaggcagtgtgctaccaccatctttacataatcaagttcccacaggaactattgatgagagtagcagcagtgtcaattttggtgatagtgctattggattcatgaaaaggaaaaatgcagtagttgctggaagccatcattttcttcatggatttgctgggtcaagttcatctgttcatgtgcctcagaatcctgtgcatgggccatggaatccttcatctcaatcaaattgtttacccagttctgcagcttcaaacctaccagaataccacaatagtaatgggtggccatacttagaagaatcttctgcagatgcttcaaacagtttcagttctgtggctgcttgccaggagctggcacctcatggtaactatttatatccagcttgtcacataagccagtccaatacatgggttccacagcctgcaggttatggagtaccacagtggggatatagtaatgcagtggtcaatcctccagacatgtcaaatgggccactgcctcatttctgccagaatagtatgcaggcacctcaaatacaagtgtcccatcaacagttcatcggtaacaatgcggtgcatggtttaaatccttctgccacaggccttcctttacatccaagaatgctggctctcccattcaatgctgagcacacttttgggcatccaatgcacccacctctgataaaccaagttaacaatggggctttaagaattctgccataccagaatgctacagtgatggaccattcaaggatttatgaagcaggacatgttatcgatgaacatagcgatatgcgtttagatgtggataacatgacttatgaggaacttgtagcattgcaagagcagataggcgatgtcaatactggtttgacagaaagctatatccaggaaaacttgaggtccagttttcatgttccaggagcagctagcatgtctgatcagttttctgagctttctttggagaatgatgcttgcataatatgccaggaggagtataaagctaaagaacttataggaacccttgaatgcggtcacaagtaccatgtgaattgcataaagcaatggttgatgatgaaaaacctgtgccccatatgcaagacgacagctttgtcatcagatagaaggaacggatgaccgtcgccaataatgttgttggttgtttaccgcgtggcaaattagcgtggattttgtatatagacatggttgcctttatttgcccgtcccctttgctgtggacataaactgagcttcgaaacactgtacagatattttgtaggatgttttagacgttaaatggcacaatggtgtgtaaagctcccatgactgccttggtagatgccctcttcctttacattgtacattgtatttatctttactcttcaaaaaaagaagcttgaaaaccgtaagttctgtacattctggaattgaaagaaccggaaattttcttcacctgtagagctttttgctagagctttatgagattcagtggtgaatcttgaagtcgtg

SEQ ID NO: 60267 - DNA, 2465 bp, Zea Mays
aggagatagctgtgccgccctgctgtcgtgttcattgctgcttagcaatgatacttggttttaatgatcagggaatggtttggactttgaatgttgtatctgagcttaggtttggtttgaagaatttagttagagcacgttctttgtttcaattttagaatcaagtgttttcagttatttgctacttgggtatgaagtttttcagttgctagtgttgtggatcttggtagttttttgttgggcctttttagggtctgttgagggggaaagggtttttcctacctgctatattgcactggaagacaatgcattctgcaaatgagtttacaacactagccaacaagagtttggtagggttgttgcgcttgcaatcatatatccatataacatctcgtcaaagttaatgccatttaatctatcctttttgtggttgctttagatttatgagtctcgacaacttaactttgcaatataagctccgtaacaagggcacggatgggcacagaggaacagaaacgccaaactccaagaaaggcgcagactcgggagaggtgatgataaaggatatttgctgaccaaacttgcagtagttcttctttaaggaaatagaacttggcgtcatgacacatagaaatatgctctggacacatcagtctgttaatcctgaatgggagcaaagacatgcccaagttcaaccaggaagttcctattatgcaggcactgcaagtgattcatccaacctgggtgtgcaagttgctgtgggagttccaggaaatactgctaatgttggtatatgtgatttgcggaatcatgagtgcccgcatgttcataattcatacccacatgccggtgttacatcaagatttgtcttcccaactactatgtacaaccctagcatgtcagcagcagctgtcaacatatatattcctcagactcaaagctttggactaggcagtgtgctaccaccatctttacataatcaagttcccacaggaactattgatgagagtagcagcagtgtcaattttggtgatagtgctattggattcatgaaaaggaaaaatgcagtagttgctggaagccatcattttcttcatggatttgctgggtcaagttcatctgttcatgtgcctcagaatcctgtgcatgggccatggaatccttcatctcaatcaaattgtttacccagttctgcagcttcaaacctaccagaataccacaatagtaatgggtggccatacttagaagaatcttctgcagatgcttcaaacagtttcagttctgtggctgcttgccaggagctggcacctcatggtaactatttatatccagcttgtcacataagccagtccaatacatgggttccacagcctgcaggttatggagtaccacagtggggatatagtaatgcagtggtcaatcctccagctgcagacatgtcaaatgggccactgcctcatttctgccagaatagtatgcaggcacctcaaatacaagtgtcccatcaacagttcatcggtaacaatgcggtgcatggtttaaatccttctgccacaggccttcctttacatccaagaatgctggctctcccattcaatgctgagcacacttttgggcatccaatgcacccacctctgataaaccaagttaacaatggggctttaagaattctgccataccagaatgctacagtgatggaccattcaaggatttatgaagcaggacatgttatcgatgaacatagcgatatgcgtttagatgtggataacatgacttatgaggaacttgtagcattgcaagagcagataggcgatgtcaatactggtttgacagaaagctatatccaggaaaacttgaggtccagttttcatgttccaggagcagctagcatgtctgatcagttttctgagctttctttggagaatgatgcttgcataatatgccaggaggagtataaagctaaagaacttataggaacccttgaatgcggtcacaagtaccatgtgaattgcataaagcaatggttgatgatgaaaaacctgtgccccatatgcaagacgacagctttgtcatcagatagaaggaacggatgaccgtcgccaataatgttgttggttgtttaccgcgtggcaaattagcgtggattttgtatatagacatggttgcctttatttgcccgtcccctttgctgtggacataaactgagcttcgaaacactgtacagatattttgtaggatgttttagacgttaaatggcacaatggtgtgtaaagctcccatgactgccttggtagatgccctcttcctttacattgtacattgtatttatctttactcttcaaaaaaagaagcttgaaaaccgtaagttctgtacattctggaattgaaagaaccggaaattttcttcacctgtagagctttttgctagagctttatgagattcagtggtgaatcttgaagtcgtg

SEQ ID NO: 60268 - DNA, 2440 bp, Zea Mays
aggagatagctgtgccgccctgctgtcgtgttcattgctgcttagcaatgatacttggttttaatgatcagggaatggtttggactttgaatgttgtatctgagcttaggtttggtttgaagaatttagttagagcacgttctttgtttcaattttagaatcaagtgttttcagttatttgctacttgggtatgaagtttttcagttgctagtgttgtggatcttggtagttttttgttgggcctttttagggtctgttgagggggaaagggtttttcctacctgctatattgcactggaagacaatgcattctgcaaatgagtttacaacactagccaacaagagtttggtagggttgttgcgcttgcaatcatatatccatataacatctcgtcaaagttaatgccatttaatctatcctttttgtggttgctttagatttatgagtctcgacaacttaactttgcaatataagctccgtaacaagggcacggatgggcacagaggaacagaaacgccaaactccaagaaaggcgcagactcggtaacggacaagtaaataaatgtgctagggagaggtgatgataaaggatatttgctgaccaaacttgcagtagttcttctttaaggaaatagaacttggcgtcatgacacatagaaatatgctctggacacatcagtctgttaatcctgaatgggagcaaagacatgcccaagttcaaccaggaagttcctattatgcaggcactgcaagtgattcatccaacctgggtgtgcaagttgctgtgggagttccaggaaatactgctaatgttggtatatgtgatttgcggaatcatgagtgcccgcatgttcataattcatacccacatgccggtgttacatcaagatttgtcttcccaactactatgtacaaccctagcatgtcagcagcagctgtcaacatatatattcctcagactcaaagctttggactaggcagtgtgctaccaccatctttacataatcaagttcccacaggaactattgatgagagtagcagcagtgtcaattttggtgatagtgctattggattcatgaaaaggaaaaatgcagtagttgctggaagccatcattttcttcatggatttgctgggtcaagttcatctgttcatgtgcctcagaatcctgtgcatgggccatggaatccttcatctcaatcaaattgtttacccagttctgcagcttcaaacctaccagaataccacaatagtaatgggtggccatacttagaagaatcttctgcagatgcttcaaacagtttcagttctgtggctgcttgccaggagctggcacctcatgcctgcaggttatggagtaccacagtggggatatagtaatgcagtggtcaatcctccaggaactgcagacatgtcaaatgggccactgcctcatttctgccagaatagtatgcaggcacctcaaatacaagtgtcccatcaacagttcatcggtaacaatgcggtgcatggtttaaatccttctgccacaggccttcctttacatccaagaatgctggctctcccattcaatgctgagcacacttttgggcatccaatgcacccacctctgataaaccaagttaacaatggggctttaagaattctgccataccagaatgctacagtgatggaccattcaaggatttatgaagcaggacatgttatcgatgaacatagcgatatgcgtttagatgtggataacatgacttatgaggaacttgtagcattgcaagagcagataggcgatgtcaatactggtttgacagaaagctatatccaggaaaacttgaggtccagttttcatgttccaggagcagctagcatgtctgatcagttttctgagctttctttggagaatgatgcttgcataatatgccaggaggagtataaagctaaagaacttataggaacccttgaatgcggtcacaagtaccatgtgaattgcataaagcaatggttgatgatgaaaaacctgtgccccatatgcaagacgacagctttgtcatcagatagaaggaacggatgaccgtcgccaataatgttgttggttgtttaccgcgtggcaaattagcgtggattttgtatatagacatggttgcctttatttgcccgtcccctttgctgtggacataaactgagcttcgaaacactgtacagatattttgtaggatgttttagacgttaaatggcacaatggtgtgtaaagctcccatgactgccttggtagatgccctcttcctttacattgtacattgtatttatctttactcttcaaaaaaagaagcttgaaaaccgtaagttctgtacattctggaattgaaagaaccggaaattttcttcacctgtagagctttttgctagagctttatgagattcagtggtgaatcttgaagtcgtg

SEQ ID NO: 60269 - DNA, 2097 bp, Zea Mays
gtctggatcctcctatccaattccgtctcgcgttcctctcgtcggctcgtcgctctccgagccgcgaaatggcgcctcctacctctgcatcggcgcggccgctatccctccccctcaccgtccctctctcctgtcaccgctcccacttgctccccgcgcccaacgctcgcctcctcacccggcgccgcgtcgcgctcgcgccgacccggcctggcgccacgctcctatccagcctcagtgacgcccgggaggaggaggaggatgaaagtggtttctatgaggaggatgagcaacaggaattcgaggatgaggaggaacaggggtacgacggggagaacgaggagctggtcgaggtgggatacgtgtcaggcgcgcacggggtgcgcggcgacgtcctcgtcacgccacgcaccgactttccggagctccgccttgccacgccggggacgagatggctgagggctcgagctgctggcaagcagcaggtcagggaattcgagcttgttcggggaagggcgcacacggggaagaagagttggatcgtcagctttgatggcgtcaacaacctggacgaggctaggcaaatagttggttcagctgtacttgtgaaagctcgagatagaccagaaattgaggatgatgaattctattcacttgaccttgttggaatgagagttattgtcaaggatacaggcaagctcgtaggaacagttggtcaggttttcaatttcggaggtggagatcttctacagagaaatgcggattacacctccgaaggggttacttgagctcaattctcgttctgacaagagatcgaagaaagaaaggcgtgcgatggttaggagtggaaggacaggaaaaggtttcaacgtcgtgtaattgcaggaaagaaggtactctccgaaatggaccaagtccatgttctggaaggtttggtatcaggggacaaggtccaaaaggcatcacttgcagagcagattgggagcattgactttcaattgttccgacatgcagtacattgtgttagcaagcagattgagagctcttcaatgaatttgctcgctaactcttcactgtcaaggaaaaaagtgatcaaaataccatacaagactctcatcaaccttggggacaaagctgaacatgcattcagtactgaatttaaaaatggacttgacattcttttgaagtccaaagcagctattgtgcttgttagaaacggctctgactctgatactgagtttctgagtttgctcaattcttttagtgaattaatgaaggttgtagaaaataaagtttctccccctttaattgtcattgccccagctggtcatgtggagtcagttcggaaatgcctggtagagaatgactattttggttttgacactcaaaaggtgtgggtgctggaagaggtggagcttccagttgtcagtatatgctcggagggaaacagaaaaaaagttctgatgaagtctccctgggagataataaaaaagccaacaggttctggagcaatcttcagcttactgttatcaaacaaaattttggaaaccctcaatgaaatgggtgtacagtatacacagatctgcagctcatccaacaaaccaatcatcgggcatcctttgctctttggggctgtcgcttcccgcggggctgatgttggcatccaggtctccaagaccggtgaaacattagacgatttcgacgtgatcctttccatcgaccagctgaacaagatgtgccgagatgtcacccagatcaggttctccgctcgctccgaacagaacgtgcacgtcgagcatgtcgacgggcagtgggtcgccgtccagccggaggtggcaaattcccatcgcctgcatgccgaggttacgagtgtcttagactcttgcgctcctgataagctgtgtgtcatggagattgttgagcaataaaagtttcttgcctgtgtactgtacataatcacaagtacttgatagatgcgtgaggtttttcttctgctattgttttgctatgaatttttaggggagcatctacgaaggggaataccagccacccactgccaattctactggtcccagaaggattaaaaacttgttagag

SEQ ID NO: 60270 - DNA, 2235 bp, Zea Mays
gtctggatcctcctatccaattccgtctcgcgttcctctcgtcggctcgtcgctctccgagccgcgaaatggcgcctcctacctctgcatcggcgcggccgctatccctccccctcaccgtccctctctcctgtcaccgctcccacttgctccccgcgcccaacgctcgcctcctcacccggcgccgcgtcgcgctcgcgccgacccggcctggcgccacgctcctatccagcctcagtgacgcccgggaggaggaggaggatgaaagtggtttctatgaggaggatgagcaacaggaattcgaggatgaggaggaacaggggtacgacggggagaacgaggagctggtcgaggtgggatacgtgtcaggcgcgcacggggtgcgcggcgacgtcctcgtcacgccacgcaccgactttccggagctccgccttgccacgccggggacgagatggctgagggctcgagctgctggcaagcagcaggtcagggaattcgagcttgttcggggaagggcgcacacggggaagaagagttggatcgtcagctttgatggcgtcaacaacctggacgaggctaggcaaatagttggttcagctgtacttgtgaaagctcgagatagaccagaaattgaggatgatgaattctattcacttgaccttgttggaatgagagttattgtcaaggatacaggcaagctcgtaggaacagttggtcaggttttcaatttcggaggtggagatcttctacaggtgataatgggctcttctgagggtactgctgttgatccagattcagaaaatcaagattcaatttcatcacgtgagcatgtgtggattccatttgctgaagatattgtacctgatgttgatatggcaagcagagaaatgcggattacacctccgaaggggttacttgagctcaattctcgttctgacaagagatcgaagaaagaaaggcgtgcgatggagtggaaggacaggaaaaggtttcaacgtcgtgtaattgcaggaaagaaggtactctccgaaatggaccaagtccatgttctggaaggtttggtatcaggggacaaggtccaaaaggcatcacttgcagagcagattgggagcattgactttcaattgttccgacatgcagtacattgtgttagcaagcagattgagagctcttcaatgaatttgctcgctaactcttcactgtcaaggaaaaaagtgatcaaaataccatacaagactctcatcaaccttggggacaaagctgaacatgcattcagtactgaatttaaaaatggacttgacattcttttgaagtccaaagcagctattgtgcttgttagaaacggctctgactctgatactgagtttctgagtttgctcaattcttttagtgaattaatgaaggttgtagaaaataaagtttctccccctttaattgtcattgccccagctggtcatgtggagtcagttcggaaatgcctggtagagaatgactattttggttttgacactcaaaagaaccattcacaggtgtgggtgctggaagaggtggagcttccagttgtcagtatatgctcggagggaaacagaaaaaaagttctgatgaagtctccctgggagataataaaaaagccaacaggttctggagcaatcttcagcttactgttatcaaacaaaattttggaaaccctcaatgaaatgggtgtacagtatacacagatctgcagctcatccaacaaaccaatcatcgggcatcctttgctctttggggctgtcgcttcccgcggggctgatgttggcatccaggtctccaagaccggtgaaacattagacgatttcgacgtgatcctttccatcgaccagctgaacaagatgtgccgagatgtcacccagatcaggttctccgctcgctccgaacagaacgtgcacgtcgagcatgtcgacgggcagtgggtcgccgtccagccggaggtggcaaattcccatcgcctgcatgccgaggttacgagtgtcttagactcttgcgctcctgataagctgtgtgtcatggagattgttgagcaataaaagtttcttgcctgtgtactgtacataatcacaagtacttgatagatgcgtgaggtttttcttctgctattgttttgctatgaatttttaggggagcatctacgaaggggaataccagccacccactgccaattctactggtcccagaaggattaaaaacttgttagag

SEQ ID NO: 60271 - DNA, 2182 bp, Zea Mays
gtctggatcctcctatccaattccgtctcgcgttcctctcgtcggctcgtcgctctccgagccgcgaaatggcgcctcctacctctgcatcggcgcggccgctatccctccccctcaccgtccctctctcctgtcaccgctcccacttgctccccgcgcccaacgctcgcctcctcacccggcgccgcgtcgcgctcgcgccgacccggcctggcgccacgctcctatccagcctcagtgacgcccgggaggaggaggaggatgaaagtggtttctatgaggaggatgagcaacaggaattcgaggatgaggaggaacaggggtacgacggggagaacgaggagctggtcgaggtgggatacgtgtcaggcgcgcacggggtgcgcggcgacgtcctcgtcacgccacgcaccgactttccggagctccgccttgccacgccggggacgagatggctgagggctcgagctgctggcaagcagcaggtcagggaattcgagcttgttcggggaagggcgcacacggggaagaagagttggatcgtcagctttgatggcgtcaacaacctggacgaggctaggcaaatagttggttcagctgtacttgtgaaagctcgagatagaccagaaattgaggatgatgaattctattcacttgaccttgttggaatgagagttattgtcaaggatacaggcaagctcgtaggaacagttggtcaggttttcaatttcggaggtggagatcttctacaggtgataatgggctcttctgagggtactgctgttgatccagattcagaaaatcaagattcaatttcatcacgtgagcatgtgtggattccatttgctgaagatattgtacctgatgttgatatggcaagcagagaaatgcggattacacctccgaaggggttacttgagctcaattctcgttctgacaagagatcgaagaaagaaaggcgtgcgatggttaggagtggaaggacaggaaaaggtttcaacgtcgtgtaattgcaggaaagaaggtactctccgaaatggaccaagtccatgttctggaaggtttggtatcaggggacaaggtccaaaaggcatcacttgcagagcagattgggagcattgactttcaattgttccgacatgcagtacattgtgttagcaagcagattgagagctcttcaatgaatttgctcgctaactcttcactgtcaaggaaaaaagtgatcaaaataccatacaagactctcatcaaccttggggacaaagctgaacatgcattcagtactgaatttaaaaatggacttgacattcttttgaagtccaaagcagctattgtgcttgttagaaacggctctgactctgatactgagtttctgagtttgctcaattcttttagtgaattaatgaagctggtcatgtggagtcagttcggaaatgcctggtagagaatgactattttggttttgacactcaaaaggtgtgggtgctggaagaggtggagcttccagttgtcagtatatgctcggagggaaacagaaaaaaagttctgatgaagtctccctgggagataataaaaaagccaacaggttctggagcaatcttcagcttactgttatcaaacaaaattttggaaaccctcaatgaaatgggtgtacagtatacacagatctgcagctcatccaacaaaccaatcatcgggcatcctttgctctttggggctgtcgcttcccgcggggctgatgttggcatccaggtctccaagaccggtgaaacattagacgatttcgacgtgatcctttccatcgaccagctgaacaagatgtgccgagatgtcacccagatcaggttctccgctcgctccgaacagaacgtgcacgtcgagcatgtcgacgggcagtgggtcgccgtccagccggaggtggcaaattcccatcgcctgcatgccgaggttacgagtgtcttagactcttgcgctcctgataagctgtgtgtcatggagattgttgagcaataaaagtttcttgcctgtgtactgtacataatcacaagtacttgatagatgcgtgaggtttttcttctgctattgttttgctatgaatttttaggggagcatctacgaaggggaataccagccacccactgccaattctactggtcccagaaggattaaaaacttgttagag

SEQ ID NO: 60272 - DNA, 2092 bp, Zea Mays
gtctggatcctcctatccaattccgtctcgcgttcctctcgtcggctcgtcgctctccgagccgcgaaatggcgcctcctacctctgcatcggcgcggccgctatccctccccctcaccgtccctctctcctgtcaccgctcccacttgctccccgcgcccaacgctcgcctcctcacccggcgccgcgtcgcgctcgcgccgacccggcctggcgccacgctcctatccagcctcagtgacgcccgggaggaggaggaggatgaaagtggtttctatgaggaggatgagcaacaggaattcgaggatgaggaggaacaggggtacgacggggagaacgaggagctggtcgaggtgggatacgtgtcaggcgcgcacggggtgcgcggcgacgtcctcgtcacgccacgcaccgactttccggagctccgccttgccacgccggggacgagatggctgagggctcgagctgctggcaagcagcaggtcagggaattcgagcttgttcggggaagggcgcacacggggaagaagagttggatcgtcagctttgatggcgtcaacaacctggacgaggctaggcaaatagttggttcagctgtacttgtgaaagctcgagatagaccagaaattgaggatgatgaattctattcacttgaccttgttggaatgagagttattgtcaaggatacaggcaagctcgtaggaacagttggtcaggttttcaatttcggaggtggagatcttctacagagaaatgcggattacacctccgaaggggttacttgagctcaattctcgttctgacaagagatcgaagaaagaaaggcgtgcgatggagtggaaggacaggaaaaggtttcaacgtcgtgtaattgcaggaaagaaggtactctccgaaatggaccaagtccatgttctggaaggtttggtatcaggggacaaggtccaaaaggcatcacttgcagagcagattgggagcattgactttcaattgttccgacatgcagtacattgtgttagcaagcagattgagagctcttcaatgaatttgctcgctaactcttcactgtcaaggaaaaaagtgatcaaaataccatacaagactctcatcaaccttggggacaaagctgaacatgcattcagtactgaatttaaaaatggacttgacattcttttgaagtccaaagcagctattgtgcttgttagaaacggctctgactctgatactgagtttctgagtttgctcaattcttttagtgaattaatgaaggttgtagaaaataaagtttctccccctttaattgtcattgccccagctggtcatgtggagtcagttcggaaatgcctggtagagaatgactattttggttttgacactcaaaaggtgtgggtgctggaagaggtggagcttccagttgtcagtatatgctcggagggaaacagaaaaaaagttctgatgaagtctccctgggagataataaaaaagccaacaggttctggagcaatcttcagcttactgttatcaaacaaaattttggaaaccctcaatgaaatgggtgtacagtatacacagatctgcagctcatccaacaaaccaatcatcgggcatcctttgctctttggggctgtcgcttcccgcggggctgatgttggcatccaggtctccaagaccggtgaaacattagacgatttcgacgtgatcctttccatcgaccagctgaacaagatgtgccgagatgtcacccagatcaggttctccgctcgctccgaacagaacgtgcacgtcgagcatgtcgacgggcagtgggtcgccgtccagccggaggtggcaaattcccatcgcctgcatgccgaggttacgagtgtcttagactcttgcgctcctgataagctgtgtgtcatggagattgttgagcaataaaagtttcttgcctgtgtactgtacataatcacaagtacttgatagatgcgtgaggtttttcttctgctattgttttgctatgaatttttaggggagcatctacgaaggggaataccagccacccactgccaattctactggtcccagaaggattaaaaacttgttagag

SEQ ID NO: 60273 - DNA, 2226 bp, Zea Mays
gtctggatcctcctatccaattccgtctcgcgttcctctcgtcggctcgtcgctctccgagccgcgaaatggcgcctcctacctctgcatcggcgcggccgctatccctccccctcaccgtccctctctcctgtcaccgctcccacttgctccccgcgcccaacgctcgcctcctcacccggcgccgcgtcgcgctcgcgccgacccggcctggcgccacgctcctatccagcctcagtgacgcccgggaggaggaggaggatgaaagtggtttctatgaggaggatgagcaacaggaattcgaggatgaggaggaacaggggtacgacggggagaacgaggagctggtcgaggtgggatacgtgtcaggcgcgcacggggtgcgcggcgacgtcctcgtcacgccacgcaccgactttccggagctccgccttgccacgccggggacgagatggctgagggctcgagctgctggcaagcagcaggtcagggaattcgagcttgttcggggaagggcgcacacggggaagaagagttggatcgtcagctttgatggcgtcaacaacctggacgaggctaggcaaatagttggttcagctgtacttgtgaaagctcgagatagaccagaaattgaggatgatgaattctattcacttgaccttgttggaatgagagttattgtcaaggatacaggcaagctcgtaggaacagttggtcaggttttcaatttcggaggtggagatcttctacaggtgataatgggctcttctgagggtactgctgttgatccagattcagaaaatcaagattcaatttcatcacgtgagcatgtgtggattccatttgctgaagatattgtacctgatgttgatatggcaagcagagaaatgcggattacacctccgaaggggttacttgagctcaattctcgttctgacaagagatcgaagaaagaaaggcgtgcgatggttaggagtggaaggacaggaaaaggtttcaacgtcgtgtaattgcaggaaagaaggtactctccgaaatggaccaagtccatgttctggaaggtttggtatcaggggacaaggtccaaaaggcatcacttgcagagcagattgggagcattgactttcaattgttccgacatgcagtacattgtgttagcaagcagattgagagctcttcaatgaatttgctcgctaactcttcactgtcaaggaaaaaagtgatcaaaataccatacaagactctcatcaaccttggggacaaagctgaacatgcattcagtactgaatttaaaaatggacttgacattcttttgaagtccaaagcagctattgtgcttgttagaaacggctctgactctgatactgagtttctgagtttgctcaattcttttagtgaattaatgaaggttgtagaaaataaagtttctccccctttaattgtcattgccccagctggtcatgtggagtcagttcggaaatgcctggtagagaatgactattttggttttgacactcaaaaggtgggtgctggaagaggtggagcttccagttgtcagtatatgctcggagggaaacagaaaaaaagttctgatgaagtctccctgggagataataaaaaagccaacaggttctggagcaatcttcagcttactgttatcaaacaaaattttggaaaccctcaatgaaatgggtgtacagtatacacagatctgcagctcatccaacaaaccaatcatcgggcatcctttgctctttggggctgtcgcttcccgcggggctgatgttggcatccaggtctccaagaccggtgaaacattagacgatttcgacgtgatcctttccatcgaccagctgaacaagatgtgccgagatgtcacccagatcaggttctccgctcgctccgaacagaacgtgcacgtcgagcatgtcgacgggcagtgggtcgccgtccagccggaggtggcaaattcccatcgcctgcatgccgaggttacgagtgtcttagactcttgcgctcctgataagctgtgtgtcatggagattgttgagcaataaaagtttcttgcctgtgtactgtacataatcacaagtacttgatagatgcgtgaggtttttcttctgctattgttttgctatgaatttttaggggagcatctacgaaggggaataccagccacccactgccaattctactggtcccagaaggattaaaaacttgttagag

SEQ ID NO: 60274 - DNA, 1278 bp, Zea Mays
accacagccaccgcaagatcccgggcgcccaatcacccttctccacggagattcctagcctcagccacagcccacatctgcctcatcgtctccctgaggctcccgtcgcgccaagtgttccagcatcccggacgcaccaatggcatccaagcatcagatttattttttatttttctggcaacattcaagatagaacttgctcgcggcggtgtttccctccgtcgctttaaataccttcgtcgcctccacaagtccacagcatctcaagccaccatcgatctgcaagtctcgctacgtagcagtgcaataaaaaaagcagccgcaatggcgagcagcaccatggccctctcctccacggccttcgccggcaaggccgtgaacgtgccgtcgtcgtccgccttcggcgaggcccgcgtgacgatgcgcaagacggcggcgaaggccaagccagcggcggcgtccgggagcccgtggtacggccccgaccgcgtgctgtacctgggcccactgtccggcgagccgccgagctacctgacgggcgagttcccgggcgactacggctgggacaccgcggggctgtcggcggacccggagacgttcgccaagaaccgggagctggaggtgatccactccccgctgggccatgctgggcgcgctcggctgcgtcttcccggagcttctcgcccgcaacggcgtcaagttcggcgaggccgtgtggttcaaggccggctcccagatcttcagcgagggcgggctggactacctcgggaacccgagcctcatccacgcgcagagcatccttgccatctgggcctgccaggtcgtgctcatgggcgccgtcgagggctaccgcatcgccggcggcccgctcggcgaggccttcgccgagctcaaggtcaaggagctcaagaacggccgcctcgccatgttctccatgttcggattcttcgtccaggccatcgtcaccgggaagggcccgctcgagaacctcgctgaccacattgccgaccccgtcaacaacaacgcttgggcctacgccaccaacttcgtccccggcaagtgagggaggcgccgccggtgacctttaggtgtccggatgcatgtgagcgcacgctggttttcggtttgtaccatgatgtaaactattgttcaatcgacaaggaataattgtgttcattgtcattatttttcccctctctttttcgttcctgccgattttatctaaatcaggtgtttgataaacggcatgattggtttcctgcttggccgtgtccagac

SEQ ID NO: 60275 - DNA, 3066 bp, Zea Mays
aaacttggccgcagtgaagggaggggaggagaaagggttttggaattaggcatcggccgccgttgcgttggtgtgagcaagtgaaccaggccgaaaccgaagctaccgccaccaccaccccgccctcgtctccctgtccccgagtcccagtaggggatcccggcggtgaggatgagcggcggcggagctggagggaagggggcggcggcgcctgttccgcccgggtcgaggaagctggtgcagggccttaaggagatcgtgaaccgccccgaggcggagatctacgccgcactgcgcgagtgcggcatggaccccgacgagacgatactttccaagaggtaaagagcaagcgcgacaagaagaaagagattaaagaggttcctgagacaagatatcgatcagcaaatagttctactaatcgaggccttagaagtggtgtagatcgtggtggacggaacaattctatgcactccagctctactgataacatgacctcaaggccaccagggtctggtactgcatcaggtacttccagtcagaggcaaacagttgcaagtccttctgcaaacaaacatatggttgctgatggaccagctgcatcattgcaatcatcgtctgggtttcagcatggtggttggtctgggacacctggtcagttgtcgatggctgacattgtgaaaatgggccggcctcagggaaagacttctatcaaacctgtggtcacagctgacagaggttatgctggacagtacccatctttgccaagcacaaaccagaatctgaaacaatctggaagcatggttcccccaacagagcttgacaaggggttacaacctgcccaagattcggttcaggttaaggatcatgatcattctactgctgacagcaagctcccatatggtactgactggtctccacaagatggcccgacatttgcgaaccaatcttcccttcctgagccatctggtgatccgtccttgtatgaggcatcgtttcagtcatctacattggttactgatgtagttaattcacatgaaaattcacacttggatgaaaacgacacctttgcaatgggaccagcacctgcctctgagagacacctggatcctagtgacggtatttctgagtacaatgatgtaatattgaacaactcaagttcctatcagcctcataattactcttacacagaacaacaagaagttgaggattccagtgctgatgtatcagcagcagcagcaaacttccagagtttaagcctacataatgatgagttagctgcaaaaaagtctgcagaagataaccctgcagtgataattcctgaccacttgcaagttacaaatacagaatgtgtcaagttgagctttggcagttttggatctggtgcattttctgggttactcccacaaaataccactgatagcaatgtggaattccctgctcgagaggaatctgcaccagtagatcaaatagatgccaggaatcaagattactatgaaagtggtgctgtaacttcaccagcagacgaaaatcttgaggccatgcttggagctaacatggagaatgtagatgcgccttctgtttcacaggctaatgagctcaggcaggacgtacttgatccttctgaacttcaatatgacgtcccatcagttccaagtcatgcttattcaaacacggacactttacagcctagcacaattgaggagccacaaggaaacaaccaagcacatactctttcccatttgtcaaacttaatgcaagcaaatcctttgagcaccagcagcctattggggtcaaatcaaaatcatgcaactcttcatggcttagagtttgatttaccgccttatctgggagcaaaatataacgcaggctcaactacaaatcctagaccacccatatccatgcagcaggaggcactgaaagcaggggttttctccaacgcccagtctacacagagtcttccaagtactagcattcagacggggcttcctctgccacagcaattagcacatcacccttactctcagccaactttaccaatcacacattttccaaatatggttgggtatccgtatttgccacaaaactatgctacttacctatcttcaggcaccttccagcaagcatacccgagtagcggaccattccatcagtctgctgctgctgctttgctggcatctggtatgaagtactcgactccagagtataagaacaacctgtctgccacaggcttacaacagcaacatcagccacaaccacaaccactttcatcagtcatctctggttatggaggctttggaagctcaagtaatatacaaggaaattttacccttagtcagagtaccggctctgcatcagctcttgggtttgatgaagcattgagcagacagtacaaaaacaccagtcaatacatggctctccagcagggcgacaactctggaatgtgggttcatggctctggttcaagagcggcctcgacgcttccgcctaaccacttctatggttaccagggacagagtcagctgggtggctttgctcgggcgcagcagccacagccttcccaatttggaggccatgggtacccaactgtctaccagtctcagggacaggagcacccccagaaccttgctgagggcagcctgaacggcttccaggtcacaccgtctcagccatctcatccgagctggcagcatcagcacacgtactgagccctcctgtactccctggttagggtggctcttgtgctgtcacaagccaagtttcgcgtgcttgtgccctcactcgatgcagagtatgctgctcggattcagtgagcgctgagagggtcccaggcatacaacagttagagcgttttaacatgttgcgtgtgttgccagactgatgcattgcggtttgttttcgatagtgagttatatgtgcggaggcgcagtcctgtataactgagacatgataacctaacaagcagtcgtttctgtttcccaagagttggctgctcttagcttgagctgatgattgactgtttgcttgcagttttggtcatgattttactgcttcaaaaacatttccaat

SEQ ID NO: 60276 - DNA, 2788 bp, Zea Mays
aaacttggccgcagtgaagggaggggaggagaaagggttttggaattaggcatcggccgccgttgcgttggtgtgagcaagtgaaccaggccgaaaccgaagctaccgccaccaccaccccgccctcgtctccctgtccccgagtcccagtaggggatcccggcggtgaggatgagcggcggcggagctggagggaagggggcggcggcgcctgttccgcccgggtcgaggaagctggtgcagggccttaaggagatcgtgaaccgccccgaggcggagatctacgccgcactgcgcgagtgcggcatggaccccgacgagacggtcagccgcctcctctcccaagatactttccaagaggtaaagagcaagcgcgacaagaagaaagagattaaagaggttcctgagacaagatatcgatcagcaaatagttctactaatcgaggccttagaagtggtgtagatcgtggtggacggaacaattctatgcactccagctctactgataacatgacctcaaggccaccagggtctggtactgcatcaggtacttccagtcagaggcaaacagttgcaagtccttctgcaaacaaacatatggttgctgatggaccagctgcatcattgcaatcatcgtctgggtttcagcatggtggttggtctgggacacctggtcagttgtcgatggctgacattgtgaaaatgggccggcctcagggaaagacttctatcaaacctgtggtcacagctgacagaggttatgctggacagtacccatctttgccaagcacaaaccagaatctgaaacaatctggaagcatggttcccccaacagagcttgacaaggggttacaacctgcccaagattcggttcaggttaaggatcatgatcattctactgctgacagcaagctcccatatgttgaggattccagtgctgatgtatcagcagcagcagcaaacttccagagtttaagcctacataatgatgagttagctgcaaaaaagtctgcagaagataaccctgcagtgataattcctgaccacttgcaagttacaaatacagaatgtgtcaagttgagctttggcagttttggatctggtgcattttctgggttactcccacaaaataccactgatagcaatgtggaattccctgctcgagaggaatctgcaccagtagatcaaatagatgccaggaatcaagattactatgaaagtggtgctgtaacttcaccagcagacgaaaatcttgaggccatgcttggagctaacatggagaatgtagatgcgccttctgtttcacaggctaatgagctcaggcaggacgtacttgatccttctgaacttcaatatgacgtcccatcagttccaagtcatgcttattcaaacacggacactttacagcctagcacaattgaggagccacaaggaaacaaccaagcacatactctttcccatttgtcaaacttaatgcaagcaaatcctttgagcaccagcagcctattggggtcaaatcaaaatcatgcaactcttcatggcttagagtttgatttaccgccttatctgggagcaaaatataacgcaggctcaactacaaatcctagaccacccatatccatgcagcaggaggcactgaaagcaggggttttctccaacgcccagtctacacagagtcttccaagtactagcattcagacggggcttcctctgccacagcaattagcacatcacccttactctcagccaactttaccaatcacacattttccaaatatggttgggtatccgtatttgccacaaaactatgctacttacctatcttcaggcaccttccagcaagcatacccgagtagcggaccattccatcagtctgctgctgctgctttgctggcatctggtatgaagtactcgactccagagtataagaacaacctgtctgccacaggcttacaacagcaacatcagccacaaccacaaccactttcatcagtcatctctggttatggaggctttggaagctcaagtaatatacaaggaaattttacccttagtcagagtaccggctctgcatcagctcttgggtttgatgaagcattgagcagacagtacaaaaacaccagtcaatacatggctctccagcagggcgacaactctggaatgtgggttcatggctctggttcaagagcggcctcgacgcttccgcctaaccacttctatggttaccagggacagagtcagctgggtggctttgctcgggcgcagcagccacagccttcccaatttggaggccatgggtacccaactgtctaccagtctcagggacaggagcacccccagaaccttgctgagggcagcctgaacggcttccaggtcacaccgtctcagccatctcatccgagctggcagcatcagcacacgtactgagccctcctgtactccctggttagggtggctcttgtgctgtcacaagccaagtttcgcgtgcttgtgccctcactcgatgcagagtatgctgctcggattcagtgagcgctgagagggtcccaggcatacaacagttagagcgttttaacatgttgcgtgtgttgccagactgatgcattgcggtttgttttcgatagtgagttatatgtgcggaggcgcagtcctgtataactgagacatgataacctaacaagcagtcgtttctgtttcccaagagttggctgctcttagcttgagctgatgattgactgtttgcttgcagttttggtcatgattttactgcttcaaaaacatttccaat

SEQ ID NO: 60277 - DNA, 3217 bp, Zea Mays
gaaatatcacaacccaggtagattatcttttccctctacccggtggttggttgaggttcttcctgttgtgttgtggtgacagccaaacatttcaagaacactcagacttttctgtagttgttgctccgaggaggaggatgcggcgatagcgtggacaatgtctggacactggaagctcgggagaaaatactttccaagaggtaaagagcaagcgcgacaagaagaaagagattaaagaggttcctgagacaagatatcgatcagcaaatagttctactaatcgaggccttagaagtggtgtagatcgtggtggacggaacaattctatgcactccagctctactgataacatgacctcaaggccaccagggtctggtactgcatcaggtacttccagtcagaggcaaacagttgcaagtccttctgcaaacaaacatatggttgctgatggaccagctgcatcattgcaatcatcgtctgggtttcagcatggtggttggtctgggacacctggtcagttgtcgatggctgacattgtgaaaatgggccggcctcagggaaagacttctatcaaacctgtggtcacagctgacagaggttatgctggacagtacccatctttgccaagcacaaaccagaatctgaaacaatctggaagcatggttcccccaacagagcttgacaaggggttacaacctgcccaagattcggttcaggttaaggatcatgatcattctactgctgacagcaagctcccatatggtactgactggtctccacaagatggcccgacatttgcgaaccaatcttcccttcctgagccatctggtgatccgtccttgtatgaggcatcgtttcagtcatctacattggttactgatgtagttaattcacatgaaaattcacacttggatgaaaacgacacctttgcaatgggaccagcacctgcctctgagagacacctggatcctagtgacggtatttctgagtacaatgatgtaatattgaacaactcaagttcctatcagcctcataattactcttacacagaacaacaagaagttgaggattccagtgctgatgtatcagcagcagcagcaaacttccagagtttaagcctacataatgatgagttagctgcaaaaaagtctgcagaagataaccctgcagtgataattcctgaccacttgcaagttacaaatacagaatgtgtcaagttgagctttggcagttttggatctggtgcattttctgggttactcccacaaaataccactgatagcaatgtggaattccctgctcgagaggaatctgcaccagtagatcaaatagatgccaggaatcaagattactatgaaagtggtgctgtaacttcaccagcagacgaaaatcttgaggccatgcttggagctaacatggagaatgtagatgcgccttctgtttcacaggctaatgagctcaggcaggacgtacttgatccttctgaacttcaatatgacgtcccatcagttccaagtcatgcttattcaaacacggacactttacagcctagcacaattgaggagccacaaggaaacaaccaagcacatactctttcccatttgtcaaacttaatgcaagcaaatcctttgagcaccagcagcctattggggtcaaatcaaaatcatgcaactcttcatggcttagagtttgatttaccgccttatctgggagcaaaatataacgcaggctcaactacaaatcctagaccacccatatccatgcagcaggaggcactgaaagcaggggttttctccaacgcccagtctacacagagtcttccaagtactagcattcagacggggcttcctctgccacagcaattagcacatcacccttactctcagccaactttaccaatcacacattttccaaatatggttgggtatccgtatttgccacaaaactatgctacttacctatcttcaggcaccttccagcaagcatacccgagtagcggaccattccatcagtctgctgctgctgctttgctggcatctggtatgaagtactcgactccagagtataagaacaacctgtctgccacaggcttacaacagcaacatcagccacaaccacaaccactttcatcagtcatctctggttatggaggctttggaagctcaagtaatatacaaggaaattttacccttagtcagagtaccggctctgcatcagctcttgggtttgatgaagcattgagcagacagtacaaaaacaccagtcaatacatggctctccagcagggcgacaactctggaatgtgggttcatggctctggttcaagagcggcctcgacgcttccgcctaaccacttctatggttaccagggacagagtcagctgggtggctttgctcgggcgcagcagccacagccttcccaatttggaggccatgggtacccaactgtctaccagtctcagggacaggagcacccccagaaccttgctgagggcagcctgaacggcttccaggtcacaccgtctcagccatctcatccgagctggcagcatcagcacacgtactgagccctcctgtactccctggttagggtggctcttgtgctgtcacaagccaagtttcgcgtgcttgtgccctcactcgatgcagagtatgctgctcggattcagtgagcgctgagagggtcccaggcatacaacagttagagcgttttaacatgttgcgtgtgttgccagactgatgcattgcggtttgttttcgatagtgagttatatgtgcggaggcgcagtcctgtataactgagacatgataacctaacaagcagtcgtttctgtttcccaagagttggctgctcttagcttgagctgatgattgactgtttgcttgcagttttggtcatgattttactgcttcaaaaacatttccaattccaccatattggcatcgcgtgaggttagcacaggcaacatttcatcatctgacagggagtgtccatatgtgacacgaatgttcacttcgtcgatgaattgatgatgatccgtatgactactctacgccaagcggaacgattatatcgacatgtactatgtcgagtgcatctggctctgtcgttgtgtatttatctcttgctcaagctcaatatgtaataggtttttggatcaatttcgttttagttagtattctctatatgtttatatctcacattatctatttctgg

SEQ ID NO: 60278 - DNA, 3134 bp, Zea Mays
ctactctagacccatatacattacatatgcttgtcatggaatgaaatctatctacttatcatatgtgctcaagaatgttagctgtggatttatggatatgtcctcgctttctgaactcgtggcttcactggaaatatactttccaagaggtaaagagcaagcgcgacaagaagaaagagattaaagaggttcctgagacaagatatcgatcagcaaatagttctactaatcgaggccttagaagtggtgtagatcgtggtggacggaacaattctatgcactccagctctactgataacatgacctcaaggccaccagggtctggtactgcatcaggtacttccagtcagaggcaaacagttgcaagtccttctgcaaacaaacatatggttgctgatggaccagctgcatcattgcaatcatcgtctgggtttcagcatggtggttggtctgggacacctggtcagttgtcgatggctgacattgtgaaaatgggccggcctcagggaaagacttctatcaaacctgtggtcacagctgacagaggttatgctggacagtacccatctttgccaagcacaaaccagaatctgaaacaatctggaagcatggttcccccaacagagcttgacaaggggttacaacctgcccaagattcggttcaggttaaggatcatgatcattctactgctgacagcaagctcccatatggtactgactggtctccacaagatggcccgacatttgcgaaccaatcttcccttcctgagccatctggtgatccgtccttgtatgaggcatcgtttcagtcatctacattggttactgatgtagttaattcacatgaaaattcacacttggatgaaaacgacacctttgcaatgggaccagcacctgcctctgagagacacctggatcctagtgacggtatttctgagtacaatgatgtaatattgaacaactcaagttcctatcagcctcataattactcttacacagaacaacaagaagttgaggattccagtgctgatgtatcagcagcagcagcaaacttccagagtttaagcctacataatgatgagttagctgcaaaaaagtctgcagaagataaccctgcagtgataattcctgaccacttgcaagttacaaatacagaatgtgtcaagttgagctttggcagttttggatctggtgcattttctgggttactcccacaaaataccactgatagcaatgtggaattccctgctcgagaggaatctgcaccagtagatcaaatagatgccaggaatcaagattactatgaaagtggtgctgtaacttcaccagcagacgaaaatcttgaggccatgcttggagctaacatggagaatgtagatgcgccttctgtttcacaggctaatgagctcaggcaggacgtacttgatccttctgaacttcaatatgacgtcccatcagttccaagtcatgcttattcaaacacggacactttacagcctagcacaattgaggagccacaaggaaacaaccaagcacatactctttcccatttgtcaaacttaatgcaagcaaatcctttgagcaccagcagcctattggggtcaaatcaaaatcatgcaactcttcatggcttagagtttgatttaccgccttatctgggagcaaaatataacgcaggctcaactacaaatcctagaccacccatatccatgcagcaggaggcactgaaagcaggggttttctccaacgcccagtctacacagagtcttccaagtactagcattcagacggggcttcctctgccacagcaattagcacatcacccttactctcagccaactttaccaatcacacattttccaaatatggttgggtatccgtatttgccacaaaactatgctacttacctatcttcaggcaccttccagcaagcatacccgagtagcggaccattccatcagtctgctgctgctgctttgctggcatctggtatgaagtactcgactccagagtataagaacaacctgtctgccacaggcttacaacagcaacatcagccacaaccacaaccactttcatcagtcatctctggttatggaggctttggaagctcaagtaatatacaaggaaattttacccttagtcagagtaccggctctgcatcagctcttgggtttgatgaagcattgagcagacagtacaaaaacaccagtcaatacatggctctccagcagggcgacaactctggaatgtgggttcatggctctggttcaagagcggcctcgacgcttccgcctaaccacttctatggttaccagggacagagtcagctgggtggctttgctcgggcgcagcagccacagccttcccaatttggaggccatgggtacccaactgtctaccagtctcagggacaggagcacccccagaaccttgctgagggcagcctgaacggcttccaggtcacaccgtctcagccatctcatccgagctggcagcatcagcacacgtactgagccctcctgtactccctggttagggtggctcttgtgctgtcacaagccaagtttcgcgtgcttgtgccctcactcgatgcagagtatgctgctcggattcagtgagcgctgagagggtcccaggcatacaacagttagagcgttttaacatgttgcgtgtgttgccagactgatgcattgcggtttgttttcgatagtgagttatatgtgcggaggcgcagtcctgtataactgagacatgataacctaacaagcagtcgtttctgtttcccaagagttggctgctcttagcttgagctgatgattgactgtttgcttgcagttttggtcatgattttactgcttcaaaaacatttccaattccaccatattggcatcgcgtgagggagtgtccatatgtgacacgaatgttcacttcgtcgatgaattgatgatgatccgtatgactactctacgccaagcggaacgattatatcgacatgtactatgtcgagtgcatctggctctgtcgttgtgtatttatctcttgctcaagctcaatatgtaataggtttttggatcaatttcgttttagttagtattctctatatgtttatatctcacattatctatttctgg

SEQ ID NO: 60279 - DNA, 1351 bp, Zea Mays
ctactaagtctaaaacccattggacttgagtctcccacgcaagcaaatcctttgagcaccagcagcctattggggtcaaatcaaaatcatgcaactcttcatggcttagagtttgatttaccgccttatctgggagcaaaatataacgcaggctcaactacaaatcctagaccacccatatccatgcagcaggaggcactgaaagcaggggttttctccaacgcccagtctacacagagtcttccaagtactagcattcagacggggcttcctctgccacagcaattagcacatcacccttactctcagccaactttaccaatcacacattttccaaatatggttgggtatccgtatttgccacaaaactatgctacttacctatcttcaggcaccttccagcaagcatacccgagtagcggaccattccatcagtctgctgctgctgctttgctggcatctggtatgaagtactcgactccagagtataagaacaacctgtctgccacaggcttacaacagcaacatcagccacaaccacaaccactttcatcagtcatctctggttatggaggctttggaagctcaagtaatatacaaggaaattttacccttagtcagagtaccggctctgcatcagctcttgggtttgatgaagcattgagcagacagtacaaaaacaccagtcaatacatggctctccagcagggcgacaactctggaatgtgggttcatggctctggttcaagagcggcctcgacgcttccgcctaaccacttctatggttaccagggacagagtcagctgggtggctttgctcgggcgcagcagccacagccttcccaatttggaggccatgggtacccaactgtctaccagtctcagggacaggagcacccccagaaccttgctgagggcagcctgaacggcttccaggtcacaccgtctcagccatctcatccgagctggcagcatcagcacacgtactgagccctcctgtactccctggttagggtggctcttgtgctgtcacaagccaagtttcgcgtgcttgtgccctcactcgatgcagagtatgctgctcggattcagtgagcgctgagagggtcccaggcatacaacagttagagcgttttaacatgttgcgtgtgttgccagactgatgcattgcggtttgttttcgatagtgagttatatgtgcggaggcgcagtcctgtataactgagacatgataacctaacaagcagtcgtttctgtttcccaagagttggctgctcttagcttgagctgatgattgactgtttgcttgcagttttggtcatgattttactgcttcaaaaacatttccaat

SEQ ID NO: 60280 - DNA, 2380 bp, Zea Mays
gttttgaggtttttcgtgggcggctttgatcctcggtcgatccgatctgtgtcaggctttcatcagatgttgcaaaacccgctcgcaaccatcagcgaacatgggaacccgcggcgtcgccctgctgctcctcgcggcggtgctgctcctccaggcgctcctcctcgcgtcgtcggagggcctggtgcgggtcgcgctgaagaagctgcccgtcgaccagaacggccgcgtcgccgcgcgcctctccgccgaggagaggcagcgcctcctcctccgcggcgccaacgccctgggctcaggcggcgacgacgactccgacgtcatcgcgctcaagaactacatgaacgcgcagtactttggggagatcggcgtcggctcgccgcagcagaagttcaccgtcatcttcgacaccggcagttccaacctctgggtgccgtcctccaagtgctacttctcgatcgcttgctacttccactcgcgctacaagtcagggcagtcaagcacttacaagaagaacggaaaacctgctgccatacgctatggaactggttccattgctggttttttcagtgaggatagcgttacattaggtgatctggttgtgaaggatcaggaatttattgaagctacaaaggagccagggcttaccttcatggttgcaaaatttgatggcattcttgggctaggctttcaagaaatctctgttgggaatgcaacaccagtgtggtataacatggtgaaacaaggtctcatcagcgaccctgttttctctttctggtttaaccgacatgctgatgaaggagaaggtggtgaaattgtgtttggtggaatggattctagccactacaagggtgatcacacgtttgtcccagtcactcggaagggatactggcagttcaacatgggtgatgtcctggttgatggaaagtccactgggttttgtgccggtggctgtgcagccatcgcagattctggaacttccttgcttgctggccccacagccataattactgaaatcaatgaaaagattggtgctgctggtgtagtcagccaagagtgcaagactgttgtttctcaatatggacagcagatcctagatcttttgctagctgagacacaaccagcgaagatctgttctcaggttggtctgtgcacttttgatggcacccatggtgtcagcgctggaattcggagcgtagtggatgatgaagctgggaaatcaaatggtggtctcaagagtgatccaatgtgcaatgcttgtgagatggctgtggtatggatgcagaaccaacttgcccagaacaagacacaggagctcatcctgaactacattaatcagctttgcgagcgtcttccgagtccgatgggagaatcagccgtggactgtggcagtcttgcgtccatgcctgacattgcgttcaccattggaggcaagaagttcaagctgaaaccagagcagtacattctgaaggttggtgaaggacaggctgcccagtgcatcagcggattcacagctatggatatcccaccaccccgtggccctctctggatcttgggtgatgttttcatgggagtctaccacaccgtcttcgactatggcaagctgagggttggcttcgcagagtcggcctagggatatggtttggcagcaacccgtccagaggcaaacgcgtaatttgtgtgtttatgcgaccggcgatgtgtgtatatatgctactacatgtttagtgatgctttccgagacctgagacaacgcccgtctgttttaacgtggcgcaagaataattctggttctggatgtattctccgtacacaaaggcgtgtctgatgcaatggtgaccatcttgcggttgcgtgtttgaaatagccttttcgcattcgtgggcatttgcgggtgcgggttccgaaaagatttttttttgtatttgtggggtatgcgggaggctttatcttggttttatcttttgtttagtttaagctacgtaggatttgtttagtttttaaactcaggcaaccttgtctcgtactccgcgtgctcccagcgtcagattttgggcatttagttgggctgggctagcctttgaagcagacaacgtatccgtagaccatgctgcgcgtggctctagagatgtcaacgagtggttgtagtacgggtgaataaatacctgtctatgtttatattaagttattctgtatttataaagatggtatcttatgtacatgtacatgtgtgtatatatagaatactatcttttcaaatcagatctaacggtgcacgatatcaggggttctattaaacgaaccaaccaaggatgtagggttttttaaatatatatatatatatatatatatatatattacatatggttttaaaggtcaa

SEQ ID NO: 60281 - DNA, 2317 bp, Zea Mays
atcagatgttgcaaaacccgctcgcaaccatcagcgaacatgggaacccgcggcgtcgccctgctgctcctcgcggcggtgctgctcctccaggcgctcctcctcgcgtcgtcggagggcctggtgcgggtcgcgctgaagaagctgcccgtcgaccagaacggccgcgtcgccgcgcgcctctccgccgaggagaggcagcgcctcctcctccgcggcgccaacgccctgggctcaggcggcgacgacgactccgacgtcatcgcgctcaagaactacatgaacgcgcagtactttggggagatcggcgtcggctcgccgcagcagaagttcaccgtcatcttcgacaccggcagttccaacctctgggtgccgtcctccaagtgctacttctcgatcgcttgctacttccactcgcgctacaagtcagggcagtcaagcacttacaagaagaacggaaaacctgctgccatacgctatggaactggttccattgctggttttttcagtgaggatagcgttacattaggtgatctggttgtgaaggatcaggaatttattgaagctacaaaggagccagggcttaccttcatggttgcaaaatttgatggcattcttgggctaggctttcaagaaatctctgttgggaatgcaacaccagtgtggtataacatggtgaaacaaggtctcatcagcgaccctgttttctctttctggtttaaccgacatgctgatgaaggagaaggtggtgaaattgtgtttggtggaatggattctagccactacaagggtgatcacacgtttgtcccagtcactcggaagggatactggcagttcaacatgggtgatgtcctggttgatggaaagtccactgggttttgtgccggtggctgtgcagccatcgcagattctggaacttccttgcttgctggccccacagccataattactgaaatcaatgaaaagattggtgctgctggtgtagtcagccaagagtgcaagactgttgtttctcaatatggacagcagatcctagatcttttgctagctgagacaaccagcgaagatctgttctcaggttggtctgtgcacttttgatggcacccatggtgtcagcgctggaattcggagcgtagtggatgatgaagctgggaaatcaaatggtggtctcaagagtgatccaatgtgcaatgcttgtgagatggctgtggtatggatgcagaaccaacttgcccagaacaagacacaggagctcatcctgaactacattaatcagctttgcgagcgtcttccgagtccgatgggagaatcagccgtggactgtggcagtcttgcgtccatgcctgacattgcgttcaccattggaggcaagaagttcaagctgaaaccagagcagtacattctgaaggttggtgaaggacaggctgcccagtgcatcagcggattcacagctatggatatcccaccaccccgtggccctctctggatcttgggtgatgttttcatgggagtctaccacaccgtcttcgactatggcaagctgagggttggcttcgcagagtcggcctagggatatggtttggcagcaacccgtccagaggcaaacgcgtaatttgtgtgtttatgcgaccggcgatgtgtgtatatatgctactacatgtttagtgatgctttccgagacctgagacaacgcccgtctgttttaacgtggcgcaagaataattctggttctggatgtattctccgtacacaaaggcgtgtctgatgcaatggtgaccatcttgcggttgcgtgtttgaaatagccttttcgcattcgtgggcatttgcgggtgcgggttccgaaaagatttttttttgtatttgtggggtatgcgggaggctttatcttggttttatcttttgtttagtttaagctacgtaggatttgtttagtttttaaactcaggcaaccttgtctcgtactccgcgtgctcccagcgtcagattttgggcatttagttgggctgggctagcctttgaagcagacaacgtatccgtagaccatgctgcgcgtggctctagagatgtcaacgagtggttgtagtacgggtgaataaatacctgtctatgtttatattaagttattctgtatttataaagatggtatcttatgtacatgtacatgtgtgtatatatagaatactatcttttcaaatcagatctaacggtgcacgatatcaggggttctattaaacgaaccaaccaaggatgtagggttttttaaatatatatatatatatatatatatatatattacatatggttttaaaggtcaa

SEQ ID NO: 60282 - DNA, 2326 bp, Zea Mays
cagcgttattgtcagccggaaactgtccttttcttgatcagcgaacatgggaacccgcggcgtcgccctgctgctcctcgcggcggtgctgctcctccaggcgctcctcctcgcgtcgtcggagggcctggtgcgggtcgcgctgaagaagctgcccgtcgaccagaacggccgcgtcgccgcgcgcctctccgccgaggagaggcagcgcctcctcctccgcggcgccaacgccctgggctcaggcggcgacgacgactccgacgtcatcgcgctcaagaactacatgaacgcgcagtactttggggagatcggcgtcggctcgccgcagcagaagttcaccgtcatcttcgacaccggcagttccaacctctgggtgccgtcctccaagtgctacttctcgatcgcttgctacttccactcgcgctacaagtcagggcagtcaagcacttacaagaagaacggaaaacctgctgccatacgctatggaactggttccattgctggttttttcagtgaggatagcgttacattaggtgatctggttgtgaaggatcaggaatttattgaagctacaaaggagccagggcttaccttcatggttgcaaaatttgatggcattcttgggctaggctttcaagaaatctctgttgggaatgcaacaccagtgtggtataacatggtgaaacaaggtctcatcagcgaccctgttttctctttctggtttaaccgacatgctgatgaaggagaaggtggtgaaattgtgtttggtggaatggattctagccactacaagggtgatcacacgtttgtcccagtcactcggaagggatactggcagttcaacatgggtgatgtcctggttgatggaaagtccactgggttttgtgccggtggctgtgcagccatcgcagattctggaacttccttgcttgctggccccacagccataattactgaaatcaatgaaaagattggtgctgctggtgtagtcagccaagagtgcaagactgttgtttctcaatatggacagcagatcctagatcttttgctagctgagacacaaccagcgaagatctgttctcaggttggtctgtgcacttttgatggcacccatggtgtcagcgctggaattcggagcgtagtggatgatgaagctgggaaatcaaatggtggtctcaagagtgatccaatgtgcaatgcttgtgagatggctgtggtatggatgcagaaccaacttgcccagaacaagacacaggagctcatcctgaactacattaatcagctttgcgagcgtcttccgagtccgatgggagaatcagccgtggactgtggcagtcttgcgtccatgcctgacattgcgttcaccattggaggcaagaagttcaagctgaaaccagagcagtacattctgaaggttggtgaaggacaggctgcccagtgcatcagcggattcacagctatggatatcccaccaccccgtggccctctctggatcttgggtgatgttttcatgggagtctaccacaccgtcttcgactatggcaagctgagggttggcttcgcagagtcggcctagggatatggtttggcagcaacccgtccagaggcaaacgcgtaatttgtgtgtttatgcgaccggcgatgtgtgtatatatgctactacatgtttagtgatgctttccgagacctgagacaacgcccgtctgttttaacgtggcgcaagaataattctggttctggatgtattctccgtacacaaaggcgtgtctgatgcaatggtgaccatcttgcggttgcgtgtttgaaatagccttttcgcattcgtgggcatttgcgggtgcgggttccgaaaagatttttttttgtatttgtggggtatgcgggaggctttatcttggttttatcttttgtttagtttaagctacgtaggatttgtttagtttttaaactcaggcaaccttgtctcgtactccgcgtgctcccagcgtcagattttgggcatttagttgggctgggctagcctttgaagcagacaacgtatccgtagaccatgctgcgcgtggctctagagatgtcaacgagtggttgtagtacgggtgaataaatacctgtctatgtttatattaagttattctgtatttataaagatggtatcttatgtacatgtacatgtgtgtatatatagaatactatcttttcaaatcagatctaacggtgcacgatatcaggggttctattaaacgaaccaaccaaggatgtagggttttttaaatatatatatatatatatatatatatatattacatatggttttaaaggtcaa

SEQ ID NO: 60283 - DNA, 1732 bp, Zea Mays
gtttttgtggcttttctctgatttcttaggtttcagaaaaactgtttctccaatgtcggcaatgacattgcttagcttgtatgttagagttcatgtcaccatattaggtagccatctctacttggattttgcccagtgtacaaatggtgcacagttacaagtacatctatgctccagcctcctcattctatgctcaagcattttcgtatgaatggatttcaagcactctagatgttttgataattaaaattatgttagaacactgacttaacttggattcaagctgcttcctgacatggaaatcttaaggaagtgaggttttgtttattctttcggctaccatgtaattcaaccacaacttctgaagaggacaagacgacagtgacctcctggtggcggtggtgctagattgctggggctgaagaggcgccctgttgtcacaacaagtcttagacgtggtctgcaggatgcaagttacccttcagaacaactcttaatttctggagaaaaggaaacacaggaccaggtttactttataaaacagatcgaatcattgggaaatgcttgtggaactattgctctactccatgctgttggaaatgcatcttccaaagtcaatttagtggagaattcatgcttggacttgttcttcaaatcaactgctaccatggatgaccctcatgagcgtgctgtgtgtctggagaaggatgatacaacggcaagggctcatttacttgctgccaattatggtgccactaagggtatgagcccagatgttgcgacagccccaaagagcaaaggatgcctgatgattggagaatataacaaggtcgccaaaaagtgaccttggcgttaccgaggacgacgctcgtcgtggacctgcaaagcggcatcgacgaccaccgacaccggggacgggaccacgggcacaccggtgacatgagctgggtggcatgaattcattgctccaaattgaaacatccccaacatttcctcttgtatccaaggtctcaactataatcttgggaatggatgtgtcccatggttctcttggacattgtgaggtaccatctattgttgttagcttctgtccgcacccaatcacctaaaatggaaatgattgactcattgtttaagccacgagaagctaaagatgatggtctgatcagggagtgtctgattgacttctacaccagttctgggaagagaaagcctgaccaagtcatcatcttcagaaattccttctgtctcaaatggagacaatgacgagtggtcagaagtacagattttaaaactatgacttacgttcatcatcttaagtctatgctcctctctgtgcttgacctctcaagtacagattttaaagcctcatctgcttcagtttattgttcttgttctcagattttgatatgagaatatagctcagagttcaagtactgatcataatgttgaagaactgttggcgtaatgaagctcatttttaagagcagtaattttggatcacgtgttctgacgaatctgttagctgattgttgatgcttttattctgtaacctatggccataactcaagaacttatgcatgaatttatccatcccaattatgatttccgagcattcattttctgtttatactaggtaggtgcccttgcgatgccacggaacataaattgcgaacctccaatggacttcatttgagacaagtgatgcccaagaaaatgggggtaaactgac

SEQ ID NO: 60284 - DNA, 2154 bp, Zea Mays
gtttattctttcggctaccatgtaattcaaccacaacttctgaagaggacaagtgtaggcgtccacacatgccatgttctgcccgccgcgggcacgtcacgatttctccacgcgcagcccctgcaatccgccgcctttccattcgcggccgcaatcgtttccatccgcggccgcaatccgccgcgccaaatctgccgccacacccctgcgcccgcaacgcccgcccgccgcgatttctccacccgcagcccccgcaatccaccgcctttccatccgcggccgcaatccaccgcgccaaatccgccgccacacccctgcgcgctcgcccctgcgccaaatcctccttggacgcgccccgacggctggcgcaacccctgctcgtgccacggcttgcgtagaatggaaggtccatggcgcaactcctccttgattgagcggagaatggaaggtcaccgtacgacattggtcgagaggaggaggttgaggatggatgcccgtaatgccacgcccgcccctacgccaatggaaggtccgttgccaaatcccacggatggaaggtggcggatggaggtggcgcgcaccttccatccccgcggcgcgcaccttcatcctccgcgaccgcccgcggatctccaaaacagcatggcgcgtggatggggaggaggtgcgcggatggaaaggacgctctcctacccatctggtccgcgatcctcgctcaccttccatcgacgacgccgcatcgacctcggcaacctctggccacctacaagaacaaccgattcaaccactgctccctacatccgcgccctcaatagacgacagtgacctcctggtggcggtggtgctagattgctggggctgaagaggcgccctgttgtcacaacaagtcttagacgtggtctgcaggatgcaagttacccttcagaacaactcttaatttctggagaaaaggaaacacaggaccaggtttactttataaaacagatcgaatcattgggaaatgcttgtggaactattgctctactccatgctgttggaaatgcatcttccaaagtcaatttagtggagaattcatgcttggacttgttcttcaaatcaactgctaccatggatgaccctcatgagcgtgctgtgtgtctggagaaggatgatacaacggcaagggctcatttacttgctgccaattatggtgccactaagggtatgagcccagatgttgcgacagccccaaagagcaaaggatgcctgatgattggagaatataacaaggtcgccaaaaagtgaccttggcgttaccgaggacgacgctcgtcgtggacctgcaaagcggcatcgacgaccaccgacaccggggacgggaccacgggcacaccggtgacatgagctgggtggcatgaattcattgctccaaattgaaacatccccaacatttcctcttgtatccaaggtctcaactataatcttgggaatggatgtgtcccatggttctcttggacattgtgagagcttctgtccgcacccaatcacctaaaatggaaatgattgactcattgtttaagccacgagaagctaaagatgatggtctgatcagggagtgtctgattgacttctacaccagttctgggaagagaaagcctgaccaagtcatcatcttcagaaattccttctgtctcaaatggagacaatgacgagtggtcagaagtacagattttaaaactatgacttacgttcatcatcttaagtctatgctcctctctgtgcttgacctctcaagtacagattttaaagcctcatctgcttcagtttattgttcttgttctcagattttgatatgagaatatagctcagagttcaagtactgatcataatgttgaagaactgttggcgtaatgaagctcatttttaagagcagtaattttggatcacgtgttctgacgaatctgttagctgattgttgatgcttttattctgtaacctatggccataactcaagaacttatgcatgaatttatccatcccaattatgatttccgagcattcattttctgtttatactaggtaggtgcccttgcgatgccacggaacataaattgcgaacctccaatggacttcatttgagacaagtgatgcccaagaaaatgggggtaaactgac

SEQ ID NO: 60285 - DNA, 2175 bp, Zea Mays
ttcaaccacaacttctgaagaggacaaggcgtccacacatgccatgttctgcccgccgcgggcacgtcacgatttctccacgcgcagcccctgcaatccgccgcctttccattcgcggccgcaatcgtttccatccgcggccgcaatccgccgcgccaaatctgccgccacacccctgcgcccgcaacgcccgcccgccgcgatttctccacccgcagcccccgcaatccaccgcctttccatccgcggccgcaatccaccgcgccaaatccgccgccacacccctgcgcgctcgcccctgcgccaaatcctccttggacgcgccccgacggctggcgcaacccctgctcgtgccacggcttgcgtagaatggaaggtccatggcgcaactcctccttgattgagcggagaatggaaggtcaccgtacgacattggtcgagaggaggaggttgaggatggatgcccgtaatgccacgcccgcccctacgccaatggaaggtccgttgccaaatcccacggatggaaggtggcggatggaggtggcgcgcaccttccatccccgcggcgcgcaccttcatcctccgcgaccgcccgcggatctccaaaacagcatggcgcgtggatggggaggaggtgcgcggatggaaaggacgctctcctacccatctggtccgcgatcctcgctcaccttccatcgacgacgccgcatcgacctcggcaacctctggccacctacaagaacaaccgattcaaccactgctccctacatccgcgccctcaatagacgacagtgacctcctggtggcggtggtgctagattgctggggctgaagaggcgccctgttgtcacaacaagtcttagacgtggtctgcaggatgcaagttacccttcagaacaactcttaatttctggagaaaaggtgaacaattacgttccttgtagatgcctcccccctcctcatgaccaggtttactttataaaacagatcgaatcattgggaaatgcttgtggaactattgctctactccatgctgttggaaatgcatcttccaaagtcaatttagtggagaattcatgcttggacttgttcttcaaatcaactgctaccatggatgaccctcatgagcgtgctgtgtgtctggagaaggatgatacaacggcaagggctcatttacttgctgccaattatggtgccactaagggtatgagcccagatgttgcgacagccccaaagagcaaaggatgcctgatgattggagaatataacaaggtcgccaaaaagtgaccttggcgttaccgaggacgacgctcgtcgtggacctgcaaagcggcatcgacgaccaccgacaccggggacgggaccacgggcacaccggtgacatgagctgggtggcatgaattcattgctccaaattgaaacatccccaacatttcctcttgtatccaaggtctcaactataatcttgggaatggatgtgtcccatggttctcttggacattgtgaggtaccatctattgttgttagcttctgtccgcacccaatcacctaaaatggaaatgattgactcattgtttaagccacgagaagctaaagatgatggtctgatcagggagtgtctgattgacttctacaccagttctgggaagagaaagcctgaccaagtcatcatcttcagaaattccttctgtctcaaatggagacaatgacgagtggtcagaagtacagattttaaaactatgacttacgttcatcatcttaagtctatgctcctctctgtgcttgacctctcaagtacagattttaaagcctcatctgcttcagtttattgttcttgttctcagattttgatatgagaatatagctcagagttcaagtactgatcataatgttgaagaactgttggcgtaatgaagctcatttttaagagcagtaattttggatcacgtgttctgacgaatctgttagctgattgttgatgcttttattctgtaacctatggccataactcaagaacttatgcatgaatttatccatcccaattatgatttccgagcattcattttctgtttatactaggtaggtgcccttgcgatgccacggaacataaattgcgaacctccaatggacttcatttgagacaagtgatgcccaagaaaatgggggtaaactgac

SEQ ID NO: 60286 - DNA, 2142 bp, Zea Mays
ttcaaccacaacttctgaagaggacaaggcgtccacacatgccatgttctgcccgccgcgggcacgtcacgatttctccacgcgcagcccctgcaatccgccgcctttccattcgcggccgcaatcgtttccatccgcggccgcaatccgccgcgccaaatctgccgccacacccctgcgcccgcaacgcccgcccgccgcgatttctccacccgcagcccccgcaatccaccgcctttccatccgcggccgcaatccaccgcgccaaatccgccgccacacccctgcgcgctcgcccctgcgccaaatcctccttggacgcgccccgacggctggcgcaacccctgctcgtgccacggcttgcgtagaatggaaggtccatggcgcaactcctccttgattgagcggagaatggaaggtcaccgtacgacattggtcgagaggaggaggttgaggatggatgcccgtaatgccacgcccgcccctacgccaatggaaggtccgttgccaaatcccacggatggaaggtggcggatggaggtggcgcgcaccttccatccccgcggcgcgcaccttcatcctccgcgaccgcccgcggatctccaaaacagcatggcgcgtggatggggaggaggtgcgcggatggaaaggacgctctcctacccatctggtccgcgatcctcgctcaccttccatcgacgacgccgcatcgacctcggcaacctctggccacctacaagaacaaccgattcaaccactgctccctacatccgcgccctcaatagacgacagtgacctcctggtggcggtggtgctagattgctggggctgaagaggcgccctgttgtcacaacaagtcttagacgtggtctgcaggatgcaagttacccttcagaacaactcttaatttctggagaaaaggaaacacaggaccaggtttactttataaaacagatcgaatcattgggaaatgcttgtggaactattgctctactccatgctgttggaaatgcatcttccaaagtcaatttagtggagaattcatgcttggacttgttcttcaaatcaactgctaccatggatgaccctcatgagcgtgctgtgtgtctggagaaggatgatacaacggcaagggctcatttacttgctgccaattatggtgccactaagggtatgagcccagatgttgcgacagccccaaagagcaaaggatgcctgatgattggagaatataacaaggtcgccaaaaagtgaccttggcgttaccgaggacgacgctcgtcgtggacctgcaaagcggcatcgacgaccaccgacaccggggacgggaccacgggcacaccggtgacatgagctgggtggcatgaattcattgctccaaattgaaacatccccaacatttcctcttgtatccaaggtctcaactataatcttgggaatggatgtgtcccatggttctcttggacattgtgaggtaccatctattgttgttagcttctgtccgcacccaatcacctaaaatggaaatgattgactcattgtttaagccacgagaagctaaagatgatggtctgatcagggagtgtctgattgacttctacaccagttctgggaagagaaagcctgaccaagtcatcatcttcagaaattccttctgtctcaaatggagacaatgacgagtggtcagaagtacagattttaaaactatgacttacgttcatcatcttaagtctatgctcctctctgtgcttgacctctcaagtacagattttaaagcctcatctgcttcagtttattgttcttgttctcagattttgatatgagaatatagctcagagttcaagtactgatcataatgttgaagaactgttggcgtaatgaagctcatttttaagagcagtaattttggatcacgtgttctgacgaatctgttagctgattgttgatgcttttattctgtaacctatggccataactcaagaacttatgcatgaatttatccatcccaattatgatttccgagcattcattttctgtttatactaggtaggtgcccttgcgatgccacggaacataaattgcgaacctccaatggacttcatttgagacaagtgatgcccaagaaaatgggggtaaactgac

SEQ ID NO: 60287 - DNA, 2491 bp, Zea Mays
cgcaacgcccgcccgccgcgatttctccacccgcagcccccgcaatccaccgcctttccatccgcggccgcaatccaccgcgccaaatccgccgccacacccctgcgcgctcgcccctgcgccaaatcctccttggacgcgccccgacggctggcgcaacccctgctcgtgccacggcttgcgtagaatggaaggtccatggcgcaactcctccttgattgagcggagaatggaaggtcaccgtacgacattggtcgagaggaggaggttgaggatggatgcccgtaatgccacgcccgcccctacgccaatggaaggtccgttgccaaatcccacggatggaaggtggcggatggaggtggcgcgcaccttccatccccgcggcgcgcaccttcatcctccgcgaccgcccgcggatctccaaaacagcatggcgcgtggatggggaggaggtgcgcggatggaaaggacgctctcctacccatctggtccgcgatcctcgctcaccttccatcgacgacgccgcatcgacctcggcaacctctggccacctacaagaacaaccgattcaaccactgctccctacatccgcgccctcaatagacgacagtgacctcctggtggcggtggtgctagattgctggggctgaagaggcgccctgttgtcacaacaagtcttagacgtggtctgcagattagatgatagtgacctcccttccttgcgactcatggtttgctggagctgtaggattctcccggcacaatggaggtgctatcgtctgatttggagcaacaaggaaatataaagtagtaaaacaatttctttacgaaagataaacttttcggggtcattgaaaattatgagtcaaaacctagagcaaaatcttcagaatgccttgcttttagtaagtgattacctattttgttacagagccgaaatctacttctagatgaccctcagatttgaccgtgcaatataagtttgatcgtgcaatataagtttgtaaccctcagatgaagtaaccgtagtgactgctggtagtgttgagtaatgaccaattagtgcctaaacaatttttaccatgctgcatatgtaacccaactcgtccaaatatacgaatgtttctctcttaatgtgggatgcacataaaacttgttttcatatttatgagctcagtaagcaagttcagtttttttactgagatacactattgttccactgcaggatgcaagttacccttcagaacaactcttaatttctggagaaaaggaaacacaggaccaggtttactttataaaacagatcgaatcattgggaaatgcttgtggaactattgctctactccatgctgttggaaatgcatcttccaaagtcaatttagtggagaattcatgcttggacttgttcttcaaatcaactgctaccatggatgaccctcatgagcgtgctgtgtgtctggagaaggatgatacaacggcaagggctcatttacttgctgccaattatggtgccactaagggtatgagcccagatgttgcgacagccccaaagagcaaaggatgcctgatgattggagaatataacaaggtcgccaaaaagtgaccttggcgttaccgaggacgacgctcgtcgtggacctgcaaagcggcatcgacgaccaccgacaccggggacgggaccacgggcacaccggtgacatgagctgggtggcatgaattcattgctccaaattgaaacatccccaacatttcctcttgtatccaaggtctcaactataatcttgggaatggatgtgtcccatggttctcttggacattgtgaggtaccatctattgttgttagcttctgtccgcacccaatcacctaaaatggaaatgattgactcattgtttaagccacgagaagctaaagatgatggtctgatcagggagtgtctgattgacttctacaccagttctgggaagagaaagcctgaccaagtcatcatcttcagaaattccttctgtctcaaatggagacaatgacgagtggtcagaagtacagattttaaaactatgacttacgttcatcatcttaagtctatgctcctctctgtgcttgacctctcaagtacagattttaaagcctcatctgcttcagtttattgttcttgttctcagattttgatatgagaatatagctcagagttcaagtactgatcataatgttgaagaactgttggcgtaatgaagctcatttttaagagcagtaattttggatcacgtgttctgacgaatctgttagctgattgttgatgcttttattctgtaacctatggccataactcaagaacttatgcatgaatttatccatcccaattatgatttccgagcattcattttctgtttatactaggtaggtgcccttgcgatgccacggaacataaattgcgaacctccaatggacttcatttgagacaagtgatgcccaagaaaatgggggtaaactgac

SEQ ID NO: 60288 - DNA, 2462 bp, Zea Mays
cccgccgcgatttctccacccgcagcccccgcaatccaccgcctttccatccgcggccgcaatccaccgcgccaaatccgccgccacacccctgcgcgctcgcccctgcgccaaatcctccttggacgcgccccgacggctggcgcaacccctgctcgtgccacggcttgcgtagaatggaaggtccatggcgcaactcctccttgattgagcggagaatggaaggtcaccgtacgacattggtcgagaggaggaggttgaggatggatgcccgtaatgccacgcccgcccctacgccaatggaaggtccgttgccaaatcccacggatggaaggtggcggatggaggtggcgcgcaccttccatccccgcggcgcgcaccttcatcctccgcgaccgcccgcggatctccaaaacagcatggcgcgtggatggggaggaggtgcgcggatggaaaggacgctctcctacccatctggtccgcgatcctcgctcaccttccatcgacgacgccgcatcgacctcggcaacctctggccacctacaagaacaaccgattcaaccactgctccctacatccgcgccctcaatagacgacagtgacctcctggtggcggtggtgctagattgctggggctgaagaggcgccctgttgtcacaacaagtcttagacgtggtctgcagattagatgatagtgacctcccttccttgcgactcatggtttgctggagctgtaggattctcccggcacaatggaggtgctatcgtctgatttggagcaacaaggaaatataaagtagtaaaacaatttctttacgaaagataaacttttcggggtcattgaaaattatgagtcaaaacctagagcaaaatcttcagaatgccttgcttttagtaagtgattacctattttgttacagagccgaaatctacttctagatgaccctcagatttgaccgtgcaatataagtttgatcgtgcaatataagtttgtaaccctcagatgaagtaaccgtagtgactgctggtagtgttgagtaatgaccaattagtgcctaaacaatttttaccatgctgcatatgtaacccaactcgtccaaatatacgaatgtttctctcttaatgtgggatgcacataaaacttgttttcatatttatgagctcagtaagcaagttcagtttttttactgagatacactattgttccactgcaggatgcaagttacccttcagaacaactcttaatttctggagaaaaggaaacacaggaccaggtttactttataaaacagatcgaatcattgggaaatgcttgtggaactattgctctactccatgctgttggaaatgcatcttccaaagtcaatttagtggagaattcatgcttggacttgttcttcaaatcaactgctaccatggatgaccctcatgagcgtgctgtgtgtctggagaaggatgatacaacggcaagggctcatttacttgctgccaattatggtgccactaagggtatgagcccagatgttgcgacagccccaaagagcaaaggatgcctgatgattggagaatataacaaggtcgccaaaaagtgaccttggcgttaccgaggacgacgctcgtcgtggacctgcaaagcggcatcgacgaccaccgacaccggggacgggaccacgggcacaccggtgacatgagctgggtggcatgaattcattgctccaaattgaaacatccccaacatttcctcttgtatccaaggtctcaactataatcttgggaatggatgtgtcccatggttctcttggacattgtgagagcttctgtccgcacccaatcacctaaaatggaaatgattgactcattgtttaagccacgagaagctaaagatgatggtctgatcagggagtgtctgattgacttctacaccagttctgggaagagaaagcctgaccaagtcatcatcttcagaaattccttctgtctcaaatggagacaatgacgagtggtcagaagtacagattttaaaactatgacttacgttcatcatcttaagtctatgctcctctctgtgcttgacctctcaagtacagattttaaagcctcatctgcttcagtttattgttcttgttctcagattttgatatgagaatatagctcagagttcaagtactgatcataatgttgaagaactgttggcgtaatgaagctcatttttaagagcagtaattttggatcacgtgttctgacgaatctgttagctgattgttgatgcttttattctgtaacctatggccataactcaagaacttatgcatgaatttatccatcccaattatgatttccgagcattcattttctgtttatactaggtaggtgcccttgcgatgccacggaacataaattgcgaacctccaatggacttcatttgagacaagtgatgcccaagaaaatgggggtaaactgac

SEQ ID NO: 60289 - DNA, 2491 bp, Zea Mays
ctccacccgcagcccccgcaatccaccgcctttccatccgcggccgcaatccaccgcgccaaatccgccgccacacccctgcgcgctcgcccctgcgccaaatcctccttggacgcgccccgacggctggcgcaacccctgctcgtgccacggcttgcgtagaatggaaggtccatggcgcaactcctccttgattgagcggagaatggaaggtcaccgtacgacattggtcgagaggaggaggttgaggatggatgcccgtaatgccacgcccgcccctacgccaatggaaggtccgttgccaaatcccacggatggaaggtggcggatggaggtggcgcgcaccttccatccccgcggcgcgcaccttcatcctccgcgaccgcccgcggatctccaaaacagcatggcgcgtggatggggaggaggtgcgcggatggaaaggacgctctcctacccatctggtccgcgatcctcgctcaccttccatcgacgacgccgcatcgacctcggcaacctctggccacctacaagaacaaccgattcaaccactgctccctacatccgcgccctcaatagacgacagtgacctcctggtggcggtggtgctagattgctggggctgaagaggcgccctgttgtcacaacaagtcttagacgtggtctgcagattagatgatagtgacctcccttccttgcgactcatggtttgctggagctgtaggattctcccggcacaatggaggtgctatcgtctgatttggagcaacaaggaaatataaagtagtaaaacaatttctttacgaaagataaacttttcggggtcattgaaaattatgagtcaaaacctagagcaaaatcttcagaatgccttgcttttagtaagtgattacctattttgttacagagccgaaatctacttctagatgaccctcagatttgaccgtgcaatataagtttgatcgtgcaatataagtttgtaaccctcagatgaagtaaccgtagtgactgctggtagtgttgagtaatgaccaattagtgcctaaacaatttttaccatgctgcatatgtaacccaactcgtccaaatatacgaatgtttctctcttaatgtgggatgcacataaaacttgttttcatatttatgagctcagtaagcaagttcagtttttttactgagatacactattgttccactgcaggatgcaagttacccttcagaacaactcttaatttctggagaaaaggtgaacaattacgttccttgtagatgcctcccccctcctcatgaaacacaggaccaggtttactttataaaacagatcgaatcattgggaaatgcttgtggaactattgctctactccatgctgttggaaatgcatcttccaaagtcaatttagtggagaattcatgcttggacttgttcttcaaatcaactgctaccatggatgaccctcatgagcgtgctgtgtgtctggagaaggatgatacaacggcaagggctcatttacttgctgccaattatggtgccactaagggtatgagcccagatgttgcgacagccccaaagagcaaaggatgcctgatgattggagaatataacaaggtcgccaaaaagtgaccttggcgttaccgaggacgacgctcgtcgtggacctgcaaagcggcatcgacgaccaccgacaccggggacgggaccacgggcacaccggtgacatgagctgggtggcatgaattcattgctccaaattgaaacatccccaacatttcctcttgtatccaaggtctcaactataatcttgggaatggatgtgtcccatggttctcttggacattgtgagagcttctgtccgcacccaatcacctaaaatggaaatgattgactcattgtttaagccacgagaagctaaagatgatggtctgatcagggagtgtctgattgacttctacaccagttctgggaagagaaagcctgaccaagtcatcatcttcagaaattccttctgtctcaaatggagacaatgacgagtggtcagaagtacagattttaaaactatgacttacgttcatcatcttaagtctatgctcctctctgtgcttgacctctcaagtacagattttaaagcctcatctgcttcagtttattgttcttgttctcagattttgatatgagaatatagctcagagttcaagtactgatcataatgttgaagaactgttggcgtaatgaagctcatttttaagagcagtaattttggatcacgtgttctgacgaatctgttagctgattgttgatgcttttattctgtaacctatggccataactcaagaacttatgcatgaatttatccatcccaattatgatttccgagcattcattttctgtttatactaggtaggtgcccttgcgatgccacggaacataaattgcgaacctccaatggacttcatttgagacaagtgatgcccaagaaaatgggggtaaactgac

SEQ ID NO: 60290 - DNA, 2509 bp, Zea Mays
ctccacccgcagcccccgcaatccaccgcctttccatccgcggccgcaatccaccgcgccaaatccgccgccacacccctgcgcgctcgcccctgcgccaaatcctccttggacgcgccccgacggctggcgcaacccctgctcgtgccacggcttgcgtagaatggaaggtccatggcgcaactcctccttgattgagcggagaatggaaggtcaccgtacgacattggtcgagaggaggaggttgaggatggatgcccgtaatgccacgcccgcccctacgccaatggaaggtccgttgccaaatcccacggatggaaggtggcggatggaggtggcgcgcaccttccatccccgcggcgcgcaccttcatcctccgcgaccgcccgcggatctccaaaacagcatggcgcgtggatggggaggaggtgcgcggatggaaaggacgctctcctacccatctggtccgcgatcctcgctcaccttccatcgacgacgccgcatcgacctcggcaacctctggccacctacaagaacaaccgattcaaccactgctccctacatccgcgccctcaatagacgacagtgacctcctggtggcggtggtgctagattgctggggctgaagaggcgccctgttgtcacaacaagtcttagacgtggtctgcagattagatgatagtgacctcccttccttgcgactcatggtttgctggagctgtaggattctcccggcacaatggaggtgctatcgtctgatttggagcaacaaggaaatataaagtagtaaaacaatttctttacgaaagataaacttttcggggtcattgaaaattatgagtcaaaacctagagcaaaatcttcagaatgccttgcttttagtaagtgattacctattttgttacagagccgaaatctacttctagatgaccctcagatttgaccgtgcaatataagtttgatcgtgcaatataagtttgtaaccctcagatgaagtaaccgtagtgactgctggtagtgttgagtaatgaccaattagtgcctaaacaatttttaccatgctgcatatgtaacccaactcgtccaaatatacgaatgtttctctcttaatgtgggatgcacataaaacttgttttcatatttatgagctcagtaagcaagttcagtttttttactgagatacactattgttccactgcaggatgcaagttacccttcagaacaactcttaatttctggagaaaaggtgaacaattacgttccttgtagatgcctcccccctcctcatgaaacacaggaccaggtttactttataaaacagatcgaatcattgggaaatgcttgtggaactattgctctactccatgctgttggaaatgcatcttccaaagtcaatttagtggagaattcatgcttggacttgttcttcaaatcaactgctaccatggatgaccctcatgagcgtgctgtgtgtctggagaaggatgatacaacggcaagggctcatttacttgctgccaattatggtgccactaagggtatgagcccagatgttgcgacagccccaaagagcaaaggatgcctgatgattggagaatataacaaggtcgccaaaaagtgaccttggcgttaccgaggacgacgctcgtcgtggacctgcaaagcggcatcgacgaccaccgacaccggggacgggaccacgggcacaccggtgacatgagctgggtggcatgaattcattgctccaaattgaaacatccccaacatttcctcttgtatccaaggtctcaactataatcttgggaatggatgtgtcccatggttctcttggacattgtgaggtaccatctattgttgttagcttctgtccgcacccaatcacctaaaatggaaatgattgactcattgtttaagccacgagaagctaaagatgatggtctgatcagggagtgtctgattgacttctacaccagttctgggaagagaaagcctgaccaagtcatcatcttcagaaattccttctgtctcaaatggagacaatgacgagtggtcagaagtacagattttaaaactatgacttacgttcatcatcttaagtctatgctcctctctgtgcttgacctctcaagtacagattttaaagcctcatctgcttcagtttattgttcttgttctcagattttgatatgagaatatagctcagagttcaagtactgatcataatgttgaagaactgttggcgtaatgaagctcatttttaagagcagtaattttggatcacgtgttctgacgaatctgttagctgattgttgatgcttttattctgtaacctatggccataactcaagaacttatgcatgaatttatccatcccaattatgatttccgagcattcattttctgtttatactaggtaggtgcccttgcgatgccacggaacataaattgcgaacctccaatggacttcatttgagacaagtgatgcccaagaaaatgggggtaaactgac

SEQ ID NO: 60291 - DNA, 2031 bp, Zea Mays
ctccacccgcagcccccgcaatccaccgcctttccatccgcggccgcaatccaccgcgccaaatccgccgccacacccctgcgcgctcgcccctgcgccaaatcctccttggacgcgccccgacggctggcgcaacccctgctcgtgccacggcttgcgtagaatggaaggtccatggcgcaactcctccttgattgagcggagaatggaaggtcaccgtacgacattggtcgagaggaggaggttgaggatggatgcccgtaatgccacgcccgcccctacgccaatggaaggtccgttgccaaatcccacggatggaaggtggcggatggaggtggcgcgcaccttccatccccgcggcgcgcaccttcatcctccgcgaccgcccgcggatctccaaaacagcatggcgcgtggatggggaggaggtgcgcggatggaaaggacgctctcctacccatctggtccgcgatcctcgctcaccttccatcgacgacgccgcatcgacctcggcaacctctggccacctacaagaacaaccgattcaaccactgctccctacatccgcgccctcaatagacgacagtgacctcctggtggcggtggtgctagattgctggggctgaagaggcgccctgttgtcacaacaagtcttagacgtggtctgcagattagatgatagtgacctcccttccttgcgactcatggtttgctggagctgtaggattctcccggcacaatggaggtgctatcgtctgatttggagcaacaaggaaatataaagatgcaagttacccttcagaacaactcttaatttctggagaaaaggaaacacaggaccaggtttactttataaaacagatcgaatcattgggaaatgcttgtggaactattgctctactccatgctgttggaaatgcatcttccaaagtcaatttagtggagaattcatgcttggacttgttcttcaaatcaactgctaccatggatgaccctcatgagcgtgctgtgtgtctggagaaggatgatacaacggcaagggctcatttacttgctgccaattatggtgccactaagggtatgagcccagatgttgcgacagccccaaagagcaaaggatgcctgatgattggagaatataacaaggtcgccaaaaagtgaccttggcgttaccgaggacgacgctcgtcgtggacctgcaaagcggcatcgacgaccaccgacaccggggacgggaccacgggcacaccggtgacatgagctgggtggcatgaattcattgctccaaattgaaacatccccaacatttcctcttgtatccaaggtctcaactataatcttgggaatggatgtgtcccatggttctcttggacattgtgagagcttctgtccgcacccaatcacctaaaatggaaatgattgactcattgtttaagccacgagaagctaaagatgatggtctgatcagggagtgtctgattgacttctacaccagttctgggaagagaaagcctgaccaagtcatcatcttcagaaattccttctgtctcaaatggagacaatgacgagtggtcagaagtacagattttaaaactatgacttacgttcatcatcttaagtctatgctcctctctgtgcttgacctctcaagtacagattttaaagcctcatctgcttcagtttattgttcttgttctcagattttgatatgagaatatagctcagagttcaagtactgatcataatgttgaagaactgttggcgtaatgaagctcatttttaagagcagtaattttggatcacgtgttctgacgaatctgttagctgattgttgatgcttttattctgtaacctatggccataactcaagaacttatgcatgaatttatccatcccaattatgatttccgagcattcattttctgtttatactaggtaggtgcccttgcgatgccacggaacataaattgcgaacctccaatggacttcatttgagacaagtgatgcccaagaaaatgggggtaaactgac

SEQ ID NO: 60292 - DNA, 889 bp, Zea Mays
ccagctccagcatgcacctcaaacaaatctgggtggcatgaattcattgctccaaattgaaacatccccaacatttcctcttgtatccaaggtctcaactataatcttgggaatggatgtgtcccatggttctcttggacattgtgagagcttctgtccgcacccaatcacctaaaatggaaatgattgactcattgtttaagccacgagaagctaaagatgatggtctgatcaggtaagatattttagcctgcattacatttgttaagttatgtactaatgacatgctttctcccattgcttgttggattttaatgttgctgcagggagtgtctgattgacttctacaccagttctgggaagagaaagcctgaccaagtcatcatcttcagaaattccttctgtctcaaatggagacaatgacgagtggtcagaagtacagattttaaaactatgacttacgttcatcatcttaagtctatgctcctctctgtgcttgacctctcaagtacagattttaaagcctcatctgcttcagtttattgttcttgttctcagattttgatatgagaatatagctcagagttcaagtactgatcataatgttgaagaactgttggcgtaatgaagctcatttttaagagcagtaattttggatcacgtgttctgacgaatctgttagctgattgttgatgcttttattctgtaacctatggccataactcaagaacttatgcatgaatttatccatcccaattatgatttccgagcattcattttctgtttatactaggtaggtgcccttgcgatgccacggaacataaattgcgaacctccaatggacttcatttgagacaagtgatgcccaagaaaatgggggtaaactgac

SEQ ID NO: 60293 - DNA, 2262 bp, Zea Mays
cactgagtcctcccgagtcccgacaaaacgtccagagcagcaagcagccgagcacccaacgtcccaaccgccgccggaggcccggagcgcggagcaaaaccatctccaaaaccctagttattccctagcgccgccggagcccggagcttcgacccacctcatcgcgcctcctctctttctctctctccgccggcttccttgactgcgccgcacccgactctcatttttctccctcgacggtgctcgacccccaccggctcagcggagtcagcgctctatctgtccctctgccgcgccgagagtaatttctccttgggaccgcagaccgaggacggagcgaggagaagccaaaatttgagtttcgtctcttgccgacgccttcatttctttctgtgaaagctgctgtattttgagggaagctagagggtcttcgtcgacccagccaagctctgccttgtttggacggctcgggtacgcgtcggtgtcgcggcccccccggaatagtgaaccctaaacccctctccgttgctcatggcgccgccaccacaaccaaagcagctggtgctcgctgcgtcatccgcggacgcgggcgtggctgcctgggacctccgcaccggcgcggaggacatccgcctccgcccctgcgcctcccgccctcggtcgctcgcctcggttgccgaccgcttcctcgcctccgctcaggctcttcccgcgggcggcaactccgggaccatccacttctactactgggacaagccgcaagtggccgtcaagagctttcctgctgagccgatccgcgcactcatcgccgatcaggagggaagctacctcattggcggtggcagcaatggcaacattttcctttgggaggtgtctagtggagagcttctccatacatggcatgcacactatcgtgctgttaggtgcctcgggctgtatgactatttgcttgtctcagggtcagaggatgggactatcaaagtttgggatctcatcacggtgcttgatgagcaatcaaggctggaggtccagacaccatatttgtatagtttcagtcagcatgcactgcctgtaactgatattgcttgttttcttggagcaatcgctatatcttcttctgaggatcgaacctgcaaaatttggagtttatctgagggtaggatgctgagaagcatttcatttcctactagcattgattctatagcactagacccaagaagtcatattttctatgctggtggtagagatggaaaaatatatgttactgctatgggtgttgatctcagttttcatggtagggatgagtcatctattctgggtgcattggatgaccacagcaaggcagtaacaagcttagcatcaagcagagatggacttctacttgtctctggatctgaggatggtaatgttcgggtgtgggataccagatgtcagcaagttacccgaaaattcaaacactcccaagtaaccaatgttcttattgtaacgccacaacgagtaaatctgccaccgctacaaccattacgcaaagttcggtctgcaaatggggaggctgaacggcaggcagtacttcttcatcggcctgaaaatgatgtcccaattcctggaaataagaccttcatttttatggagcgctacttggatgagcttcagaagcatggtggttcatccaggttatttgattttgggccgaatgctcagaatggcactccaaaccaacagggaacagaatggagagatagatacttggagttgcaggatctctttgtacatgaggtcctccatcagatgccatcctcgaggaacccatgatgcacatgctttggatatcgtaggatcatttgtggtgtcgaaacagtgatggttgccattcgggctacaaacgatgtagatgagttctttggagtaattcaactgatggtgctttcggctgcgaggaacttatcagattctgaactaaaaccactagaatcggtgccagcagtcacttggaactggttctcgtttgtgtactagtctagagaaacgctaaaaatcaggtttctcttgattctagttctaattttaaggatacagtgagcttgctacataaagttattttgatttcatagagaaaatgttttgttctcaggggaatctgaattttgaaagttttctactagaatctaagatttgatacgttcagggttaaccataccaattaaggactaaaaagtgctagttagcggtatcggattttcgctggaaaaccgctgtttttcg

SEQ ID NO: 60294 - DNA, 1618 bp, Zea Mays
cagggggagactggccttggttatctctttccagttttcagacctcactcatgacttattgacttcatgagtgagccaacggcgctaggtctgtcctctttttgaaactgttaggacgtgttgtttgatgcttggtgtgctcatttgaggttgctgtggaatgtttccagtgtgtttccttggtcgctagtgagctcaaggtggtgcgaagtggatgctcctggtggtgtctagtggagagcttctccatacatggcatgcacactatcgtgctgttaggtgcctcgggctgtatgactatttgcttgtctcagggtcagaggatgggactatcaaagtttgggatctcatcacggtgcttgatgagcaatcaaggctggaggtccagacaccatatttgtatagtttcagtcagcatgcactgcctgtaactgatattgcttgttttcttggagcaatcgctatatcttcttctgaggatcgaacctgcaaaatttggagtttatctgagggtaggatgctgagaagcatttcatttcctactagcattgattctatagcactagacccaagaagtcatattttctatgctggtggtagagatggaaaaatatatgttactgctatgggtgttgatctcagttttcatggtagggatgagtcatctattctgggtgcattggatgaccacagcaaggcagtaacaagcttagcatcaagcagagatggacttctacttgtctctggatctgaggatggtaatgttcgggtgtgggataccagatgtcagcaagttacccgaaaattcaaacactcccaagtaaccaatgttcttattgtaacgccacaacgagtaaatctgccaccgctacaaccattacgcaaagttcggtctgcaaatggggaggctgaacggcaggcagtacttcttcatcggcctgaaaatgatgtcccaattcctggaaataagaccttcatttttatggagcgctacttggatgagcttcagaagcatggtggttcatccaggttatttgattttgggccgaatgctcagaatggcactccaaaccaacagggaacagaatggagagatagatacttggagttgcaggatctctttgtacatgaggtcctccatcagatgccatcctcgaggaacccatgatgcacatgctttggatatcgtaggatcatttgtggtgtcgaaacagtgatggttgccattcgggctacaaacgatgtagatgagttctttggagtaattcaactgatggtgctttcggctgcgaggaacttatcagattctgaactaaaaccactagaatcggtgccagcagtcacttggaactggttctcgtttgtgtactagtctagagaaacgctaaaaatcaggtttctcttgattctagttctaattttaaggatacagtgagcttgctacataaagttattttgatttcatagagaaaatgttttgttctcaggggaatctgaattttgaaagttttctactagaatctaagatttgatacgttcagggttaaccataccaattaaggactaaaaagtgctagttagcggtatcggattttcgctggaaaaccgctgtttttcg

SEQ ID NO: 60295 - DNA, 1499 bp, Zea Mays
gttatctctttccagttttcagacctcactcatgacttattgacttcatgagtgagccaacggcgctagtgtgtttccttggtcgctagtgagctcaaggtggtgcgaagtggatgctcctggtggtgtctagtggagagcttctccatacatggcatgcacactatcgtgctgttaggtgcctcgggctgtatgactatttgcttgtctcagggtcagaggatgggactatcaaagtttgggatctcatcacggtgcttgatgagcaatcaaggctggaggtccagacaccatatttgtatagtttcagtcagcatgcactgcctgtaactgatattgcttgttttcttggagcaatcgctatatcttcttctgaggatcgaacctgcaaaatttggagtttatctgagggtaggatgctgagaagcatttcatttcctactagcattgattctatagcactagacccaagaagtcatattttctatgctggtggtagagatggaaaaatatatgttactgctatgggtgttgatctcagttttcatggtagggatgagtcatctattctgggtgcattggatgaccacagcaaggcagtaacaagcttagcatcaagcagagatggacttctacttgtctctggatctgaggatggtaatgttcgggtgtgggataccagatgtcagcaagttacccgaaaattcaaacactcccaaggtccagtaaccaatgttcttattgtaacgccacaacgagtaaatctgccaccgctacaaccattacgcaaagttcggtctgcaaatggggaggctgaacggcaggcagtacttcttcatcggcctgaaaatgatgtcccaattcctggaaataagaccttcatttttatggagcgctacttggatgagcttcaggttatttgattttgggccgaatgctcagaatggcactccaaaccaacagggaacagaatggagagatagatacttggagttgcaggatctctttgtacatgaggtcctccatcagatgccatcctcgaggaacccatgatgcacatgctttggatatcgatcatttgtggtgtcgaaacagtgatggttgccattcgggctacaaacgatgtagatgagttctttggagtaattcaactgatggtgctttcggctgcgaggaacttatcagattctgaactaaaaccactagaatcggtgccagcagtcacttggaactggttctcgtttgtgtactagtctagagaaacgctaaaaatcaggtttctcttgattctagttctaattttaaggatacagtgagcttgctacataaagttattttgatttcatagagaaaatgttttgttctcaggggaatctgaattttgaaagttttctactagaatctaagatttgatacgttcagggttaaccataccaattaaggactaaaaagtgctagttagcggtatcggattttcgctggaaaaccgctgtttttcg

SEQ ID NO: 60296 - DNA, 1587 bp, Zea Mays
gttttcagacctcactcatgacttattgacttcatgagtgagccaacggcgctaggtctgtcctctttttgaaactgttaggacgtgttgtttgatgcttggtgtgctcatttgaggttgctgtggaatgtttccagtgtgtttccttggtcgctagtgagctcaaggtggtgcgaagtggatgctcctggtggtgtctagtggagagcttctccatacatggcatgcacactatcgtgctgttaggtgcctcgggctgtatgactatttgcttgtctcagggtcagaggatgggactatcaaagtttgggatctcatcacggtgcttgatgagcaatcaaggctggaggtccagacaccatatttgtatagtttcagtcagcatgcactgcctgtaactgatattgcttgttttcttggagcaatcgctatatcttcttctgaggatcgaacctgcaaaatttggagtttatctgagggtaggatgctgagaagcatttcatttcctactagcattgattctatagcactagacccaagaagtcatattttctatgctggtggtagagatggaaaaatatatgttactgctatgggtgttgatctcagttttcatggtagggatgagtcatctattctgggtgcattggatgaccacagcaaggcagtaacaagcttagcatcaagcagagatggacttctacttgtctctggatctgaggatggtaatgttcgggtgtgggataccagatgtcagcaagttacccgaaaattcaaacactcccaaggtccagtaaccaatgttcttattgtaacgccacaacgagtaaatctgccaccgctacaaccattacgcaaagttcggtctgcaaatggggaggctgaacggcaggcagtacttcttcatcggcctgaaaatgatgtcccaattcctggaaataagaccttcatttttatggagcgctacttggatgagcttcagaagcatggtggttcatccaggttatttgattttgggccgaatgctcagaatggcactccaaaccaacagggaacagaatggagagatagatacttggagttgcaggatctctttgtacatgaggtcctccatcagatgccatcctcgaggaacccatgatgcacatgctttggatatcgatcatttgtggtgtcgaaacagtgatggttgccattcgggctacaaacgatgtagatgagttctttggagtaattcaactgatggtgctttcggctgcgaggaacttatcagattctgaactaaaaccactagaatcggtgccagcagtcacttggaactggttctcgtttgtgtactagtctagagaaacgctaaaaatcaggtttctcttgattctagttctaattttaaggatacagtgagcttgctacataaagttattttgatttcatagagaaaatgttttgttctcaggggaatctgaattttgaaagttttctactagaatctaagatttgatacgttcagggttaaccataccaattaaggactaaaaagtgctagttagcggtatcggattttcgctggaaaaccgctgtttttcg

SEQ ID NO: 60297 - DNA, 1540 bp, Zea Mays
ctaggtctgtcctctttttgaaactgttaggacgtgttgtttgatgcttggtgtgctcatttgaggttgctgtggaatgtttccagtgtgtttccttggtcgctagtgagctcaaggtggtgcgaagtggatgctcctggtggtgtctagtggagagcttctccatacatggcatgcacactatcgtgctgttaggtgcctcgggctgtatgactatttgcttgtctcagggtcagaggatgggactatcaaagtttgggatctcatcacggtgcttgatgagcaatcaaggctggaggtccagacaccatatttgtatagtttcagtcagcatgcactgcctgtaactgatattgcttgttttcttggagcaatcgctatatcttcttctgaggatcgaacctgcaaaatttggagtttatctgagggtaggatgctgagaagcatttcatttcctactagcattgattctatagcactagacccaagaagtcatattttctatgctggtggtagagatggaaaaatatatgttactgctatgggtgttgatctcagttttcatggtagggatgagtcatctattctgggtgcattggatgaccacagcaaggcagtaacaagcttagcatcaagcagagatggacttctacttgtctctggatctgaggatggtaatgttcgggtgtgggataccagatgtcagcaagttacccgaaaattcaaacactcccaaggtccagtaaccaatgttcttattgtaacgccacaacgagtaaatctgccaccgctacaaccattacgcaaagttcggtctgcaaatggggaggctgaacggcaggcagtacttcttcatcggcctgaaaatgatgtcccaattcctggaaataagaccttcatttttatggagcgctacttggatgagcttcagaagcatggtggttcatccaggttatttgattttgggccgaatgctcagaatggcactccaaaccaacagggaacagaatggagagatagatacttggagttgcaggatctctttgtacatgaggtcctccatcagatgccatcctcgaggaacccatgatgcacatgctttggatatcgtaggatcatttgtggtgtcgaaacagtgatggttgccattcgggctacaaacgatgtagatgagttctttggagtaattcaactgatggtgctttcggctgcgaggaacttatcagattctgaactaaaaccactagaatcggtgccagcagtcacttggaactggttctcgtttgtgtactagtctagagaaacgctaaaaatcaggtttctcttgattctagttctaattttaaggatacagtgagcttgctacataaagttattttgatttcatagagaaaatgttttgttctcaggggaatctgaattttgaaagttttctactagaatctaagatttgatacgttcagggttaaccataccaattaaggactaaaaagtgctagttagcggtatcggattttcgctggaaaaccgctgtttttcg

SEQ ID NO: 60298 - DNA, 1377 bp, Zea Mays
cgctagtgagctcaaggtggtgcgaagtggatgctcctggtggtgtctagtggagagcttctccatacatggcatgcacactatcgtgctgttaggtgcctcgggctgtatgactatttgcttgtctcaggggtgcttgatgagcaatcaaggctggaggtccagacaccatatttgtatagtttcagtcagcatgcactgcctgtaactgatattgcttgttttcttggagcaatcgctatatcttcttctgaggatcgaacctgcaaaatttggagtttatctgagggtaggatgctgagaagcatttcatttcctactagcattgattctatagcactagacccaagaagtcatattttctatgctggtggtagagatggaaaaatatatgttactgctatgggtgttgatctcagttttcatggtagggatgagtcatctattctgggtgcattggatgaccacagcaaggcagtaacaagcttagcatcaagcagagatggacttctacttgtctctggatctgaggatggtaatgttcgggtgtgggataccagatgtcagcaagttacccgaaaattcaaacactcccaaggtccagtaaccaatgttcttattgtaacgccacaacgagtaaatctgccaccgctacaaccattacgcaaagttcggtctgcaaatggggaggctgaacggcaggcagtacttcttcatcggcctgaaaatgatgtcccaattcctggaaataagaccttcatttttatggagcgctacttggatgagcttcaggttatttgattttgggccgaatgctcagaatggcactccaaaccaacagggaacagaatggagagatagatacttggagttgcaggatctctttgtacatgaggtcctccatcagatgccatcctcgaggaacccatgatgcacatgctttggatatcgatcatttgtggtgtcgaaacagtgatggttgccattcgggctacaaacgatgtagatgagttctttggagtaattcaactgatggtgctttcggctgcgaggaacttatcagattctgaactaaaaccactagaatcggtgccagcagtcacttggaactggttctcgtttgtgtactagtctagagaaacgctaaaaatcaggtttctcttgattctagttctaattttaaggatacagtgagcttgctacataaagttattttgatttcatagagaaaatgttttgttctcaggggaatctgaattttgaaagttttctactagaatctaagatttgatacgttcagggttaaccataccaattaaggactaaaaagtgctagttagcggtatcggattttcgctggaaaaccgctgtttttcg

SEQ ID NO: 60299 - DNA, 1406 bp, Zea Mays
aggtggtgcgaagtggatgctcctggtggtgtctagtggagagcttctccatacatggcatgcacactatcgtgctgttaggtgcctcgggctgtatgactatttgcttgtctcagggtcagaggatgggactatcaaagtttgggatctcatcacggtgcttgatgagcaatcaaggctggaggtccagacaccatatttgtatagtttcagtcagcatgcactgcctgtaactgatattgcttgttttcttggagcaatcgctatatcttcttctgaggatcgaacctgcaaaatttggagtttatctgagggtaggatgctgagaagcatttcatttcctactagcattgattctatagcactagacccaagaagtcatattttctatgctggtggtagagatggaaaaatatatgttactgctatgggtgttgatctcagttttcatggtagggatgagtcatctattctgggtgcattggatgaccacagcaaggcagtaacaagcttagcatcaagcagagatggacttctacttgtctctggatctgaggatggtaatgttcgggtgtgggataccagatgtcagcaagttacccgaaaattcaaacactcccaaggtccagtaaccaatgttcttattgtaacgccacaacgagtaaatctgccaccgctacaaccattacgcaaagttcggtctgcaaatggggaggctgaacggcaggcagtacttcttcatcggcctgaaaatgatgtcccaattcctggaaataagaccttcatttttatggagcgctacttggatgagcttcaggttatttgattttgggccgaatgctcagaatggcactccaaaccaacagggaacagaatggagagatagatacttggagttgcaggatctctttgtacatgaggtcctccatcagatgccatcctcgaggaacccatgatgcacatgctttggatatcgtaggatcatttgtggtgtcgaaacagtgatggttgccattcgggctacaaacgatgtagatgagttctttggagtaattcaactgatggtgctttcggctgcgaggaacttatcagattctgaactaaaaccactagaatcggtgccagcagtcacttggaactggttctcgtttgtgtactagtctagagaaacgctaaaaatcaggtttctcttgattctagttctaattttaaggatacagtgagcttgctacataaagttattttgatttcatagagaaaatgttttgttctcaggggaatctgaattttgaaagttttctactagaatctaagatttgatacgttcagggttaaccataccaattaaggactaaaaagtgctagttagcggtatcggattttcgctggaaaaccgctgtttttcg

SEQ ID NO: 60300 - DNA, 1971 bp, Zea Mays
aacaaactgccaattagaagctaattactattccataggctaacaatttgcgtgttttgtgccagaagctcacggtgaccattagaaaactattcgtgtatacacttaaagtttcatgatcaaatgcctgtggaaccagtgctagagggatcctgagtcacgttagcaatgggaagagaggcagggtaaaggcaaagttgacacaggaagaggtagtaaaaggagacatgacaagatggaatatacccaaagatttagcatttaataggagcaaatgaaaaacagctatccacatgccttaaccttgatttgtgatttctgttgatttcaactctatcctaccccaacttgtttgggactaaaaggctttgttgttgttgatcaaatgccactgggtgtcttttaattttttactcgaatgtccatttagctcctgaagacattttctgtgacatcatggtgtgtttttcaacttccattattctacttgagcattaatgttttaagcagaaacacattataatcctcagtttactcccaaagttgtgccaatatttgacatgtttactcggtgtattttcacaggtacaatattaggtgtctagtggagagcttctccatacatggcatgcacactatcgtgctgttaggtgcctcgggctgtatgactatttgcttgtctcagggtcagaggatgggactatcaaagtttgggatctcatcacggtgcttgatgagcaatcaaggctggaggtccagacaccatatttgtatagtttcagtcagcatgcactgcctgtaactgatattgcttgttttcttggagcaatcgctatatcttcttctgaggatcgaacctgcaaaatttggagtttatctgagggtaggatgctgagaagcatttcatttcctactagcattgattctatagcactagacccaagaagtcatattttctatgctggtggtagagatggaaaaatatatgttactgctatgggtgttgatctcagttttcatggtagggatgagtcatctattctgggtgcattggatgaccacagcaaggcagtaacaagcttagcatcaagcagagatggacttctacttgtctctggatctgaggatggtaatgttcgggtgtgggataccagatgtcagcaagttacccgaaaattcaaacactcccaaggtccagtaaccaatgttcttattgtaacgccacaacgagtaaatctgccaccgctacaaccattacgcaaagttcggtctgcaaatggggaggctgaacggcaggcagtacttcttcatcggcctgaaaatgatgtcccaattcctggaaataagaccttcatttttatggagcgctacttggatgagcttcaggttatttgattttgggccgaatgctcagaatggcactccaaaccaacagggaacagaatggagagatagatacttggagttgcaggatctctttgtacatgaggtcctccatcagatgccatcctcgaggaacccatgatgcacatgctttggatatcgatcatttgtggtgtcgaaacagtgatggttgccattcgggctacaaacgatgtagatgagttctttggagtaattcaactgatggtgctttcggctgcgaggaacttatcagattctgaactaaaaccactagaatcggtgccagcagtcacttggaactggttctcgtttgtgtactagtctagagaaacgctaaaaatcaggtttctcttgattctagttctaattttaaggatacagtgagcttgctacataaagttattttgatttcatagagaaaatgttttgttctcaggggaatctgaattttgaaagttttctactagaatctaagatttgatacgttcagggttaaccataccaattaaggactaaaaagtgctagttagcggtatcggattttcgctggaaaaccgctgtttttcg

SEQ ID NO: 60301 - DNA, 978 bp, Zea Mays
tcaatgtcattatctaagtaaatttgtttgcaactactttctctgtttaatcaaggcagtaacaagcttagcatcaagcagagatggacttctacttgtctctggatctgaggatggtaatgttcgggtgtgggataccagatgtcagcaagttacccgaaaattcaaacactcccaaggtccagtaaccaatgttcttattgtaacgccacaacgagtaaatctgccaccgctacaaccattacgcaaagttcggtctgcaaatggggaggctgaacggcaggcagtacttcttcatcggcctgaaaatgatgtcccaattcctggaaataagaccttcatttttatggagcgctacttggatgagcttcagaagcatggtggttcatccaggttatttgattttgggccgaatgctcagaatggcactccaaaccaacagggaacagaatggagagatagatacttggagttgcaggatctctttgtacatgaggtcctccatcagatgccatcctcgaggaacccatgatgcacatgctttggatatcgatcatttgtggtgtcgaaacagtgatggttgccattcgggctacaaacgatgtagatgagttctttggagtaattcaactgatggtgctttcggctgcgaggaacttatcagattctgaactaaaaccactagaatcggtgccagcagtcacttggaactggttctcgtttgtgtactagtctagagaaacgctaaaaatcaggtttctcttgattctagttctaattttaaggatacagtgagcttgctacataaagttattttgatttcatagagaaaatgttttgttctcaggggaatctgaattttgaaagttttctactagaatctaagatttgatacgttcagggttaaccataccaattaaggactaaaaagtgctagttagcggtatcggattttcgctggaaaaccgctgtttttcg

SEQ ID NO: 60302 - DNA, 3519 bp, Zea Mays
cggacgcaccatagggaaataaaatccggtggaagggaaagagttctatgggagacacgacggcgcgcacgcgcgtggcgagccagagctcgagcgcaagttccatatcgcgctggagtgcaaagtgcgtcattgggaataactagtatatagcccgtgctaacagaagtctcgtcgtcgtcggcggcggagatgggcaaggcgaaggggaagcagcgtcaggacaagttctaccacctcgccaaggagcaagggtaccggagtcgcgcggcgttcaagctgctccagctcgacgcgcggttccacttcctcccgacggcgcgctcggtgcttgacctctgcgccgcgccgggagggtgggtccaggtggccgtcaaccatgctcccgtgggtgccttcgttgtcggcgtcgacctcgttcctatacgccccatccgcggggcccactcgctcaccgaggacatcaccgccaccaagtgccgcgccgcggtgcggaggctcatggactccaacggcgtctccgcttttgacgtcgtgctccacgacgggtcgcccaacgtcggtggtgcctgggcgcaggaggctacgtcgcaatcggcgctcgtcatagacgcactgcgcctcgctaccatgttcctcgctcccaagggcgccttcatcacgaaggtttttaggtctcaagattacaacgctattatgtactgtcttaaacagttgtttgagaaggtcgaggcgactaaacctacggcaagtcggtctacatctgctgaaatttatatcatttgcctgaaatacaaggctcctgcaaagattcaaccagaacttctcgatataaagcacttattcagtgtggttccagaacagaccaaatctagggatgttttggatggtaggaaaaaaagacaccgtgatgggtatgaagaagggaatacaacattacggaaagttggtttggcatcagactttatatggtctgacacccaggcgccactagagtttttgggctcttacaatgcaatttcattcgataatccagaatccctgcccataaagaatcatgagcttacaacagatgatgtaaggaactgatcagtgtttcaaaggcatcgcctaggcgtccaggccagctcgccttgggaagcagtggtgccttgtcgcctaggcgtccagataaaaaatttctgtgaggacttgcttctgttggataaacatagtttcaagcatattttaaaatggcgaattcgtttacgaaaatcactgtcagcatcatcacaagtcaccccaaaggtcaatgatgctgtggagagcacaaaggtcatggatgatgatgtacttctacaggaaatggaagaattgactagtgtcattgatagaaagaaaaaaagagaaaaaaagcgactatcaaagcgtcgagcaaaggataaagcacgcaaagccacaggaatgcaggttgatgctacaggagatgattatggcgatcctgacctgttttctattagtgttattaagggtggaaaagaacttgaagctgttgaatcagcagagattgatgtggaagatgaaattggagacggtgataatgaggatactcaagctcttgaagactctgatgaggaaatggattctgatgacgaacagcagaggtatgatgcccagcttgaagagatgcttgatgaagcttatgagcgctttgtaactaaaaagggtggtgaaataaagcaagaacgcaagcgtgcaaaacgaataaatcctgatgctgatgcagaactgttagagggaggtgaagatgatggtgatgttgaaatggatcaagattttgatgaagatcaagatcaagaggccaacccccttctgtttgctctagatgagcagaagccaactaaagagcagattgtaaagcaatggtatagtcaggatgtgttcacggaagcagcgaccggtgttactgagcggagcgacactgaagatgaaagggagattttgcagaggaataagaagatggatactggcaaaagggaaaaggtggctaaagcacaggatttgcaacatgatggttttgagattgtaccagcagaacctgtccaaaacgaagaggattcatcttcatcttctgatgaatcagaggatgatatcgatgattacagaaaggctgaagtactagcctatgctaagaagatgctgaggaagaaacagagagagcagatacttgatgatgcttacaacaagcatatgtttgatgacgaagggttacccaactggtttgttgaggatgaaaagaggcataggcagcccatgaagcctgtttcacgtgaggaagtagctgcaatgagggctcagtttaaggagattgatgcccgcccatccaagaaggtcgcagaggccaaggctcggaagaagcgtgtcgccatgaagaaacttgacaaggcacgccaaaaggcagatgctatagcggaccagaatgacataaacgagctatcaaagaggaagatgattgaccggatttacaggaaggcgatgccgaagaagcctcagaaggagtatgttgttgcaaagaagggtgttcaggtgagggctggcaaagggaaggtgttggtggatccacggatgaagaaggacaagcgggccagtgggactgggaagaagggtggcaaaggcgcaaaggggaagggtggccagaaaggcatgagagggaaagctgggaagaaggcagggaaagccccacggtaaggaagccgaggagctaagcatggctggaatgctggatgcccgcctccctgcggaatttttgcctcaggctacagctactcagtaggcagatgttttgaaatcgtgtgatggtagaagtttgtgtcgaaaagttttgtagcgtgagtagtggctataatgtttcaaaactagtggtcactttagtgtcactaagcataatttacacacttcacaatcaattatcaaaacttttaccccccttggggactctagagcacatacatctcttactaatatttgtgtgatgaagtgaggaaatgaagagttctcctttgtgtgtccaggtgacagtggctttggttgctttggaccaaattggcgactttggctctggaatcggcttgcatttccttatcagatgaaaagaatgcagcactttgaatctcaagcaatgagatgcagagaccgcctggatgcgcaccgctcaacttgttgatcagagtagaatctgatccaagctcttttgcgttcaagatttggaatcaggctgatgcataggcggccactgactccgagctacttggtgatagcatcaagcagctggccagataccaacttgatgatggctcagctctaagagaatataataagcagtgaggcgatggctcacagtcactgcaaaagccgttactgttgtagtgcttaaacaattgtttcaagtggcttgaagaacgtcagtagaatcgcaggaaccaatcgagacatctctgtacacggaaaggtacagaataatatattcttttaaaacccacc

SEQ ID NO: 60303 - DNA, 3096 bp, Zea Mays
cggacgcaccatagggaaataaaatccggtggaagggaaagagttctatgggagacacgacggcgcgcacgcgcgtggcgagccagagctcgagcgcaagttccatatcgcgctggagtgcaaagtgcgtcattgggaataactagtatatagcccgtgctaacagaagtctcgtcgtcgtcggcggcggagatgggcaaggcgaaggggaagcagcgtcaggacaagttctaccacctcgccaaggagcaagggtaccggagtcgcgcggcgttcaagctgctccagctcgacgcgcggttccacttcctcccgacggcgcgctcggtgcttgacctctgcgccgcgccgggagggtgggtccaggtggccgtcaaccatgctcccgtgggtgccttcgttgtcggcgtcgacctcgttcctatacgccccatccgcggggcccactcgctcaccgaggacatcaccgccaccaagtgccgcgccgcggtgcggaggctcatggactccaacggcgtctccgcttttgacgtcgtgctccacgacgggtcgcccaacgtcggtggtgcctgggcgcaggaggctacgtcgcaatcggcgctcgtcatagacgcactgcgcctcgctaccatgttcctcgctcccaagggcgccttcatcacgaaggtttttaggtctcaagattacaacgctattatgtactgtcttaaacagttgtttgagaaggtcgaggcgactaaacctacgataaaaaatttctgtgaggacttgcttctgttggataaacatagtttcaagcatattttaaaatggcgaattcgtttacgaaaatcactgtcagcatcatcacaagtcaccccaaaggtcaatgatgctgtggagagcacaaaggtcatggatgatgatgtacttctacaggaaatggaagaattgactagtgtcattgatagaaagaaaaaaagagaaaaaaagcgactatcaaagcgtcgagcaaaggataaagcacgcaaagccacaggaatgcaggttgatgctacaggagatgattatggcgatcctgacctgttttctattagtgttattaagggtggaaaagaacttgaagctgttgaatcagcagagattgatgtggaagatgaaattggagacggtgataatgaggatactcaagctcttgaagactctgatgaggaaatggattctgatgacgaacagcagaggtatgatgcccagcttgaagagatgcttgatgaagcttatgagcgctttgtaactaaaaagggtggtgaaataaagcaagaacgcaagcgtgcaaaacgaataaatcctgatgctgatgcagaactgttagagggaggtgaagatgatggtgatgttgaaatggatcaagattttgatgaagatcaagatcaagaggccaacccccttctgtttgctctagatgagcagaagccaactaaagagcagattgtaaagcaatggtatagtcaggatgtgttcacggaagcagcgaccggtgttactgagcggagcgacactgaagatgaaagggagattttgcagaggaataagaagatggatactggcaaaagggaaaaggtggctaaagcacaggatttgcaacatgatggttttgagattgtaccagcagaacctgtccaaaacgaagaggattcatcttcatcttctgatgaatcagaggatgatatcgatgattacagaaaggctgaagtactagcctatgctaagaagatgctgaggaagaaacagagagagcagatacttgatgatgcttacaacaagcatatgtttgatgacgaagggttacccaactggtttgttgaggatgaaaagaggcataggcagcccatgaagcctgtttcacgtgaggaagtagctgcaatgagggctcagtttaaggagattgatgcccgcccatccaagaaggtcgcagaggccaaggctcggaagaagcgtgtcgccatgaagaaacttgacaaggcacgccaaaaggcagatgctatagcggaccagaatgacataaacgagctatcaaagaggaagatgattgaccggatttacaggaaggcgatgccgaagaagcctcagaaggagtatgttgttgcaaagaagggtgttcaggtgagggctggcaaagggaaggtgttggtggatccacggatgaagaaggacaagcgggccagtgggactgggaagaagggtggcaaaggcgcaaaggggaagggtggccagaaaggcatgagagggaaagctgggaagaaggcagggaaagccccacggtaaggaagccgaggagctaagcatggctggaatgctggatgcccgcctccctgcggaatttttgcctcaggctacagctactcagtaggcagatgttttgaaatcgtgtgatggtagaagtttgtgtcgaaaagttttgtagcgtgagtagtggctataatgtttcaaaactagtggtcactttagtgtcactaagcataatttacacacttcacaatcaattatcaaaacttttaccccccttggggactctagagcacatacatctcttactaatatttgtgtgatgaagtgaggaaatgaagagttctcctttgtgtgtccaggtgacagtggctttggttgctttggaccaaattggcgactttggctctggaatcggcttgcatttccttatcagatgaaaagaatgcagcactttgaatctcaagcaatgagatgcagagaccgcctggatgcgcaccgctcaacttgttgatcagagtagaatctgatccaagctcttttgcgttcaagatttggaatcaggctgatgcataggcggccactgactccgagctacttggtgatagcatcaagcagctggccagataccaacttgatgatggctcagctctaagagaatataataagcagtgaggcgatggctcacagtcactgcaaaagccgttactgttgtagtgcttaaacaattgtttcaagtggcttgaagaacgtcagtagaatcgcaggaaccaatcgagacatctctgtacacggaaaggtacagaataatatattcttttaaaacccacc

SEQ ID NO: 60304 - DNA, 2210 bp, Zea Mays
atttcaacgggacgacagttcgtctccgcccgcatcgattgttgtccgctgttctccttcctcctcgtcctccttcaggccagcgggcaagaagaagaagaagaaaaatcaaggcttgcggcgagaggctgtgcccggccgaccggcgagcgagcttcgtacgcgcgtcatgggtggcggcagcaacagaggcggcgccggcgccggcgaggagagcggcagcgaccacgacggtgtgctgcggaggccgctgctcaacacggggagctggtaccggatgagctcgcggcagtccagctttgccccggggacctcctccatggccgtcctgcgcgagtcccacgtctccgccttcctctgcacgctcatcgtcgcgctcggccccatccagttcggcttcaccagcggcttctcctccccgacccaggacgccatggttcgggacctcaacctctctatctccgagttctcggcgttcggatcgctgtccaacgtcggcggcatggtcggggcgatcgccagcgggcagatggccgagtacattggccgtaaagggtcgttgatgattgctgcaatcccaaatatcatcggttggcttgcgatctcctttgcaaaagtattcaacaagatgcctcatttctatatatgggacgattgcttgaagggtttggtgtcggcatcatatcctacacggtaccggtatacatagcagagatatctcctcagaacatgaggggagctcttggttctgtgaaccagttgtctgtgacctttggcatattcttggcctatttgctcggcatgtttattccttggagacttcttgctgtgattggagccttgccctgcacaatgttgattcctggactattcttcattccagaatctcccagatggctggcaaagatgaatttgacggaagattgtgagacgtccctacaagtgctgagggggtttgagactgacatcacaacagaagtgaatgatataaagagggcagtggcatcatcaagtaagaggaccacaatcagttttcaagaattaaaccaaaagaaataccgcacgccactacttctagggattggcctacttgtactgcaaaatcttagtggaatcaacggtgtactgttttatgcaagtagcatcttcaaagctgcaggtccttgctactggagttacaacatggctgttagaccgagctggacgacgcatccttctcattatttctacctctggcatgactctatgccttcttgccgtttctgttgtattttttctcaaggataacatttcacaggattctaactcatactacatcttaacaatgatctcccttgttggtattgtgtcttttgtcattaccttctcgtttggtatgggtgccattccatggctcatgatgtctgagatcctcccggttagcatcaagagccttggcggaagcatcgcaacactggccaactggctgacatccttcgccataacaatgacgacgaacttgatgctcacgtggagtgttggaggcacttttctctcgtacatggttgtgagcgccttcaccatcgtttttgttgtcctttgggtgccggagacgaaggggagaactctagaggagatacaattttcgtttcgctgagcattcagcgtcagctgcaatggttgcccgagtgtttatcttagggcctgtttcgatcccatgagctaaagcaaaaagaagctaaaatttagtcactttataaactaaagttccaatcaggaggagctaaaagtgaataaaatagcaaaagaatatcttttagtcacttttagcttctaaagaggagctagaatttagtcccttgttttagcttatactccttccatcctaaaaaaatataggtctttctaacttttcttttttctgttcatattcattcgaataatgataaatatagacatacgtataaactattcattaataaatgtatcaaataaattataggcctgtttggtttgctgtctaatttatcatattttaccacacttttgtgactaatattatggcccgtttggcacagctccagctcctgattctaagcgaggatctggaggagccgtgccaaacggatattttttaaactgattctcgtgtggagccgaaagatcgggagtcgtttttgtgaagaaaggtgggatctaaaaaaacctgctccaccctccattaaaacagc

SEQ ID NO: 60305 - DNA, 2242 bp, Zea Mays
atttcaacgggacgacagttcgtctccgcccgcatcgattgttgtccgctgttctccttcctcctcgtcctccttcaggccagcgggcaagaagaagaagaagaaaaatcaaggcttgcggcgagaggctgtgcccggccgaccggcgagcgagcttcgtacgcgcgtcatgggtggcggcagcaacagaggcggcgccggcgccggcgaggagagcggcagcgaccacgacggtgtgctgcggaggccgctgctcaacacggggagctggtaccggatgagctcgcggcagtccagctttgccccggggacctcctccatggccgtcctgcgcgagtcccacgtctccgccttcctctgcacgctcatcgtcgcgctcggccccatccagttcggcttcaccagcggcttctcctccccgacccaggacgccatggttcgggacctcaacctctctatctccgagttctcggcgttcggatcgctgtccaacgtcggcggcatggtcggggcgatcgccagcgggcagatggccgagtacattggccgtaaagggtcgttgatgattgctgcaatcccaaatatcatcggttggcttgcgatctcctttgcaaaagatgcctcatttctatatatgggacgattgcttgaagggtttggtgtcggcatcatatcctacacggtaccggtatacatagcagagatatctcctcagaacatgaggggagctcttggttctgtgaaccagttgtctgtgacctttggcatattcttggcctatttgctcggcatgtttattccttggagacttcttgctgtgattggagccttgccctgcacaatgttgattcctggactattcttcattccagaatctcccagatggctggcaaagatgaatttgacggaagattgtgagacgtccctacaagtgctgagggggtttgagactgacatcacaacagaagtgaatgatataaagagggcagtggcatcatcaagtaagaggaccacaatcagttttcaagaattaaaccaaaagaaataccgcacgccactacttggattggcctacttgtactgcaaaatcttagtggaatcaacggtgtactgttttatgcaagtagcatcttcaaagctgcaggggttacaaacagcgacttggccacctgttcacttggtgctattcaggtccttgctactggagttacaacatggctgttagaccgagctggacgacgcatccttctcattatttctacctctggcatgactctatgccttcttgccgtttctgttgtattttttctcaaggataacatttcacaggattctaactcatactacatcttaacaatgatctcccttgttggtattgtgtcttttgtcattaccttctcgtttggtatgggtgccattccatggctcatgatgtctgagatcctcccggttagcatcaagagccttggcggaagcatcgcaacactggccaactggctgacatccttcgccataacaatgacgacgaacttgatgctcacgtggagtgttggaggcacttttctctcgtacatggttgtgagcgccttcaccatcgtttttgttgtcctttgggtgccggagacgaaggggagaactctagaggagatacaattttcgtttcgctgagcattcagcgtcagctgcaatggttgcccgagtgtttatcttagggcctgtttcgatcccatgagctaaagcaaaaagaagctaaaatttagtcactttataaactaaagttccaatcaggaggagctaaaagtgaataaaatagcaaaagaatatcttttagtcacttttagcttctaaagaggagctagaatttagtcccttgttttagcttatactccttccatcctaaaaaaatataggtctttctaacttttcttttttctgttcatattcattcgaataatgataaatatagacatacgtataaactattcattaataaatgtatcaaataaattataggcctgtttggtttgctgtctaatttatcatattttaccacacttttgtgactaatattatggcccgtttggcacagctccagctcctgattctaagcgaggatctggaggagccgtgccaaacggatattttttaaactgattctcgtgtggagccgaaagatcgggagtcgtttttgtgaagaaaggtgggatctaaaaaaacctgctccaccctccattaaaacagc

SEQ ID NO: 60306 - DNA, 1734 bp, Zea Mays
tgtggattgtgtatttggtacataagttcagtctggtgatcagttcgttgatgattgctgcaatcccaaatatcatcggttggcttgcgatctcctttgcaaaagatgcctcatttctatatatgggacgattgcttgaagggtttggtgtcggcatcatatcctacacggtaccggtatacatagcagagatatctcctcagaacatgaggggagctcttggttctgtgaaccagttgtctgtgacctttggcatattcttggcctatttgctcggcatgtttattccttggagacttcttgctgtgattggagccttgccctgcacaatgttgattcctggactattcttcattccagaatctcccagatggctggcaaagatgaatttgacggaagattgtgagacgtccctacaagtgctgagggggtttgagactgacatcacaacagaagtgaatgatataaagagggcagtggcatcatcaagtaagaggaccacaatcagttttcaagaattaaaccaaaagaaataccgcacgccactacttctagggattggcctacttgtactgcaaaatcttagtggaatcaacggtgtactgttttatgcaagtagcatcttcaaagctgcaggggttacaaacagcgacttggccacctgttcacttggtgctattcaggtccttgctactggagttacaacatggctgttagaccgagctggacgacgcatccttctcattatttctacctctggcatgactctatgccttcttgccgtttctgttgtattttttctcaaggataacatttcacaggattctaactcatactacatcttaacaatgatctcccttgttggtattgtgtcttttgtcattaccttctcgtttggtatgggtgccattccatggctcatgatgtctgagatcctcccggttagcatcaagagccttggcggaagcatcgcaacactggccaactggctgacatccttcgccataacaatgacgacgaacttgatgctcacgtggagtgttggaggcacttttctctcgtacatggttgtgagcgccttcaccatcgtttttgttgtcctttgggtgccggagacgaaggggagaactctagaggagatacaattttcgtttcgctgagcattcagcgtcagctgcaatggttgcccgagtgtttatcttagggcctgtttcgatcccatgagctaaagcaaaaagaagctaaaatttagtcactttataaactaaagttccaatcaggaggagctaaaagtgaataaaatagcaaaagaatatcttttagtcacttttagcttctaaagaggagctagaatttagtcccttgttttagcttatactccttccatcctaaaaaaatataggtctttctaacttttcttttttctgttcatattcattcgaataatgataaatatagacatacgtataaactattcattaataaatgtatcaaataaattataggcctgtttggtttgctgtctaatttatcatattttaccacacttttgtgactaatattatggcccgtttggcacagctccagctcctgattctaagcgaggatctggaggagccgtgccaaacggatattttttaaactgattctcgtgtggagccgaaagatcgggagtcgtttttgtgaagaaaggtgggatctaaaaaaacctgctccaccctccattaaaacagc

SEQ ID NO: 60307 - DNA, 2272 bp, Zea Mays
cctggatagacctgcctggcacgatgactgttccggtgtttccccattcaacggactcctggtactcctccagtcctccctcccggctccctcccagtacccacggtcccaccccacccggagaaaacgaaacaaaccaaatctcgctgcgagctgggcggcgagggcgcgcggcgccatggcgaggagcaggacgtcgggcggcggcgagtacgagagcggcagcgaccacgacggcgcgctgcagaagccgctgctgcccaacagcgggagctggtaccggatggggatggggtcgcgccagtccagcctcaacgccgccggcacctcctccatggccgtcctgcgcgagtcccacgtctccgccttcctctgcacgctcatcgtcgcgctcggccccatccagttcggcttcaccggcggctactcctccccgacgcaggccagcatcatccgggacctcaacctctccatctccgagttctcggtgttcggctcgctgtccaacgtgggcgccatggtcggggcgatcgccagcggccagatggccgagtacgttggccgcaaagggtcgttgatgattgcagcaattccaaacgtcattggttggcttgcgatctcctttgcaaaagactcttcatttctgtatatgggacgcttgcttgaaggattcggtgtcggtatcatttcctatgtggtaccggtatacatagcagagatatctccacaaaacatgagaggggctcttggctctgtgaaccagttatctgtaacccttggtatcatgtttgcctatttgctcggcttgtttgttccttggaggcttcttgcagtaataggaaccttgccctgcatagtgttgatacctggccttttcttcattccggaatctccaagatggctggcaaagatgaatatgatggatgattgcgagacttctctacaagttctgagaggattcgatgctgacatcactgcagaattgaatgatataaagagagcagtaatgtcagcaaacaaaagggctacaattcgtttccaagagttgaaccaaaagaaataccgaacgcccctaattataggaattggtctacttgtgctgcaacagctaagtggaataaatggtatactattttatgcaagtagcatcttcaaagctgccgtgtattggactacaaatatcaaaacagcgaactgggataaagtggacttattgttcctaatgcattataacaggttcagaaaagctaataactgtacacccttataagtggtaacatggtttatcattctcataccttgatgaaagacggcacttcgctgtttatattatttcaaaagcatttaagcatcacgtctttgtgtttgtctacaacagtgctggtgtagttggtttagattttaatttaacaataaaaggtcttcaggtctgaaggacagtgacttggacacctttgcacttggagctattcaggttcttgccacttttgttacaaccatgttcttggacagagctgggcggcgaatcctccttattatttcttctgctgggatgactctaagtcttcttgtagttgctattgtattttacatcaaggataatatttcacatgactctgacttgtatgacatcttaagtatggtgtccttggttggtgtcgtggcttatgtcattgccttctccttcggtatgggtgccattccttggatcataatgtctgagatcctcccagttagcatcaagagtcttgcaggaagcttcgcgacccttgccaactggttgacatcctttggaataacaatgacggcaaatttgctgatcagctggagtgctggaggtacgtttacctcctacatgattgtgagtgccttcactctcgtgttcgtaatcgtttgggtgccagagacaaagggaagaaccctcgaagagatacaatggtcgttccgctgagcaccaacatcgtcaaaatgcgaaatggttcttcgagttttgtcgctttagatagtaagaatatgctcaaatcactcgacgaaggccacacattctttctgttcataaaaggtcttgtacatgagattgcatacaccgttgttataactttacccccaatagacttgtaaatgcttgtgcagtaactcttatattacttttgcttcaacattgtaagatagaagacttgccaaaataaaatctgaaccttgggtccaatattccatgtaaacacgagcatgtttcttgatcaatcaaaatctcaagcatttttgttgaagt

SEQ ID NO: 60308 - DNA, 2032 bp, Zea Mays
ctccagtcctccctcccggctccctcccagtacccacggtcccaccccacccggagaaaacgaaacaaaccaaatctcgctgcgagctgggcggcgagggcgcgcggcgccatggcgaggagcaggacgtcgggcggcggcgagtacgagagcggcagcgaccacgacggcgcgctgcagaagccgctgctgcccaacagcgggagctggtaccggatggggatggggtcgcgccagtccagcctcaacgccgccggcacctcctccatggccgtcctgcgcgagtcccacgtctccgccttcctctgcacgctcatcgtcgcgctcggccccatccagttcggcttcaccggcggctactcctccccgacgcaggccagcatcatccgggacctcaacctctccatctccgagttctcggtgttcggctcgctgtccaacgtgggcgccatggtcggggcgatcgccagcggccagatggccgagtacgttggccgcaaagggtcgttgatgattgcagcaattccaaacgtcattggttggcttgcgatctcctttgcaaaagactcttcatttctgtatatgggacgcttgcttgaaggattcggtgtcggtatcatttcctatgtggtaccggtatacatagcagagatatctccacaaaacatgagaggggctcttggctctgtgaaccaggtttgcctatacttgcaagcatctcatctatttgtgaggttgaggtaaacacttggcttgtttatgcggatctcattgtacatttgaaaatttgttaattctgcagttatctgtaacccttggtatcatgtttgcctatttgctcggcttgtttgttccttggaggcttcttgcagtaataggaaccttgccctgcatagtgttgatacctggccttttcttcattccggaatctccaagatggctggcaaagatgaatatgatggatgattgcgagacttctctacaagttctgagaggattcgatgctgacatcactgcagaattgaatgatataaagagagcagtaatgtcagcaaacaaaagggctacaattcgtttccaagagttgaaccaaaagaaataccgaacgcccctaattgaattggtctacttgtgctgcaacagctaagtggaataaatggtatactattttatgcaagtagcatcttcaaagctgccggtctgaaggacagtgacttggacacctttgcacttggagctattcaggttcttgccacttttgttacaaccatgttcttggacagagctgggcggcgaatcctccttattatttcttctgctgggatgactctaagtcttcttgtagttgctattgtattttacatcaaggataatatttcacatgactctgacttgtatgacatcttaagtatggtgtccttggttggtgtcgtggcttatgtcattgccttctccttcggtatgggtgccattccttggatcataatgtctgagatcctcccagttagcatcaagagtcttgcaggaagcttcgcgacccttgccaactggttgacatcctttggaataacaatgacggcaaatttgctgatcagctggagtgctggaggtacgtttacctcctacatgattgtgagtgccttcactctcgtgttcgtaatcgtttgggtgccagagacaaagggaagaaccctcgaagagatacaatggtcgttccgctgagcaccaacatcgtcaaaatgcgaaatggttcttcgagttttgtcgctttagatactcaaatcactcgacgaaggccacacattctttctgttcataaaaggtcttgtacatgagattgcatacaccgttgttataactttacccccaatagacttgtaaatgcttgtgcagtaactcttatattacttttgcttcaacattgtaagatagaagacttgccaaaataaaatctgaaccttgggtccaatattccatgtaaacacgagcatgtttcttgatcaatcaaaatctcaagcatttttgttgaagt

SEQ ID NO: 60309 - DNA, 2273 bp, Zea Mays
ctccagtcctccctcccggctccctcccagtacccacggtcccaccccacccggagaaaacgaaacaaaccaaatctcgctgcgagctgggcggcgagggcgcgcggcgccatggcgaggagcaggacgtcgggcggcggcgagtacgagagcggcagcgaccacgacggcgcgctgcagaagccgctgctgcccaacagcgggagctggtaccggatggggatggggtcgcgccagtccagcctcaacgccgccggcacctcctccatggccgtcctgcgcgagtcccacgtctccgccttcctctgcacgctcatcgtcgcgctcggccccatccagttcggcttcaccggcggctactcctccccgacgcaggccagcatcatccgggacctcaacctctccatctccgagttctcggtgttcggctcgctgtccaacgtgggcgccatggtcggggcgatcgccagcggccagatggccgagtacgttggccgcaaagggtcgttgatgattgcagcaattccaaacgtcattggttggcttgcgatctcctttgcaaaagactcttcatttctgtatatgggacgcttgcttgaaggattcggtgtcggtatcatttcctatgtggtaccggtatacatagcagagatatctccacaaaacatgagaggggctcttggctctgtgaaccagttatctgtaacccttggtatcatgtttgcctatttgctcggcttgtttgttccttggaggcttcttgcagtaataggaaccttgccctgcatagtgttgatacctggccttttcttcattccggaatctccaagatggctggcaaagatgaatatgatggatgattgcgagacttctctacaagttctgagaggattcgatgctgacatcactgcagaattgaatgatataaagagagcagtaatgtcagcaaacaaaagggctacaattcgtttccaagagttgaaccaaaagaaataccgaacgcccctaattataggaattggtctacttgtgctgcaacagctaagtggaataaatggtatactattttatgcaagtagcatcttcaaagctgccggtaagctgtgcacttgttcactggcttgtgattttcattactagttggacatcatatttttaggtgaggaagcactgtatctagaaaagccaaaacgtcttatagttcagaatcgagggaatatctaattgataattcggaacagtgtattggactacaaatatcaaaacagcgaactgggataaagtggacttattgttcctaatgcattataacaggttcagaaaagctaataactgtacacccttataagtggtaacatggtttatcattctcataccttgatgaaagacggcacttcgctgtttatattatttcaaaagcatttaagcatcacgtctttgtgtttgtctacaacagtgctggtgtagttggtttagattttaatttaacaataaaaggtcttcaggtctgaaggacagtgacttggacacctttgcacttggagctattcaggttcttgccacttttgttacaaccatgttcttggacagagctgggcggcgaatcctccttattatttcttctgctgggatgactctaagtcttcttgtagttgctattgtattttacatcaaggataatatttcacatgactctgacttgtatgacatcttaagtatggtgtccttggttggtgtcgtggcttatgtcattgccttctccttcggtatgggtgccattccttggatcataatgtctgagatcctcccagttagcatcaagagtcttgcaggaagcttcgcgacccttgccaactggttgacatcctttggaataacaatgacggcaaatttgctgatcagctggagtgctggagagacaaagggaagaaccctcgaagagatacaatggtcgttccgctgagcaccaacatcgtcaaaatgcgaaatggttcttcgagttttgtcgctttagatactcaaatcactcgacgaaggccacacattctttctgttcataaaaggtcttgtacatgagattgcatacaccgttgttataactttacccccaatagacttgtaaatgcttgtgcagtaactcttatattacttttgcttcaacattgtaagatagaagacttgccaaaataaaatctgaaccttgggtccaatattccatgtaaacacgagcatgtttcttgatcaatcaaaatctcaagcatttttgttgaagt

SEQ ID NO: 60310 - DNA, 2550 bp, Zea Mays
ctccagtcctccctcccggctccctcccagtacccacggtcccaccccacccggagaaaacgaaacaaaccaaatctcgctgcgagctgggcggcgagggcgcgcggcgccatggcgaggagcaggacgtcgggcggcggcgagtacgagagcggcagcgaccacgacggcgcgctgcagaagccgctgctgcccaacagcgggagctggtaccggatggggatggggtcgcgccagtccagcctcaacgccgccggcacctcctccatggccgtcctgcgcgagtcccacgtctccgccttcctctgcacgctcatcgtcgcgctcggccccatccagttcggcttcaccggcggctactcctccccgacgcaggccagcatcatccgggacctcaacctctccatctccgagttctcggtgttcggctcgctgtccaacgtgggcgccatggtcggggcgatcgccagcggccagatggccgagtacgttggccgcaaagggtcgttgatgattgcagcaattccaaacgtcattggttggcttgcgatctcctttgcaaaagactcttcatttctgtatatgggacgcttgcttgaaggattcggtgtcggtatcatttcctatgtggtaccggtatacatagcagagatatctccacaaaacatgagaggggctcttggctctgtgaaccagttatctgtaacccttggtatcatgtttgcctatttgctcggcttgtttgttccttggaggcttcttgcagtaataggtaaagtggctataccctgatacactaatgggactgctgttgttattactgttagtttgcacttcaattctgatatttcaggtcgcatgatcagaaacagaaaatgctttgagcaatatattgaataattgaaataatgcagataaatatttttgttctgaccctatttgaaataagttctatcctaaagcgtgtgatgccatacttgtaggaaccttgccctgcatagtgttgatacctggccttttcttcattccggaatctccaagatggctggcaaagatgaatatgatggatgattgcgagacttctctacaagttctgagaggattcgatgctgacatcactgcagaattgaatgatataaagagagcagtaatgtcagcaaacaaaagggctacaattcgtttccaagagttgaaccaaaagaaataccgaacgcccctaattataggaattggtctacttgtgctgcaacagctaagtggaataaatggtatactattttatgcaagtagcatcttcaaagctgccggtaagctgtgcacttgttcactggcttgtgattttcattactagttggacatcatatttttaggtgaggaagcactgtatctagaaaagccaaaacgtcttatagttcagaatcgagggaatatctaattgataattcggaacagtgtattggactacaaatatcaaaacagcgaactgggataaagtggacttattgttcctaatgcattataacaggttcagaaaagctaataactgtacacccttataagtggtaacatggtttatcattctcataccttgatgaaagacggcacttcgctgtttatattatttcaaaagcatttaagcatcacgtctttgtgtttgtctacaacagtgctggtgtagttggtttagattttaatttaacaataaaaggtcttcaggtctgaaggacagtgacttggacacctttgcacttggagctattcaggttcttgccacttttgttacaaccatgttcttggacagagctgggcggcgaatcctccttattatttcttctgctgggatgactctaagtcttcttgtagttgctattgtattttacatcaaggataatatttcacatgactctgacttgtatgacatcttaagtatggtgtccttggttggtgtcgtggcttatgtcattgccttctccttcggtatgggtgccattccttggatcataatgtctgagatcctcccagttagcatcaagagtcttgcaggaagcttcgcgacccttgccaactggttgacatcctttggaataacaatgacggcaaatttgctgatcagctggagtgctggaggtacgtttacctcctacatgattgtgagtgccttcactctcgtgttcgtaatcgtttgggtgccagagacaaagggaagaaccctcgaagagatacaatggtcgttccgctgagcaccaacatcgtcaaaatgcgaaatggttcttcgagttttgtcgctttagatactcaaatcactcgacgaaggccacacattctttctgttcataaaaggtcttgtacatgagattgcatacaccgttgttataactttacccccaatagacttgtaaatgcttgtgcagtaactcttatattacttttgcttcaacattgtaagatagaagacttgccaaaataaaatctgaaccttgggtccaatattccatgtaaacacgagcatgtttcttgatcaatcaaaatctcaagcatttttgttgaagt

SEQ ID NO: 60311 - DNA, 2339 bp, Zea Mays
ctccagtcctccctcccggctccctcccagtacccacggtcccaccccacccggagaaaacgaaacaaaccaaatctcgctgcgagctgggcggcgagggcgcgcggcgccatggcgaggagcaggacgtcgggcggcggcgagtacgagagcggcagcgaccacgacggcgcgctgcagaagccgctgctgcccaacagcgggagctggtaccggatggggatggggtcgcgccagtccagcctcaacgccgccggcacctcctccatggccgtcctgcgcgagtcccacgtctccgccttcctctgcacgctcatcgtcgcgctcggccccatccagttcggcttcaccggcggctactcctccccgacgcaggccagcatcatccgggacctcaacctctccatctccgagttctcggtgttcggctcgctgtccaacgtgggcgccatggtcggggcgatcgccagcggccagatggccgagtacgttggccgcaaagggtcgttgatgattgcagcaattccaaacgtcattggttggcttgcgatctcctttgcaaaagactcttcatttctgtatatgggacgcttgcttgaaggattcggtgtcggtatcatttcctatgtggtaccggtatacatagcagagatatctccacaaaacatgagaggggctcttggctctgtgaaccagttatctgtaacccttggtatcatgtttgcctatttgctcggcttgtttgttccttggaggcttcttgcagtaataggaaccttgccctgcatagtgttgatacctggccttttcttcattccggaatctccaagatggctggcaaagatgaatatgatggatgattgcgagacttctctacaagttctgagaggattcgatgctgacatcactgcagaattgaatgatataaagagagcagtaatgtcagcaaacaaaagggctacaattcgtttccaagagttgaaccaaaagaaataccgaacgcccctaattataggaattggtctacttgtgctgcaacagctaagtggaataaatggtatactattttatgcaagtagcatcttcaaagctgccggtaagctgtgcacttgttcactggcttgtgattttcattactagttggacatcatatttttaggtgaggaagcactgtatctagaaaagccaaaacgtcttatagttcagaatcgagggaatatctaattgataattcggaacagtgtattggactacaaatatcaaaacagcgaactgggataaagtggacttattgttcctaatgcattataacaggttcagaaaagctaataactgtacacccttataagtggtaacatggtttatcattctcataccttgatgaaagacggcacttcgctgtttatattatttcaaaagcatttaagcatcacgtctttgtgtttgtctacaacagtgctggtgtagttggtttagattttaatttaacaataaaaggtcttcaggtctgaaggacagtgacttggacacctttgcacttggagctattcaggttcttgccacttttgttacaaccatgttcttggacagagctgggcggcgaatcctccttattatttcttctgctgggatgactctaagtcttcttgtagttgctattgtattttacatcaaggataatatttcacatgactctgacttgtatgacatcttaagtatggtgtccttggttggtgtcgtggcttatgtcattgccttctccttcggtatgggtgccattccttggatcataatgtctgagatcctcccagttagcatcaagagtcttgcaggaagcttcgcgacccttgccaactggttgacatcctttggaataacaatgacggcaaatttgctgatcagctggagtgctggaggtacgtttacctcctacatgattgtgagtgccttcactctcgtgttcgtaatcgtttgggtgccagagacaaagggaagaaccctcgaagagatacaatggtcgttccgctgagcaccaacatcgtcaaaatgcgaaatggttcttcgagttttgtcgctttagatactcaaatcactcgacgaaggccacacattctttctgttcataaaaggtcttgtacatgagattgcatacaccgttgttataactttacccccaatagacttgtaaatgcttgtgcagtaactcttatattacttttgcttcaacattgtaagatagaagacttgccaaaataaaatctgaaccttgggtccaatattccatgtaaacacgagcatgtttcttgatcaatcaaaatctcaagcatttttgttgaagt

SEQ ID NO: 60312 - DNA, 3288 bp, Zea Mays
attcgcctcgtgctctcggccttttggattcgggattcctcctcctccttctcctcctgatcacctcccactcccactcggccagccccacccaccgccggccccccacgcaacggggagcacaggagcagatcgatccagcctcgcggccgcgccacgcgaccgaccgagctgcttgcctgcctgcgtgcctgcgtggtgatcacgtcgcgcctggcggtggtgtgggtccggcgggcaacaaaggcgccagcatggcgagcaacaacggcggcgcgatgcaggagccgctgctgccgaaggcgcccaagagcggggggtggctctggaaggggacgcgcccgtccgcgtccggcgacctcccgtcgtccaaggccgtgctgcggccgccccgccacgtgcccgcgctgctctgcacgctcatcgtcgcgctcggccccgtccagttcggcttcaccagcgggtactcgtccccgacgcaggacgccgtcatccgggacctcaacctctccatctcagagttctcggcgttcggctcgctgtccaacgtgggcgctatggtcggggcgatcgccagcgggcagatggccaagtacgttgggcgcagagggtcgctgatgattgccgcggtcccgaacatcatgggctggcttgcaatctctttcgcaaaggacactacgtttctgtacgtggggagattactggaaggatttggtgttggcgtcatttcctatgtggtgccagtatacattgcagagatatctcctcataacatgagaggagcccttggcgctgtgaacccgttgtctgcaacctttggtgtcctgctttcctatgtgcttggcttgtttttcccttggaggcttcttgcattaataggaaccctgccctgcttactgttggtggctggtctattcttcattccggaatctccaagatggctggcgaggatgaatatgatggatgattgcgagacttctctacaagttctgaggggatttgatgctgacatcactgaagaagtgaatgatataaagatagctgtagcatcagcaaacaaaagtggtacaataagctttcgagagttgaaccaaaagaaataccgcacgcctctaattctaggaattggcctacttgtgttgcaacagctaagtggaataaattgtataatcttttattcaggtagcatcttcaaagctgcagggctcaacaacagtaacctggacacgtgtctcattggagctatctcggttcttgccactggtgtcacaaccacgatcttggacagagctggccggagaatcctcctcattatttcttcttctgggatgaccctaagccttctggcagttgctgttgtattttgcatcaaggataacattgcacaagactctgacttgtacaacatcttaagaatagtgtccttggttggtgtcgtggtaagtctgtcgttcgcattttgtcaggggccggtagtcagcgccccggctttagtaccacatcggctagccaagggggccgtgggcagcttataagggagagtccccctcctcccatcagcctggcttttgggatgtgagtggtgggctctcctggctgggccggcccacgagcgcatgaacgtccgaagctgtcgagtgtaggctgggccgggggttggacgctgacatctggtatcggagcccggtttggcccatgcctgccttggggggcttaccaaggggggtgggatgtcaggggccggtagtcagcgccccggctttagtaccacatcggctagccaagggggccgtgagcagcttataagggagagtccccctcctcccatcagcctggcttttgggatgtgagtggtgggctctcctggctgggccggcccacgagcgcatgaacgtccgaagctgtcgagtgtaggctgggccgggggttggacgctgacatctggtatcggagcccggtttggcccatgcctgccttggggggcttcccaaggggggtgggatgtcaggggccggtagtcagcgccccggctttagtaccacatcggctagccaagggggccgtgggcagcttataagggagagtccccctcctcccatcagcctggcttttgggatgtgagtggtgggctctcctggctgggccggcccacgagcgcatgaacgtccgaagctgtcgagtgtgggctgggccgggggttggacgctaacatctggtatcggagcccggtttggcccatgcctgccttggggggcttcccaaggggggtgggatgtcaggggccggtagtcagcgccccggctttagtaccacatcggctagccaagggggccgtgggcagcttataagggagagtccccctcctcccatcagcctggcttttgggatgtgagtggtgggctctcttggctgggccggcccacgagcgcatgaacgcccgaagctgtcgagtgtgggctaggccgggggttggacgctgacacatttcgtccgaacactggattttagatgtggaatctgtaagttttttgcccaactactttgttcaggcttatgtcactgccttctccttcggtatgggttccattccatggatcataatgtctgagatccttccggttagcatcaagtgtgtggcaggaagcttcgcgacccttgccaactggttgacgtcctttggaataacaatgacagcaaatttgcttctgaactggagcgctgcaggtacatttgcctcctacatgatggtgagtgctttcactctcgtcttcgtcatcctttgggtaccagagacgaagggaagaacccttgaagagatacagtggtccttccagtgagctccggcattcatatgtacatgcaaatagcgtggcaaatcctccaggatcccaataaaagatatagtgaaatatagcagaagctatttcatttagcattttttatagtttaaatggaatttcgctgccgattctgcatgagaacatgtaaataaggagatttcacgaacatgaacactcaaatacatgtacaggcctgtaaaagaagatgtctctagatccattactttaatattcgtggaatcatagccagaagtataagctagtgaggggaattgtagatcaacgggaagatggtgatattctgatacaatgatttttatgctgagttttggtggtttgtcaaccactttattctcgttgaggcaagcaggacagtgaagttagaaatcctttaagtccctcttgaatttaagtaaactccggccctcaaaagtaaaaaaaaattaaa

SEQ ID NO: 60313 - DNA, 2231 bp, Zea Mays
ctcgtgctctcggccttttggattcgggattcctcctcctccttctcctcctgatcacctcccactcccactcggccagccccacccaccgccggccccccacgcaacggggagcacaggagcagatcgatccagcctcgcggccgcgccacgcgaccgaccgagctgcttgcctgcctgcgtgcctgcgtggtgatcacgtcgcgcctggcggtggtgtgggtccggcgggcaacaaaggcgccagcatggcgagcaacaacggcggcgcgatgcaggagccgctgctgccgaaggcgcccaagagcggggggtggctctggaaggggacgcgcccgtccgcgtccggcgacctcccgtcgtccaaggccgtgctgcggccgccccgccacgtgcccgcgctgctctgcacgctcatcgtcgcgctcggccccgtccagttcggcttcaccagcgggtactcgtccccgacgcaggacgccgtcatccgggacctcaacctctccatctcagagttctcggcgttcggctcgctgtccaacgtgggcgctatggtcggggcgatcgccagcgggcagatggccaagtacgttgggcgcagagggtcgctgatgattgccgcggtcccgaacatcatgggctggcttgcaatctctttcgcaaaggacactacgtttctgtacgtggggagattactggaaggatttggtgttggcgtcatttcctatgtggtgccagtatacattgcagagatatctcctcataacatgagaggagcccttggcgctgtgaacccgttgtctgcaacctttggtgtcctgctttcctatgtgcttggcttgtttttcccttggaggcttcttgcattaataggaaccctgccctgcttactgttggtggctggtctattcttcattccggaatctccaagatggctggcgaggatgaatatgatggatgattgcgagacttctctacaagttctgaggggatttgatgctgacatcactgaagaagtgaatgatataaagatagctgtagcatcagcaaacaaaagtggtacaataagctttcgagagttgaaccaaaagaaataccgcacgcctctaattctaggaattggcctacttgtgttgcaacagctaagtggaataaattgtataatcttttattcaggtagcatcttcaaagctgcagggctcaacaacagtaacctggacacgtgtctcattggagctatctcggttcttgccactggtgtcacaaccacgatcttggacagagctggccggagaatcctcctcattatttcttcttctgggatgaccctaagccttctggcagttgctgttgtattttgcatcaagggtctgtcatcccaatccactgaatattctactctcttgtcatcggctattcgtttcaggataacattgcacaagactctgacttgtacaacatcttaagaatagtgtccttggttggtgtcgtggcttatgtcactgccttctccttcggtatgggttccattccatggatcataatgtctgagatccttccggttagcatcaagtgtgtggcaggaagcttcgcgacccttgccaactggttgacgtcctttggaataacaatgacagcaaatttgcttctgaactggagcgctgcaggtacatttgcctcctacatgatggtgagtgctttcactctcgtcttcgtcatcctttgggtaccagagacgaagggaagaacccttgaagagatacagtggtccttccagtgagctccggcattcatatgtacatgcaaatagcgtggcaaatcctccaggatcccaataaaagatatagtgaaatatagcagaagctatttcatttagcattttttatagtttaaatggaatttcgctgccgattctgcatgagaacatgtaaataaggagatttcacgaacatgaacactcaaatacatgtacaggcctgtaaaagaagatgtctctagatccattactttaatattcgtggaatcatagccagaagtataagctagtgaggggaattgtagatcaacgggaagatggtgatattctgatacaatgatttttatgctgagttttggtggtttgtcaaccactttattctcgttgaggcaagcaggacagtgaagttagaaatcctttaagtccctcttgaatttaagtaaactccggccctcaaaagtaaaaaaaaattaaa

SEQ ID NO: 60314 - DNA, 2044 bp, Zea Mays
cgtgctctcggccttttggattcgggattcctcctcctccttctcctcctgatcacctcccactcccactcggccagccccacccaccgccggccccccacgcaacggggagcacaggagcagatcgatccagcctcgcggccgcgccacgcgaccgaccgagctgcttgcctgcctgcgtgcctgcgtggtgatcacgtcgcgcctggcggtggtgtgggtccggcgggcaacaaaggcgccagcatggcgagcaacaacggcggcgcgatgcaggagccgctgctgccgaaggcgcccaagagcggggggtggctctggaaggggacgcgcccgtccgcgtccggcgacctcccgtcgtccaaggccgtgctgcggccgccccgccacgtgcccgcgctgctctgcacgctcatcgtcgcgctcggccccgtccagttcggcttcaccagcgggtactcgtccccgacgcaggacgccgtcatccgggacctcaacctctccatctcagagttctcggcgttcggctcgctgtccaacgtgggcgctatggtcggggcgatcgccagcgggcagatggccaagtacgttgggcgcagagggtcgctgatgattgccgcggtcccgaacatcatgggctggcttgcaatctctttcgcaaaggacactacgtttctgtacgtggggagattactggaaggatttggtgttggcgtcatttcctatgtggtgccagtatacattgcagagatatctcctcataacatgagaggagcccttggcgctgtgaacccgttgtctgcaacctttggtgtcctgctttcctatgtgcttggcttgtttttcccttggaggcttcttgcattaataggaaccctgccctgcttactgttggtggctggtctattcttcattccggaatctccaagatggctggcgaggatgaatatgatggatgattgcgagacttctctacaagttctgaggggatttgatgctgacatcactgaagaagtgaatgatataaagatagctgtagcatcagcaaacaaaagtggtacaataagctttcgagagttgaaccaaaagaaataccgcacgcctctaattctaggaattggcctacttgtgttgcaacagctaagtggaataaattgtataatcttttattcaggtagcatcttcaaagctgcagggctcaacaacagtaacctggacacgtgtctcattggagctatctcggttcttgccactggtgtcacaaccacgatcttggacagagctggccggagaatcctcctcattatttcttcttctgggatgaccctaagccttctggcagttgctgttgtattttgcatcaagatccttccggttagcatcaagtgtgtggcaggaagcttcgcgacccttgccaactggttgacgtcctttggaataacaatgacagcaaatttgcttctgaactggagcgctgcaggtacatttgcctcctacatgatggtgagtgctttcactctcgtcttcgtcatcctttgggtaccagagacgaagggaagaacccttgaagagatacagtggtccttccagtgagctccggcattcatatgtacatgcaaatagcgtggcaaatcctccaggatcccaataaaagatatagtgaaatatagcagaagctatttcatttagcattttttatagtttaaatggaatttcgctgccgattctgcatgagaacatgtaaataaggagatttcacgaacatgaacactcaaatacatgtacaggcctgtaaaagaagatgtctctagatccattactttaatattcgtggaatcatagccagaagtataagctagtgaggggaattgtagatcaacgggaagatggtgatattctgatacaatgatttttatgctgagttttggtggtttgtcaaccactttattctcgttgaggcaagcaggacagtgaagttagaaatcctttaagtccctcttgaatttaagtaaactccggccctcaaaagtaaaaaaaaattaaa

SEQ ID NO: 60315 - DNA, 2043 bp, Zea Mays
gtgctctcggccttttggattcgggattcctcctcctccttctcctcctgatcacctcccactcccactcggccagccccacccaccgccggccccccacgcaacggggagcacaggagcagatcgatccagcctcgcggccgcgccacgcgaccgaccgagctgcttgcctgcctgcgtgcctgcgtggtgatcacgtcgcgcctggcggtggtgtgggtccggcgggcaacaaaggcgccagcatggcgagcaacaacggcggcgcgatgcaggagccgctgctgccgaaggcgcccaagagcggggggtggctctggaaggggacgcgcccgtccgcgtccggcgacctcccgtcgtccaaggccgtgctgcggccgccccgccacgtgcccgcgctgctctgcacgctcatcgtcgcgctcggccccgtccagttcggcttcaccagcgggtactcgtccccgacgcaggacgccgtcatccgggacctcaacctctccatctcagagttctcggcgttcggctcgctgtccaacgtgggcgctatggtcggggcgatcgccagcgggcagatggccaagtacgttgggcgcagaggggtgccagtatacattgcagagatatctcctcataacatgagaggagcccttggcgctgtgaacccgttgtctgcaacctttggtgtcctgctttcctatgtgcttggcttgtttttcccttggaggcttcttgcattaataggaaccctgccctgcttactgttggtggctggtctattcttcattccggaatctccaagatggctggcgaggatgaatatgatggatgattgcgagacttctctacaagttctgaggggatttgatgctgacatcactgaagaagtgaatgatataaagatagctgtagcatcagcaaacaaaagtggtacaataagctttcgagagttgaaccaaaagaaataccgcacgcctctaattctaggaattggcctacttgtgttgcaacagctaagtggaataaattgtataatcttttattcaggtagcatcttcaaagctgcagggctcaacaacagtaacctggacacgtgtctcattggagctatctcggttcttgccactggtgtcacaaccacgatcttggacagagctggccggagaatcctcctcattatttcttcttctgggatgaccctaagccttctggcagttgctgttgtattttgcatcaaggataacattgcacaagactctgacttgtacaacatcttaagaatagtgtccttggttggtgtcgtggcttatgtcactgccttctccttcggtatgggttccattccatggatcataatgtctgagatccttccggttagcatcaagtgtgtggcaggaagcttcgcgacccttgccaactggttgacgtcctttggaataacaatgacagcaaatttgcttctgaactggagcgctgcaggtacatttgcctcctacatgatggtgagtgctttcactctcgtcttcgtcatcctttgggtaccagagacgaagggaagaacccttgaagagatacagtggtccttccagtgagctccggcattcatatgtacatgcaaatagcgtggcaaatcctccaggatcccaataaaagatatagtgaaatatagcagaagctatttcatttagcattttttatagtttaaatggaatttcgctgccgattctgcatgagaacatgtaaataaggagatttcacgaacatgaacactcaaatacatgtacaggcctgtaaaagaagatgtctctagatccattactttaatattcgtggaatcatagccagaagtataagctagtgaggggaattgtagatcaacgggaagatggtgatattctgatacaatgatttttatgctgagttttggtggtttgtcaaccactttattctcgttgaggcaagcaggacagtgaagttagaaatcctttaagtccctcttgaatttaagtaaactccggccctcaaaagtaaaaaaaaattaaa

SEQ ID NO: 60316 - DNA, 2095 bp, Zea Mays
ggccttttggattcgggattcctcctcctccttctcctcctgatcacctcccactcccactcggccagccccacccaccgccggccccccacgcaacggggagcacaggagcagatcgatccagcctcgcggccgcgccacgcgaccgaccgagctgcttgcctgcctgcgtgcctgcgtggtgatcacgtcgcgcctggcggtggtgtgggtccggcgggcaacaaaggcgccagcatggcgagcaacaacggcggcgcgatgcaggagccgctgctgccgaaggcgcccaagagcggggggtggctctggaaggggacgcgcccgtccgcgtccggcgacctcccgtcgtccaaggccgtgctgcggccgccccgccacgtgcccgcgctgctctgcacgctcatcgtcgcgctcggccccgtccagttcggcttcaccagcgggtactcgtccccgacgcaggacgccgtcatccgggacctcaacctctccatctcagagttctcggcgttcggctcgctgtccaacgtgggcgctatggtcggggcgatcgccagcgggcagatggccaagtacgttgggcgcagagggtcgctgatgattgccgcggtcccgaacatcatgggctggcttgcaatctctttcgcaaaggacactacgtttctgtacgtggggagattactggaaggatttggtgttggcgtcatttcctatgtggtgccagtatacattgcagagatatctcctcataacatgagaggagcccttggcgctgtgaacccgttgtctgcaacctttggtgtcctgctttcctatgtgcttggcttgtttttcccttggaggcttcttgcattaataggaaccctgccctgcttactgttggtggctggtctattcttcattccggaatctccaagatggctggcgaggatgaatatgatggatgattgcgagacttctctacaagttctgaggggatttgatgctgacatcactgaagaagtgaatgatataaagatagctgtagcatcagcaaacaaaagtggtacaataagctttcgagagttgaaccaaaagaaataccgcacgcctctaattctaggaattggcctacttgtgttgcaacagctaagtggaataaattgtataatcttttattcaggtagcatcttcaaagctgcagggctcaacaacagtaacctggacacgtgtctcattggagctatctcggttcttgccactggtgtcacaaccacgatcttggacagagctggccggagaatcctcctcattatttcttcttctgggatgaccctaagccttctggcagttgctgttgtattttgcatcaaggcttatgtcactgccttctccttcggtatgggttccattccatggatcataatgtctgagatccttccggttagcatcaagtgtgtggcaggaagcttcgcgacccttgccaactggttgacgtcctttggaataacaatgacagcaaatttgcttctgaactggagcgctgcaggtacatttgcctcctacatgatggtgagtgctttcactctcgtcttcgtcatcctttgggtaccagagacgaagggaagaacccttgaagagatacagtggtccttccagtgagctccggcattcatatgtacatgcaaatagcgtggcaaatcctccaggatcccaataaaagatatagtgaaatatagcagaagctatttcatttagcattttttatagtttaaatggaatttcgctgccgattctgcatgagaacatgtaaataaggagatttcacgaacatgaacactcaaatacatgtacaggcctgtaaaagaagatgtctctagatccattactttaatattcgtggaatcatagccagaagtataagctagtgaggggaattgtagatcaacgggaagatggtgatattctgatacaatgatttttatgctgagttttggtggtttgtcaaccactttattctcgttgaggcaagcaggacagtgaagttagaaatcctttaagtccctcttgaatttaagtaaactccggccctcaaaagtaaaaaaaaattaaa

SEQ ID NO: 60317 - DNA, 2095 bp, Zea Mays
ctcccactcccactcggccagccccacccaccgccggccccccacgcaacggggagcacaggagcagatcgatccagcctcgcggccgcgccacgcgaccgaccgagctgcttgcctgcctgcgtgcctgcgtggtgatcacgtcgcgcctggcggtggtgtgggtccggcgggcaacaaaggcgccagcatggcgagcaacaacggcggcgcgatgcaggagccgctgctgccgaaggcgcccaagagcggggggtggctctggaaggggacgcgcccgtccgcgtccggcgacctcccgtcgtccaaggccgtgctgcggccgccccgccacgtgcccgcgctgctctgcacgctcatcgtcgcgctcggccccgtccagttcggcttcaccagcgggtactcgtccccgacgcaggacgccgtcatccgggacctcaacctctccatctcagagttctcggcgttcggctcgctgtccaacgtgggcgctatggtcggggcgatcgccagcgggcagatggccaatcgctgatgattgccgcggtcccgaacatcatgggctggcttgcaatctctttcgcaaaggacactacgtttctgtacgtggggagattactggaaggatttggtgttggcgtcatttcctatgtggtgccagtatacattgcagagatatctcctcataacatgagaggagcccttggcgctgtgaacccgttgtctgcaacctttggtgtcctgctttcctatgtgcttggcttgtttttcccttggaggcttcttgcattaataggaaccctgccctgcttactgttggtggctggtctattcttcattccggaatctccaagatggctggcgaggatgaatatgatggatgattgcgagacttctctacaagttctgaggggatttgatgctgacatcactgaagaagtgaatgatataaagatagctgtagcatcagcaaacaaaagtggtacaataagctttcgagagttgaaccaaaagaaataccgcacgcctctaattctaggaattggcctacttgtgttgcaacagctaagtggaataaattgtataatcttttattcaggtagcatcttcaaagctgcagggctcaacaacagtaacctggacacgtgtctcattggagctatctcggttcttgccactggtgtcacaaccacgatcttggacagagctggccggagaatcctcctcattatttcttcttctgggatgaccctaagccttctggcagttgctgttgtattttgcatcaaggataacattgcacaagactctgacttgtacaacatcttaagaatagtgtccttggttggtgtcgtggcttatgtcactgccttctccttcggtatgggttccattccatggatcataatgtctgagatccttccggttagcatcaagtgtgtggcaggaagcttcgcgacccttgccaactggttgacgtcctttggaataacaatgacagcaaatttgcttctgaactggagcgctgcaggtacatttgcctcctacatgatggtgagtgctttcactctcgtcttcgtcatcctttgggtaccagagacgaagggaagaacccttgaagagatacagtggtccttccagtgagctccggcattcatatgtacatgcaaatagcgtggcaaatcctccaggatcccaataaaagatatagtgaaatatagcagaagctatttcatttagcattttttatagtttaaatggaatttcgctgccgattctgcatgagaacatgtaaataaggagatttcacgaacatgaacactcaaatacatgtacaggcctgtaaaagaagatgtctctagatccattactttaatattcgtggaatcatagccagaagtataagctagtgaggggaattgtagatcaacgggaagatggtgatattctgatacaatgatttttatgctgagttttggtggtttgtcaaccactttattctcgttgaggcaagcaggacagtgaagttagaaatcctttaagtccctcttgaatttaagtaaactccggccctcaaaagtaaaaaaaaattaaa

SEQ ID NO: 60318 - DNA, 1026 bp, Zea Mays
ccgcctgctcctcccgcggcggcggggtggaggtgccggtcctgcgcggcggcggcgatcgcggactgcgtcgcgctggggtgctgcccgtgcgcggtcgtcgcgctgctggccctggcgctcgtcagggcgccgctcgcagtgggccgccggctccggatgcggaggcggtccgcgctgcgcaggaagcgggtgcgcgacgtcgcggccaaggttgcgccgagggccgcgcccggcgcgggcagcgggacgacgccgctggacccggcggccgccgccacgccggtgcggcagcagcagcagcagacacagacgcaggccgaggtggaggagctggcgtggctggacgagatgtaccgggtcggccactggggcttcggccgcgtctccttctcggggtctgcggggaaaaccccgtgaccggccggcgaagggggcgtgacaagctgaggtagccgctacccgccagccgcacgagtggcgcgcgtgtccgtgccgccggcggtcgcggttgtgcggatcaggcgcacgtcctcgtccgacacgccgaacgtgcggcgctactgcatgattgattggcgcgccggccccggccgacgggacgcgaggcgacccgacgcgacgtggctggctggctggctggctggttttgatggtctcgtcgtcatctctgtaggggtagatcgctcgtgccgggaacttgtcgggtgcacggcacgtttggcgcctagctagtttgggcccgggcctcctggtgttagcagctggtggcgcgggcctctcttctcggcctgtctctgtgtgtgagtagaagactagtcctatgcatctacagtgggcttccaggtgccgtctgtatggtgttttttttgttttgcaaaatactccctcgcgaactacattcaaggaagagaggtcaaaccaaagtactcatatttttgcaaaatatgagaccgctagtacattagggaatcataaaaataagatgaaactaatcgcaggcgggggtttttttttgtacaaaag

SEQ ID NO: 60319 - DNA, 1294 bp, Zea Mays
cgctgcggctgctcccggtcgtcgtacgtggccccggaacacccacctacaaaacgcccgccgcgtcgtgtcgccaccaccatttcgccccaggcgcagccgcgcgcaggcaggagtttcggttcaattcccgagccgagccgagctcaccctgcgtgcgatgggccgcagggggagtggtggggaagaccatcggccgcagcaggagcaggaggagcagcgcgcggcggtgccgaggcgcggccgctggttggacgaggagcggccgcacccgcaccagcccgcggcggcggggtggaggtgccggtcctgcgcggcggcggcgatcgcggactgcgtcgcgctggggtgctgcccgtgcgcggtcgtcgcgctgctggccctggcgctcgtcagggcgccgctcgcagtgggccgccggctccggatgcggaggcggtccgcgctgcgcaggaagcgggtgcgcgacgtcgcggccaaggttgcgccgagggccgcgcccggcgcgggcagcgggacgacgccgctggacccggcggccgccgccacgccggtgcggcagcagcagcagcagacacagacgcaggccgaggtggaggagctggcgtggctggacgagatgtaccgggtcggccactggggcttcggccgcgtctccttctcggggtctgcggggaaaaccccgtgaccggccggcgaagggggcgtgacaagctgaggtagccgctacccgccagccgcacgagtggcgcgcgtgtccgtgccgccggcggtcgcggttgtgcggatcaggcgcacgtcctcgtccgacacgccgaacgtgcggcgctactgcatgattgattggcgcgccggccccggccgacgggacgcgaggcgacccgacgcgacgtggctggctggctggctggctggttttgatggtctcgtcgtcatctctgtaggggtagatcgctcgtgccgggaacttgtcgggtgcacggcacgtttggcgcctagctagtttgggcccgggcctcctggtgttagcagctggtggcgcgggcctctcttctcggcctgtctctgtgtgtgagtagaagactagtcctatgcatctacagtgggcttccaggtgccgtctgtatggtgttttttttgttttgcaaaatactccctcgcgaactacattcaaggaagagaggtcaaaccaaagtactcatatttttgcaaaatatgagaccgctagtacattagggaatcataaaaataagatgaaactaatcgcaggcgggggtttttttttgtacaaaag

SEQ ID NO: 60320 - DNA, 1285 bp, Zea Mays
cgatccccaccacttttttgtggtcacacgcgccggcttctccttcagtccttctcccgcttccgcttccgcgatggtatcctaccatccctcccttctccgtccatccgtcctcatcgcccaggccagcggcatcggccggtgcccaacactcaacgccttcctttccacccccgtcgtctccgcggtgccacttcgcctgcggcctctgcgcgccgccgccggtggagcagcctcgccggtcagtggcgatggaggcaaacgcgctgttccgccgcctgccgcgctgcttgtcttcgcgcgtagcaacttcctcccgcttgctctcgttagtggggtgatatttggtctcctagatcctactcttggatgccttgctcacaaatactctctgtcgaagttcagcacttttgggatattcattatgtcaggactgaccctgcgaacgaaggagcttggtacagcattagaagcttggcctgctggattatatggattaggatctgttttgctctttacgcccttcctttctcaatttatcatgcaagttcagttctcccctcgtgaatttatcactggattagctatattttgctgtatgccaacaacattatcaagtggagtcatactaacacagcttgttggtggtaattctgcacttgctcttgcgatgacagttgcatccaatttacttggcattataatcgtacctctttctcttgcaagatacatcggcactggagctggggtgtctttgcctactgagaagttatttagaagtctggtcaccagacttctaatccctcttattatagggaagtgcaagcctgaattaactgaagcttcctggagacactcatgatgattcattctttgtcaggttgctcgagaagcctcaaaaggtattgctgattttgttgatggaaaccaacaaggattttcagttggaaacgcggtgcttcttagcctagtcccatggattcaagtaagtaaatcaagatcactgatcttatctgttcaagtggaagcttttgctgctgctattactgttggagtgcttctacatattgcactgttggctttcaacattgcaacgttgcatatcttgtcacatcttgaaaagaaaggggattcagtctttgcaaagaaagagtacacacgagctgtcattttggtgactagtcaggatagctgtgtctcattatattaagatagaagaaaagtacgagacaaaaccgtctgtgtgcatggaaaacaagatgaattgttattctgctctcatgac

SEQ ID NO: 60321 - DNA, 3243 bp, Zea Mays
cgatccccaccacttttttgtggtcacacgcgccggcttctccttcagtccttctcccgcttccgcttccgcgatggtatcctaccatccctcccttctccgtccatccgtcctcatcgcccaggccagcggcatcggccggtgcccaacactcaacgccttcctttccacccccgtcgtctccgcggtgccacttcgcctgcggcctctgcgcgccgccgccggtggagcagcctcgccggtcagtggcgatggaggcaaacgcgctgttccgccgcctgccgcgctgcttgtcttcgcgcgtagcaacttcctcccgcttgctctcgttagtggggtgatatttggtctcctagatcctactcttggatgccttgctcacaaatactctctgtcgaagttcagcacttttgggatattcattatgtcaggactgaccctgcgaacgaaggagcttggtacagcattagaagcttggcctgctggattatatggattagtatgaccttatgtttattctgtgtctgtcggacttggatgctctaatatttttttgatcataactgtaaatatgttgaataaattactcactccagttttggaccaagatataatttccgaaaattcggtaccattgatcttctagcatttatttggctaccaggagtaataattgtctttctggttgtttctgaagatgccaattccctacttctattggtcattcaagcgccctcaacaagtttgctaacatcttattttactgtgtataattgcagggatctgttttgctctttacgcccttcctttctcaatttatcatgcaagttcagttctcccctcgtgaatttatcactggattagctatattttgctgtatgccaacaacattatcaagtggagtcatactaacacagcttgttggtggtaattctgcacttgctcttgcgatgacagttgcatccaatttacttggcattataatcatacatcggcactggagctggggtgtctttgcctactgagaagttatttagaagtctggtcaccagacttctaatccctcttattatagggaagtgcaagcctgaattaactgaagcttcctggagacactcatgatgattcattctttgtcaggttgctcgagaagcctcaaaaggtattgctgattttgttgatggaaaccaacaaggattttcagttggaaacgcggtgcttcttagcctagcttctacatattgcactgttggctttcaacattgcaacgttgcatatcttgtcacatcttgaaaagaaaggggattcagtctttgcaaagaaagagtacacacgagctgtcattttggtgactagtcagaaaacattgccagttatgataacagtggttgagcagcttggaggagccctcggggagtccggacttctagttatcccttgtgtttttgcacacattaaccagatcattatcgattctatcatagtaaattggtggcgccggagggatcaacaatttagtaatccaaagtaactccataattcaattttggcgtgcaaaacagagaattagtcaggaattgctgactgcgaggctgattttgtgaagatgtaattgtacttgtccagcaagttcagtaatggaagaattgctgactgcaaagctgatttcgtgaaggccgttatatatgtcttcaaagcaggaaaatgaattcatctccaattgacaggcttatttgtttgaggcctgagtgggtgctgttgtagtggccgttatgttttccttcacatctaaaactgaatctccacataaacattattaaatgtccagatttaggttaagtaaaacctacgcccctctttggtagtgctccatacggatctagctcctctttgagtaggtggtgatccttaagggttttaggcttcgctggcttgttagtatgaagtatgactatattgttggtatttcactcaaccacaagacctatagcagctatatatgtaggatcgtgcgtattagagctgtcattttccctaatcttgttattattcgttaaaaatctgagagcagagtttttttaagaatctttgaatacaaaaaaaaaacacctaccttgccaaaatgatgagatttgaatttcaccattccaattggagaaaattcctttctccacttgaatgagtagaattgtccatttccatacaacacatttaaaaaaagcataacatcttgaaacgagcttggatggaaacaaatttatatgatataactttttgtttgaagccttcttggtcccaattcaaccaatgaaatatgtagatatatgggtacatatctaaacaattgtaaccattattttgacactaaacgaattcaaatgaaatatgatgaattaagagttctacagtgtctgtaaattttatctacatacgaagtattgtgaaaatgttgtggtttttgaagatatgctaacattggataaatgggagatactttcttacgtatcaattttctacgtatgacatcttcaaatattttttaagattttcatagagcttcttatatggatatatttctatgaaattttgccccagctgagttttgtatattacaacatttacgtttactaaattatacccgtgcgttcaatcaggatttccatttttgctcatgtataagatgacgcatgtcatttgtgatttagacctatatagaggtgataatggatcatgatccaaatcttaaataattttaattcaaaaatgaatataattaatttgatctagtgtaacatttagagttcatatattataagatatataaaattatttacagagtgtaaaacatattgtatcccacctacgtggtgtaggtctagcttatcgaaatctagaaaaaaaaaccaatttttactttgttaaatatttaggaattttatagaaatcaatgtatttttgtagaaagtatttttgtaatcccaagataatattatagcatattttagccaacatatctttacgggcatatttaatcatggtttccgaaccacagtatttggggtctaaaaaactcggatcattgcaatctcgctctttatccttccctcgtgcgctgcaactaaagtacttgtccccaaatagatgagaatctgtaaagacatgtacaactgggtacgcccgtgtctaaagagcactttaggtgaaagtgaaaacagtataactgagcgcattcgctagagttgc

SEQ ID NO: 60322 - DNA, 2923 bp, Zea Mays
cgatccccaccacttttttgtggtcacacgcgccggcttctccttcagtccttctcccgcttccgcttccgcgatggtatcctaccatccctcccttctccgtccatccgtcctcatcgcccaggccagcggcatcggccggtgcccaacactcaacgccttcctttccacccccgtcgtctccgcggtgccacttcgcctgcggcctctgcgcgccgccgccggtggagcagcctcgccggtcagtggcgatggaggcaaacgcgctgttccgccgcctgccgcgctgcttgtcttcgcgcgtagcaacttcctcccgcttgctctcgttagtggggtgatatttggtctcctagatcctactcttggatgccttgctcacaaatactctctgtcgaagttcagcacttttgggatattcattatgtcaggactgaccctgcgaacgaaggagcttggtacagcattagaagcttggcctgctggattatatggattaggatctgttttgctctttacgcccttcctttctcaatttatcatgcaagttcagttctcccctcgtgaatttatcactggattagctatattttgctgtatgccaacaacattatcaagtggagtcatactaacacagcttgttggtggtaattctgcacttgctcttgcgatgacagttgcatccaatttacttggcattataatcgtacctctttctcttgcaagatacatcggcactggagctggggtgtctttgcctactgagaagttatttagaagtctggtcaccagacttctaatccctcttattatagggaaggttgctcgagaagcctcaaaaggtattgctgattttgttgatggaaaccaacaaggattttcagttggaaacgcggtgcttcttagcctagcttctacatattgcactgttggctttcaacattgcaacgttgcatatcttgtcacatcttgaaaagaaaggggattcagtctttgcaaagaaagagtacacacgagctgtcattttggtgactagtcagaaaacattgccagttatgataacagtggttgagcagcttggaggagccctcggggagtccggacttctagttatcccttgtgtttttgcacacattaaccagatcattatcgattctatcatagtaaattggtggcgccggagggatcaacaatttagtaatccaaagtaactccataattcaattttggcgtgcaaaacagagaattagtcaggaattgctgactgcgaggctgattttgtgaagatgtaattgtacttgtccagcaagttcagtaatggaagaattgctgactgcaaagctgatttcgtgaaggccgttatatatgtcttcaaagcaggaaaatgaattcatctccaattgacaggcttatttgtttgaggcctgagtgggtgctgttgtagtggccgttatgttttccttcacatctaaaactgaatctccacataaacattattaaatgtccagatttaggttaagtaaaacctacgcccctctttggtagtgctccatacggatctagctcctctttgagtaggtggtgatccttaagggttttaggcttcgctggcttgttagtatgaagtatgactatattgttggtatttcactcaaccacaagacctatagcagctatatatgtaggatcgtgcgtattagagctgtcattttccctaatcttgttattattcgttaaaaatctgagagcagagtttttttaagaatctttgaatacaaaaaaaaaacacctaccttgccaaaatgatgagatttgaatttcaccattccaattggagaaaattcctttctccacttgaatgagtagaattgtccatttccatacaacacatttaaaaaaagcataacatcttgaaacgagcttggatggaaacaaatttatatgatataactttttgtttgaagccttcttggtcccaattcaaccaatgaaatatgtagatatatgggtacatatctaaacaattgtaaccattattttgacactaaacgaattcaaatgaaatatgatgaattaagagttctacagtgtctgtaaattttatctacatacgaagtattgtgaaaatgttgtggtttttgaagatatgctaacattggataaatgggagatactttcttacgtatcaattttctacgtatgacatcttcaaatattttttaagattttcatagagcttcttatatggatatatttctatgaaattttgccccagctgagttttgtatattacaacatttacgtttactaaattatacccgtgcgttcaatcaggatttccatttttgctcatgtataagatgacgcatgtcatttgtgatttagacctatatagaggtgataatggatcatgatccaaatcttaaataattttaattcaaaaatgaatataattaatttgatctagtgtaacatttagagttcatatattataagatatataaaattatttacagagtgtaaaacatattgtatcccacctacgtggtgtaggtctagcttatcgaaatctagaaaaaaaaaccaatttttactttgttaaatatttaggaattttatagaaatcaatgtatttttgtagaaagtatttttgtaatcccaagataatattatagcatattttagccaacatatctttacgggcatatttaatcatggtttccgaaccacagtatttggggtctaaaaaactcggatcattgcaatctcgctctttatccttccctcgtgcgctgcaactaaagtacttgtccccaaatagatgagaatctgtaaagacatgtacaactgggtacgcccgtgtctaaagagcactttaggtgaaagtgaaaacagtataactgagcgcattcgctagagttgc

SEQ ID NO: 60323 - DNA, 3009 bp, Zea Mays
cgatccccaccacttttttgtggtcacacgcgccggcttctccttcagtccttctcccgcttccgcttccgcgatggtatcctaccatccctcccttctccgtccatccgtcctcatcgcccaggccagcggcatcggccggtgcccaacactcaacgccttcctttccacccccgtcgtctccgcggtgccacttcgcctgcggcctctgcgcgccgccgccggtggagcagcctcgccggtcagtggcgatggaggcaaacgcgctgttccgccgcctgccgcgctgcttgtcttcgcgcgtagcaacttcctcccgcttgctctcgttagtggggtgatatttggtctcctagatcctactcttggatgccttgctcacaaatactctctgtcgaagttcagcacttttgggatattcattatgtcaggactgaccctgcgaacgaaggagcttggtacagcattagaagcttggcctgctggattatatggattaggatctgttttgctctttacgcccttcctttctcaatttatcatgcaagttcagttctcccctcgtgaatttatcactggattagctatattttgctgtatgccaacaacattatcaagtggagtcatactaacacagcttgttggtggtaattctgcacttgctcttgcgatgacagttgcatccaatttacttggcattataatcgtacctctttctcttgcaagatacatcggcactggagctggggtgtctttgcctactgagaagttatttagaagtctggtcaccagacttctaatccctcttattatagggaaggttgctcgagaagcctcaaaaggtattgctgattttgttgatggaaaccaacaaggattttcagttggaaacgcggtgcttcttagcctagtcccatggattcaagtaagtaaatcaagatcactgatcttatctgttcaagtggaagcttttgctgctgctattactgttggagtgcttctacatattgcactgttggctttcaacattgcaacgttgcatatcttgtcacatcttgaaaagaaaggggattcagtctttgcaaagaaagagtacacacgagctgtcattttggtgactagtcagaaaacattgccagttatgataacagtggttgagcagcttggaggagccctcggggagtccggacttctagttatcccttgtgtttttgcacacattaaccagatcattatcgattctatcatagtaaattggtggcgccggagggatcaacaatttagtaatccaaagtaactccataattcaattttggcgtgcaaaacagagaattagtcaggaattgctgactgcgaggctgattttgtgaagatgtaattgtacttgtccagcaagttcagtaatggaagaattgctgactgcaaagctgatttcgtgaaggccgttatatatgtcttcaaagcaggaaaatgaattcatctccaattgacaggcttatttgtttgaggcctgagtgggtgctgttgtagtggccgttatgttttccttcacatctaaaactgaatctccacataaacattattaaatgtccagatttaggttaagtaaaacctacgcccctctttggtagtgctccatacggatctagctcctctttgagtaggtggtgatccttaagggttttaggcttcgctggcttgttagtatgaagtatgactatattgttggtatttcactcaaccacaagacctatagcagctatatatgtaggatcgtgcgtattagagctgtcattttccctaatcttgttattattcgttaaaaatctgagagcagagtttttttaagaatctttgaatacaaaaaaaaaacacctaccttgccaaaatgatgagatttgaatttcaccattccaattggagaaaattcctttctccacttgaatgagtagaattgtccatttccatacaacacatttaaaaaaagcataacatcttgaaacgagcttggatggaaacaaatttatatgatataactttttgtttgaagccttcttggtcccaattcaaccaatgaaatatgtagatatatgggtacatatctaaacaattgtaaccattattttgacactaaacgaattcaaatgaaatatgatgaattaagagttctacagtgtctgtaaattttatctacatacgaagtattgtgaaaatgttgtggtttttgaagatatgctaacattggataaatgggagatactttcttacgtatcaattttctacgtatgacatcttcaaatattttttaagattttcatagagcttcttatatggatatatttctatgaaattttgccccagctgagttttgtatattacaacatttacgtttactaaattatacccgtgcgttcaatcaggatttccatttttgctcatgtataagatgacgcatgtcatttgtgatttagacctatatagaggtgataatggatcatgatccaaatcttaaataattttaattcaaaaatgaatataattaatttgatctagtgtaacatttagagttcatatattataagatatataaaattatttacagagtgtaaaacatattgtatcccacctacgtggtgtaggtctagcttatcgaaatctagaaaaaaaaaccaatttttactttgttaaatatttaggaattttatagaaatcaatgtatttttgtagaaagtatttttgtaatcccaagataatattatagcatattttagccaacatatctttacgggcatatttaatcatggtttccgaaccacagtatttggggtctaaaaaactcggatcattgcaatctcgctctttatccttccctcgtgcgctgcaactaaagtacttgtccccaaatagatgagaatctgtaaagacatgtacaactgggtacgcccgtgtctaaagagcactttaggtgaaagtgaaaacagtataactgagcgcattcgctagagttgc

SEQ ID NO: 60324 - DNA, 3007 bp, Zea Mays
cgatccccaccacttttttgtggtcacacgcgccggcttctccttcagtccttctcccgcttccgcttccgcgatggtatcctaccatccctcccttctccgtccatccgtcctcatcgcccaggccagcggcatcggccggtgcccaacactcaacgccttcctttccacccccgtcgtctccgcggtgccacttcgcctgcggcctctgcgcgccgccgccggtggagcagcctcgccggtcagtggcgatggaggcaaacgcgctgttccgccgcctgccgcgctgcttgtcttcgcgcgtagcaacttcctcccgcttgctctcgttagtggggtgatatttggtctcctagatcctactcttggatgccttgctcacaaatactctctgtcgaagttcagcacttttgggatattcattatgtcaggactgaccctgcgaacgaaggagcttggtacagcattagaagcttggcctgctggattatatggattaggatctgttttgctctttacgcccttcctttctcaatttatcatgcaagttcagttctcccctcgtgaatttatcactggattagctatattttgctgtatgccaacaacattatcaagtggagtcatactaacacagcttgttggtggtaattctgcacttgctcttgcgatgacagttgcatccaatttacttggcattataatcgtacctctttctcttgcaagatacatcggcactggagctggggtgtctttgcctactgagaagttatttagaagtctggtcaccagacttctaatccctcttattatagggaagtgcaagcctgaattaactgaagcttcctggagacactcatgatgattcattctttgtcaggttgctcgagaagcctcaaaaggtattgctgattttgttgatggaaaccaacaaggattttcagttggaaacgcggtgcttcttagcctagtatatctctgattcaaaacataagcttctacatattgcactgttggctttcaacattgcaacgttgcatatcttgtcacatcttgaaaagaaaggggattcagtctttgcaaagaaagagtacacacgagctgtcattttggtgactagtcagaaaacattgccagttatgataacagtggttgagcagcttggaggagccctcggggagtccggacttctagttatcccttgtgtttttgcacacattaaccagatcattatcgattctatcatagtaaattggtggcgccggagggatcaacaatttagtaatccaaagtaactccataattcaattttggcgtgcaaaacagagaattagtcaggaattgctgactgcgaggctgattttgtgaagatgtaattgtacttgtccagcaagttcagtaatggaagaattgctgactgcaaagctgatttcgtgaaggccgttatatatgtcttcaaagcaggaaaatgaattcatctccaattgacaggcttatttgtttgaggcctgagtgggtgctgttgtagtggccgttatgttttccttcacatctaaaactgaatctccacataaacattattaaatgtccagatttaggttaagtaaaacctacgcccctctttggtagtgctccatacggatctagctcctctttgagtaggtggtgatccttaagggttttaggcttcgctggcttgttagtatgaagtatgactatattgttggtatttcactcaaccacaagacctatagcagctatatatgtaggatcgtgcgtattagagctgtcattttccctaatcttgttattattcgttaaaaatctgagagcagagtttttttaagaatctttgaatacaaaaaaaaaacacctaccttgccaaaatgatgagatttgaatttcaccattccaattggagaaaattcctttctccacttgaatgagtagaattgtccatttccatacaacacatttaaaaaaagcataacatcttgaaacgagcttggatggaaacaaatttatatgatataactttttgtttgaagccttcttggtcccaattcaaccaatgaaatatgtagatatatgggtacatatctaaacaattgtaaccattattttgacactaaacgaattcaaatgaaatatgatgaattaagagttctacagtgtctgtaaattttatctacatacgaagtattgtgaaaatgttgtggtttttgaagatatgctaacattggataaatgggagatactttcttacgtatcaattttctacgtatgacatcttcaaatattttttaagattttcatagagcttcttatatggatatatttctatgaaattttgccccagctgagttttgtatattacaacatttacgtttactaaattatacccgtgcgttcaatcaggatttccatttttgctcatgtataagatgacgcatgtcatttgtgatttagacctatatagaggtgataatggatcatgatccaaatcttaaataattttaattcaaaaatgaatataattaatttgatctagtgtaacatttagagttcatatattataagatatataaaattatttacagagtgtaaaacatattgtatcccacctacgtggtgtaggtctagcttatcgaaatctagaaaaaaaaaccaatttttactttgttaaatatttaggaattttatagaaatcaatgtatttttgtagaaagtatttttgtaatcccaagataatattatagcatattttagccaacatatctttacgggcatatttaatcatggtttccgaaccacagtatttggggtctaaaaaactcggatcattgcaatctcgctctttatccttccctcgtgcgctgcaactaaagtacttgtccccaaatagatgagaatctgtaaagacatgtacaactgggtacgcccgtgtctaaagagcactttaggtgaaagtgaaaacagtataactgagcgcattcgctagagttgc

SEQ ID NO: 60325 - DNA, 3069 bp, Zea Mays
cgatccccaccacttttttgtggtcacacgcgccggcttctccttcagtccttctcccgcttccgcttccgcgatggtatcctaccatccctcccttctccgtccatccgtcctcatcgcccaggccagcggcatcggccggtgcccaacactcaacgccttcctttccacccccgtcgtctccgcggtgccacttcgcctgcggcctctgcgcgccgccgccggtggagcagcctcgccggtcagtggcgatggaggcaaacgcgctgttccgccgcctgccgcgctgcttgtcttcgcgcgtagcaacttcctcccgcttgctctcgttagtggggtgatatttggtctcctagatcctactcttggatgccttgctcacaaatactctctgtcgaagttcagcacttttgggatattcattatgtcaggactgaccctgcgaacgaaggagcttggtacagcattagaagcttggcctgctggattatatggattaggatctgttttgctctttacgcccttcctttctcaatttatcatgcaagttcagttctcccctcgtgaatttatcactggattagctatattttgctgtatgccaacaacattatcaagtggagtcatactaacacagcttgttggtggtaattctgcacttgctcttgcgatgacagttgcatccaatttacttggcattataatcgtacctctttctcttgcaagatacatcggcactggagctggggtgtctttgcctactgagaagttatttagaagtctggtcaccagacttctaatccctcttattatagggaagtgcaagcctgaattaactgaagcttcctggagacactcatgatgattcattctttgtcaggttgctcgagaagcctcaaaaggtattgctgattttgttgatggaaaccaacaaggattttcagttggaaacgcggtgcttcttagcctagtcccatggattcaagtaagtaaatcaagatcactgatcttatctgttcaagtggaagcttttgctgctgctattactgttggagtgcttctacatattgcactgttggctttcaacattgcaacgttgcatatcttgtcacatcttgaaaagaaaggggattcagtctttgcaaagaaagagtacacacgagctgtcattttggtgactagtcagaaaacattgccagttatgataacagtggttgagcagcttggaggagccctcggggagtccggacttctagttatcccttgtgtttttgcacacattaaccagatcattatcgattctatcatagtaaattggtggcgccggagggatcaacaatttagtaatccaaagtaactccataattcaattttggcgtgcaaaacagagaattagtcaggaattgctgactgcgaggctgattttgtgaagatgtaattgtacttgtccagcaagttcagtaatggaagaattgctgactgcaaagctgatttcgtgaaggccgttatatatgtcttcaaagcaggaaaatgaattcatctccaattgacaggcttatttgtttgaggcctgagtgggtgctgttgtagtggccgttatgttttccttcacatctaaaactgaatctccacataaacattattaaatgtccagatttaggttaagtaaaacctacgcccctctttggtagtgctccatacggatctagctcctctttgagtaggtggtgatccttaagggttttaggcttcgctggcttgttagtatgaagtatgactatattgttggtatttcactcaaccacaagacctatagcagctatatatgtaggatcgtgcgtattagagctgtcattttccctaatcttgttattattcgttaaaaatctgagagcagagtttttttaagaatctttgaatacaaaaaaaaaacacctaccttgccaaaatgatgagatttgaatttcaccattccaattggagaaaattcctttctccacttgaatgagtagaattgtccatttccatacaacacatttaaaaaaagcataacatcttgaaacgagcttggatggaaacaaatttatatgatataactttttgtttgaagccttcttggtcccaattcaaccaatgaaatatgtagatatatgggtacatatctaaacaattgtaaccattattttgacactaaacgaattcaaatgaaatatgatgaattaagagttctacagtgtctgtaaattttatctacatacgaagtattgtgaaaatgttgtggtttttgaagatatgctaacattggataaatgggagatactttcttacgtatcaattttctacgtatgacatcttcaaatattttttaagattttcatagagcttcttatatggatatatttctatgaaattttgccccagctgagttttgtatattacaacatttacgtttactaaattatacccgtgcgttcaatcaggatttccatttttgctcatgtataagatgacgcatgtcatttgtgatttagacctatatagaggtgataatggatcatgatccaaatcttaaataattttaattcaaaaatgaatataattaatttgatctagtgtaacatttagagttcatatattataagatatataaaattatttacagagtgtaaaacatattgtatcccacctacgtggtgtaggtctagcttatcgaaatctagaaaaaaaaaccaatttttactttgttaaatatttaggaattttatagaaatcaatgtatttttgtagaaagtatttttgtaatcccaagataatattatagcatattttagccaacatatctttacgggcatatttaatcatggtttccgaaccacagtatttggggtctaaaaaactcggatcattgcaatctcgctctttatccttccctcgtgcgctgcaactaaagtacttgtccccaaatagatgagaatctgtaaagacatgtacaactgggtacgcccgtgtctaaagagcactttaggtgaaagtgaaaacagtataactgagcgcattcgctagagttgc

SEQ ID NO: 60326 - DNA, 2855 bp, Zea Mays
cgatccccaccacttttttgtggtcacacgcgccggcttctccttcagtccttctcccgcttccgcttccgcgatggtatcctaccatccctcccttctccgtccatccgtcctcatcgcccaggccagcggcatcggccggtgcccaacactcaacgccttcctttccacccccgtcgtctccgcggtgccacttcgcctgcggcctctgcgcgccgccgccggtggagcagcctcgccggtcagtggcgatggaggcaaacgcgctgttccgccgcctgccgcgctgcttgtcttcgcgcgtagcaacttcctcccgcttgctctcgttagtggggtgatatttggtctcctagatcctactcttggatgccttgctcacaaatactctctgtcgaagttcagcacttttgggatattcattatgtcaggactgaccctgcgaacgaaggagcttggtacagcattagaagcttggcctgctggattatatggattaggatctgttttgctctttacgcccttcctttctcaatttatcatgcaagttcagttctcccctcgtgaatttatcactggattagctatattttgctgtatgccaacaacattatcaagtggagtcatactaacacagcttgttggtggtaattctgcacttgctcttgcgatgacagttgcatccaatttacttggcattataatcgtacctctttctcttgcaagatacatcggcactggagctggggtgtctttgcctactgagaagttatttagaagtctggtcaccagacttctaatccctcttattatagggaaggttgctcgagaagcctcaaaaggcttctacatattgcactgttggctttcaacattgcaacgttgcatatcttgtcacatcttgaaaagaaaggggattcagtctttgcaaagaaagagtacacacgagctgtcattttggtgactagtcagaaaacattgccagttatgataacagtggttgagcagcttggaggagccctcggggagtccggacttctagttatcccttgtgtttttgcacacattaaccagatcattatcgattctatcatagtaaattggtggcgccggagggatcaacaatttagtaatccaaagtaactccataattcaattttggcgtgcaaaacagagaattagtcaggaattgctgactgcgaggctgattttgtgaagatgtaattgtacttgtccagcaagttcagtaatggaagaattgctgactgcaaagctgatttcgtgaaggccgttatatatgtcttcaaagcaggaaaatgaattcatctccaattgacaggcttatttgtttgaggcctgagtgggtgctgttgtagtggccgttatgttttccttcacatctaaaactgaatctccacataaacattattaaatgtccagatttaggttaagtaaaacctacgcccctctttggtagtgctccatacggatctagctcctctttgagtaggtggtgatccttaagggttttaggcttcgctggcttgttagtatgaagtatgactatattgttggtatttcactcaaccacaagacctatagcagctatatatgtaggatcgtgcgtattagagctgtcattttccctaatcttgttattattcgttaaaaatctgagagcagagtttttttaagaatctttgaatacaaaaaaaaaacacctaccttgccaaaatgatgagatttgaatttcaccattccaattggagaaaattcctttctccacttgaatgagtagaattgtccatttccatacaacacatttaaaaaaagcataacatcttgaaacgagcttggatggaaacaaatttatatgatataactttttgtttgaagccttcttggtcccaattcaaccaatgaaatatgtagatatatgggtacatatctaaacaattgtaaccattattttgacactaaacgaattcaaatgaaatatgatgaattaagagttctacagtgtctgtaaattttatctacatacgaagtattgtgaaaatgttgtggtttttgaagatatgctaacattggataaatgggagatactttcttacgtatcaattttctacgtatgacatcttcaaatattttttaagattttcatagagcttcttatatggatatatttctatgaaattttgccccagctgagttttgtatattacaacatttacgtttactaaattatacccgtgcgttcaatcaggatttccatttttgctcatgtataagatgacgcatgtcatttgtgatttagacctatatagaggtgataatggatcatgatccaaatcttaaataattttaattcaaaaatgaatataattaatttgatctagtgtaacatttagagttcatatattataagatatataaaattatttacagagtgtaaaacatattgtatcccacctacgtggtgtaggtctagcttatcgaaatctagaaaaaaaaaccaatttttactttgttaaatatttaggaattttatagaaatcaatgtatttttgtagaaagtatttttgtaatcccaagataatattatagcatattttagccaacatatctttacgggcatatttaatcatggtttccgaaccacagtatttggggtctaaaaaactcggatcattgcaatctcgctctttatccttccctcgtgcgctgcaactaaagtacttgtccccaaatagatgagaatctgtaaagacatgtacaactgggtacgcccgtgtctaaagagcactttaggtgaaagtgaaaacagtataactgagcgcattcgctagagttgc

SEQ ID NO: 60327 - DNA, 3515 bp, Zea Mays
cgatccccaccacttttttgtggtcacacgcgccggcttctccttcagtccttctcccgcttccgcttccgcgatggtatcctaccatccctcccttctccgtccatccgtcctcatcgcccaggccagcggcatcggccggtgcccaacactcaacgccttcctttccacccccgtcgtctccgcggtgccacttcgcctgcggcctctgcgcgccgccgccggtggagcagcctcgccggtcagtggcgatggaggcaaacgcgctgttccgccgcctgccgcgctgcttgtcttcgcgcgtagcaacttcctcccgcttgctctcgttagtggggtgatatttggtctcctagatcctactcttggatgccttgctcacaaatactctctgtcgaagttcagcacttttgggatattcattatgtcaggactgaccctgcgaacgaaggagcttggtacagcattagaagcttggcctgctggattatatggattaggatctgttttgctctttacgcccttcctttctcaatttatcatgcaagttcagttctcccctcgtgaatttatcactggattagctatattttgctgtatgccaacaacattatcaagtggagtcatactaacacagcttgttggtggtaattctgcacttgctcttgcgatgacagttgcatccaatttacttggcattataatcgtacctctttctcttgcaagatacatcggcactggagctggggtgtctttgcctactgagaagttatttagaagtctggtcaccagacttctaatccctcttattatagggaaggttgctcgagaagcctcaaaaggtattgctgattttgttgatggaaaccaacaaggattttcagttggaaacgcggtgcttcttagcctagtcccatggattcaagtaagtaaatcaagatcactgatcttatctgttcaagtggaagcttttgctgctgctattactgttggagtgtatgtttaccttctgagcttatcaaaatgagaatgtttgtagatcttattatgtggatttcgaacaaattcttaagggaggatgaaagtccctttttcttgaaaaaactctgatctgtgggcgtaagacagccccgggcaatgcattaagacagctcacctactgttattcaacgttatactatagtaaacattattctgtcattgatgtgctgtgttggatttcacactgcactgtgacacccactactcggattcacagccttactaagtaataaacaatcaagtagaatcaatacttaaaaaaaagaaacaaattaataaggaccctgctccaatggttcttaacagttcttacttttttacaaaaatatatatatttttcttttctatagtgctgcatatatatctttttgttttacctccaatataaactgcagtactgcaccttggctttgactttagctcaaccttaatatctaacaggagcacattcgttgtcacaggcttctacatattgcactgttggctttcaacattgcaacgttgcatatcttgtcacatcttgaaaagaaaggggattcagtctttgcaaagaaagagtacacacgagctgtcattttggtgactagtcagaaaacattgccagttatgataacagtggttgagcagcttggaggagccctcggggagtccggacttctagttatcccttgtgtttttgcacacattaaccagatcattatcgattctatcatagtaaattggtggcgccggagggatcaacaatttagtaatccaaagtaactccataattcaattttggcgtgcaaaacagagaattagtcaggaattgctgactgcgaggctgattttgtgaagatgtaattgtacttgtccagcaagttcagtaatggaagaattgctgactgcaaagctgatttcgtgaaggccgttatatatgtcttcaaagcaggaaaatgaattcatctccaattgacaggcttatttgtttgaggcctgagtgggtgctgttgtagtggccgttatgttttccttcacatctaaaactgaatctccacataaacattattaaatgtccagatttaggttaagtaaaacctacgcccctctttggtagtgctccatacggatctagctcctctttgagtaggtggtgatccttaagggttttaggcttcgctggcttgttagtatgaagtatgactatattgttggtatttcactcaaccacaagacctatagcagctatatatgtaggatcgtgcgtattagagctgtcattttccctaatcttgttattattcgttaaaaatctgagagcagagtttttttaagaatctttgaatacaaaaaaaaaacacctaccttgccaaaatgatgagatttgaatttcaccattccaattggagaaaattcctttctccacttgaatgagtagaattgtccatttccatacaacacatttaaaaaaagcataacatcttgaaacgagcttggatggaaacaaatttatatgatataactttttgtttgaagccttcttggtcccaattcaaccaatgaaatatgtagatatatgggtacatatctaaacaattgtaaccattattttgacactaaacgaattcaaatgaaatatgatgaattaagagttctacagtgtctgtaaattttatctacatacgaagtattgtgaaaatgttgtggtttttgaagatatgctaacattggataaatgggagatactttcttacgtatcaattttctacgtatgacatcttcaaatattttttaagattttcatagagcttcttatatggatatatttctatgaaattttgccccagctgagttttgtatattacaacatttacgtttactaaattatacccgtgcgttcaatcaggatttccatttttgctcatgtataagatgacgcatgtcatttgtgatttagacctatatagaggtgataatggatcatgatccaaatcttaaataattttaattcaaaaatgaatataattaatttgatctagtgtaacatttagagttcatatattataagatatataaaattatttacagagtgtaaaacatattgtatcccacctacgtggtgtaggtctagcttatcgaaatctagaaaaaaaaaccaatttttactttgttaaatatttaggaattttatagaaatcaatgtatttttgtagaaagtatttttgtaatcccaagataatattatagcatattttagccaacatatctttacgggcatatttaatcatggtttccgaaccacagtatttggggtctaaaaaactcggatcattgcaatctcgctctttatccttccctcgtgcgctgcaactaaagtacttgtccccaaatagatgagaatctgtaaagacatgtacaactgggtacgcccgtgtctaaagagcactttaggtgaaagtgaaaacagtataactgagcgcattcgctagagttgc

SEQ ID NO: 60328 - DNA, 3329 bp, Zea Mays
cgatccccaccacttttttgtggtcacacgcgccggcttctccttcagtccttctcccgcttccgcttccgcgatggtatcctaccatccctcccttctccgtccatccgtcctcatcgcccaggccagcggcatcggccggtgcccaacactcaacgccttcctttccacccccgtcgtctccgcggtgccacttcgcctgcggcctctgcgcgccgccgccggtggagcagcctcgccggtcagtggcgatggaggcaaacgcgctgttccgccgcctgccgcgctgcttgtcttcgcgcgtagcaacttcctcccgcttgctctcgttagtggggtgatatttggtctcctagatcctactcttggatgccttgctcacaaatactctctgtcgaagttcagcacttttgggatattcattatgtcaggactgaccctgcgaacgaaggagcttggtacagcattagaagcttggcctgctggattatatggattagtatgaccttatgtttattctgtgtctgtcggacttggatgctctaatatttttttgatcataactgtaaatatgttgaataaattactcactccagttttggaccaagatataatttccgaaaattcggtaccattgatcttctagcatttatttggctaccaggagtaataattgtctttctggttgtttctgaagatgccaattccctacttctattggtcattcaagcgccctcaacaagtttgctaacatcttattttactgtgtataattgcagggatctgttttgctctttacgcccttcctttctcaatttatcatgcaagttcagttctcccctcgtgaatttatcactggattagctatattttgctgtatgccaacaacattatcaagtggagtcatactaacacagcttgttggtggtaattctgcacttgctcttgcgatgacagttgcatccaatttacttggcattataatcatacatcggcactggagctggggtgtctttgcctactgagaagttatttagaagtctggtcaccagacttctaatccctcttattatagggaagtgcaagcctgaattaactgaagcttcctggagacactcatgatgattcattctttgtcaggttgctcgagaagcctcaaaaggtattgctgattttgttgatggaaaccaacaaggattttcagttggaaacgcggtgcttcttagcctagtcccatggattcaagtaagtaaatcaagatcactgatcttatctgttcaagtggaagcttttgctgctgctattactgttggagtgcttctacatattgcactgttggctttcaacattgcaacgttgcatatcttgtcacatcttgaaaagaaaggggattcagtctttgcaaagaaagagtacacacgagctgtcattttggtgactagtcagaaaacattgccagttatgataacagtggttgagcagcttggaggagccctcggggagtccggacttctagttatcccttgtgtttttgcacacattaaccagatcattatcgattctatcatagtaaattggtggcgccggagggatcaacaatttagtaatccaaagtaactccataattcaattttggcgtgcaaaacagagaattagtcaggaattgctgactgcgaggctgattttgtgaagatgtaattgtacttgtccagcaagttcagtaatggaagaattgctgactgcaaagctgatttcgtgaaggccgttatatatgtcttcaaagcaggaaaatgaattcatctccaattgacaggcttatttgtttgaggcctgagtgggtgctgttgtagtggccgttatgttttccttcacatctaaaactgaatctccacataaacattattaaatgtccagatttaggttaagtaaaacctacgcccctctttggtagtgctccatacggatctagctcctctttgagtaggtggtgatccttaagggttttaggcttcgctggcttgttagtatgaagtatgactatattgttggtatttcactcaaccacaagacctatagcagctatatatgtaggatcgtgcgtattagagctgtcattttccctaatcttgttattattcgttaaaaatctgagagcagagtttttttaagaatctttgaatacaaaaaaaaaacacctaccttgccaaaatgatgagatttgaatttcaccattccaattggagaaaattcctttctccacttgaatgagtagaattgtccatttccatacaacacatttaaaaaaagcataacatcttgaaacgagcttggatggaaacaaatttatatgatataactttttgtttgaagccttcttggtcccaattcaaccaatgaaatatgtagatatatgggtacatatctaaacaattgtaaccattattttgacactaaacgaattcaaatgaaatatgatgaattaagagttctacagtgtctgtaaattttatctacatacgaagtattgtgaaaatgttgtggtttttgaagatatgctaacattggataaatgggagatactttcttacgtatcaattttctacgtatgacatcttcaaatattttttaagattttcatagagcttcttatatggatatatttctatgaaattttgccccagctgagttttgtatattacaacatttacgtttactaaattatacccgtgcgttcaatcaggatttccatttttgctcatgtataagatgacgcatgtcatttgtgatttagacctatatagaggtgataatggatcatgatccaaatcttaaataattttaattcaaaaatgaatataattaatttgatctagtgtaacatttagagttcatatattataagatatataaaattatttacagagtgtaaaacatattgtatcccacctacgtggtgtaggtctagcttatcgaaatctagaaaaaaaaaccaatttttactttgttaaatatttaggaattttatagaaatcaatgtatttttgtagaaagtatttttgtaatcccaagataatattatagcatattttagccaacatatctttacgggcatatttaatcatggtttccgaaccacagtatttggggtctaaaaaactcggatcattgcaatctcgctctttatccttccctcgtgcgctgcaactaaagtacttgtccccaaatagatgagaatctgtaaagacatgtacaactgggtacgcccgtgtctaaagagcactttaggtgaaagtgaaaacagtataactgagcgcattcgctagagttgc

SEQ ID NO: 60329 - DNA, 3033 bp, Zea Mays
cgatccccaccacttttttgtggtcacacgcgccggcttctccttcagtccttctcccgcttccgcttccgcgatggtatcctaccatccctcccttctccgtccatccgtcctcatcgcccaggccagcggcatcggccggtgcccaacactcaacgccttcctttccacccccgtcgtctccgcggtgccacttcgcctgcggcctctgcgcgccgccgccggtggagcagcctcgccggtcagtggcgatggaggcaaacgcgctgttccgccgcctgccgcgctgcttgtcttcgcgcgtagcaacttcctcccgcttgctctcgttagtggggtgatatttggtctcctagatcctactcttggatgccttgctcacaaatactctctgtcgaagttcagcacttttgggatattcattatgtcaggactgaccctgcgaacgaaggagcttggtacagcattagaagcttggcctgctggattatatggattaggatctgttttgctctttacgcccttcctttctcaatttatcatgcaagttcagttctcccctcgtgaatttatcactggattagctatattttgctgtatgccaacaacattatcaagtggagtcatactaacacagcttgttggtggtaattctgcacttgctcttgcgatgacagttgcatccaatttacttggcattataatcgtacctctttctcttgcaagatacatcggcactggagctggggtgtctttgcctactgagaagttatttagaagtctggtcaccagacttctaatccctcttattatagggaaggttgctcgagaagcctcaaaaggtattgctgattttgttgatggaaaccaacaaggattttcagttggaaacgcggtgcttcttagcctagtatatctctgattcaaaacataagtcccatggattcaagtaagtaaatcaagatcactgatcttatctgttcaagtggaagcttttgctgctgctattactgttggagtgcttctacatattgcactgttggctttcaacattgcaacgttgcatatcttgtcacatcttgaaaagaaaggggattcagtctttgcaaagaaagagtacacacgagctgtcattttggtgactagtcagaaaacattgccagttatgataacagtggttgagcagcttggaggagccctcggggagtccggacttctagttatcccttgtgtttttgcacacattaaccagatcattatcgattctatcatagtaaattggtggcgccggagggatcaacaatttagtaatccaaagtaactccataattcaattttggcgtgcaaaacagagaattagtcaggaattgctgactgcgaggctgattttgtgaagatgtaattgtacttgtccagcaagttcagtaatggaagaattgctgactgcaaagctgatttcgtgaaggccgttatatatgtcttcaaagcaggaaaatgaattcatctccaattgacaggcttatttgtttgaggcctgagtgggtgctgttgtagtggccgttatgttttccttcacatctaaaactgaatctccacataaacattattaaatgtccagatttaggttaagtaaaacctacgcccctctttggtagtgctccatacggatctagctcctctttgagtaggtggtgatccttaagggttttaggcttcgctggcttgttagtatgaagtatgactatattgttggtatttcactcaaccacaagacctatagcagctatatatgtaggatcgtgcgtattagagctgtcattttccctaatcttgttattattcgttaaaaatctgagagcagagtttttttaagaatctttgaatacaaaaaaaaaacacctaccttgccaaaatgatgagatttgaatttcaccattccaattggagaaaattcctttctccacttgaatgagtagaattgtccatttccatacaacacatttaaaaaaagcataacatcttgaaacgagcttggatggaaacaaatttatatgatataactttttgtttgaagccttcttggtcccaattcaaccaatgaaatatgtagatatatgggtacatatctaaacaattgtaaccattattttgacactaaacgaattcaaatgaaatatgatgaattaagagttctacagtgtctgtaaattttatctacatacgaagtattgtgaaaatgttgtggtttttgaagatatgctaacattggataaatgggagatactttcttacgtatcaattttctacgtatgacatcttcaaatattttttaagattttcatagagcttcttatatggatatatttctatgaaattttgccccagctgagttttgtatattacaacatttacgtttactaaattatacccgtgcgttcaatcaggatttccatttttgctcatgtataagatgacgcatgtcatttgtgatttagacctatatagaggtgataatggatcatgatccaaatcttaaataattttaattcaaaaatgaatataattaatttgatctagtgtaacatttagagttcatatattataagatatataaaattatttacagagtgtaaaacatattgtatcccacctacgtggtgtaggtctagcttatcgaaatctagaaaaaaaaaccaatttttactttgttaaatatttaggaattttatagaaatcaatgtatttttgtagaaagtatttttgtaatcccaagataatattatagcatattttagccaacatatctttacgggcatatttaatcatggtttccgaaccacagtatttggggtctaaaaaactcggatcattgcaatctcgctctttatccttccctcgtgcgctgcaactaaagtacttgtccccaaatagatgagaatctgtaaagacatgtacaactgggtacgcccgtgtctaaagagcactttaggtgaaagtgaaaacagtataactgagcgcattcgctagagttgc

SEQ ID NO: 60330 - DNA, 547 bp, Zea Mays
gcttctcaaatctggaagtgtttcaggtacttgaaaagcggccctggaaatcttgacaaggatatggagagaaggtttagctacgccctaagcagagaagacatcgagaacgccatactcggaggaccttaagctgaacacatggccaaggggctcagagctaggaattgcttagtcgaggttggcactgaagaaataatcgctccagtgatctgcgtgctaccattacgccattgtaagagcaaatggatcatgtgtcgagaaataatattcatgagcaataatctcgaactaggctggaaatgttggatgcctcctggtgacatgcgcctggtttgttggcctcgttgtgtcaaatctgcctttgagccgaaacttgctcatttgtgtacggcagaatagtgagcttttctactctccggtgatgtgatcggtggcactagaacccatgtaccaaacttggatcagtctaacaagaacacgtgcagaagtagcacgtttttacctaggacagtgttttctgatctacggtttttgtcaggagaac

SEQ ID NO: 60331 - DNA, 2744 bp, Zea Mays
agattctttccctgccagtgaccgaccgttaaaaaaagaatatgcagtcatgaattggcacttggagaatcagttctgttgggtgtagtttatagtcgcacatgatggttactataccttgatagcagggaatcatcaatcaggaagcgaaggcaacaactaattaagatgttttttcattccaaacagtaaaagcgaccctggatttgattaaatgtggggctgctaaagaagcagaccttgatttggtgttggtggaggttaatcttaacaatatggcaccagacacttcggcaaactctgattgttccatcacatattgaatgaacttaaagcccctcttatcgcaatgtgttcttgtgacgactaagaggcactttccaaatgtatgaacctgggtgcatgcttccatgtgatgaagccactggacagaagaagcttcaggattctaaggcaccaagcactggattacaagtctaaaaaggcagcacctcaaggatcaagtctcaataatagtaccaaaaatagaatggtttcaccatctactgaaaagcctaaggaagtgcttattctaaagacaaatgattatctgttcctgaaagcaatggacatgaagagacaaaaaagcaaaatcaggccacatggaccattgaactccatgaaaagttcttggaggctatcgaagctcttggggggacaagtttgctgcacctgagagaatcctgcacctgatgaatgtaaagggtttgactgtgaagcatatagccatccatctccaggtgggtgattaattgattatttgtaccgaaaaccccatccactaaaacttccttataagcttgattttctaatattggagctttcaagggaagcactaattttgtaaccttgaaacattcaatacagtgaagatagaaacatcgtttaggatagttttgattaagcagcacaagttgacaacttgttcactcgctcacatattttccattgccattaaaagtctactccacccttctactctatttattttgtattttcacacttctatggtcttcaattgttagtttctttgcccttgtgggatcaatatcttctgctaatttattgtggaatctgacaaatcggcacccttcatgtttctaccttcatctggttgataacatgccttaacctttttttatgtgttgggtgaggggtgggggatggtcttgaccttatgttacccttcccttggtaccccaaggaccttaaactactcacctccttgcattttcattcagctcttgatgcctatgactgaactgatcctgtagttcttttgctaaattgccactttaaattgttgtattggtttgacctttaataccagcccatgacatagtcaagaaaaaaaaataactgaacccatgtgcttataattctaactctattagtaggtattgttatcaggtgcctttaaaaattgtggtcgtcttttgggacatttgtcttcttaaactgcttgttgtcttattatgttatgttactccctccatttttaaatatatggcatctaggggagctaatatttttttgtttgaactgaggtaaacccatttccaccatcacaactgttcataagctaatatatgtcatctaggtgacaagtattgtttgacaagtatatgacatctaggtgaactgaggtactcaagtatagagtaggcaattagtggctgaagcaggaaatgaggtttccagaatgcttgaaaccaagaagatccgacttgacacgtgttaaaataccaggttcttcggtcaagctacctaccacccgatttgtgtcgacacttcgagtgtgctttaatcatgatgctattctcaactaggtatgcagaacagaaaccagtgatgttcatgagacaacccagtgtcgtgctcaaggacgggatgacgcgagccccggtcgtccggttcccatctgcacgccgcgccgccgagctcaaggccttcttggaggacccagcgaactttgacaccctggctatggtgtttaacaggagcaattgaagccattggacattggttgcacaacttgataaagtgaagaatctgcttgcgtctgagtttgggagtctataaacatggggaagagcacattttcatagtaacttgatgaagaagaggaacaagaagtaacaactattctaggtagatctggatatctttcccagcaggaaatcaaatctgccattttgaaagcaacacaattcctaaggaaagcaaaaggggagtccaatggcaacagtgaaaaaacagatgcgtcagcatctgtccctgatgagacactgacgccagaacagttaagggaaaagaagaaacaaatattacttaaaaccacaacagagggcaaattgcacgctaagcagaaacgtgcttgctgaagaggaggctttgcaggagaaacaagaagagaagaagcgtgcgtaagttgtgatgtaaccagtttgaaatttatcttcctctatgctttcttatatcaaatgatatactcctatcattccatgtcttgttaactttcggtattagttatttcaaagccgctttcagcaagttcttctttatatactatgacccattgcagatcaatgtccaaatatagaaaaacaacgttgtgtatttttccataccaaatagtgattaccctttataaattttattccaagcatgtttttaatcttgcatatataaggccctgtgtttgt

SEQ ID NO: 60332 - DNA, 2663 bp, Zea Mays
agattctttccctgccagtgaccgaccgttaaaaaaagaatatgcagtcatgaattggcacttggagaatcagttctgttgggtgtagtttatagtcgcacatgatggttactataccttgatagcagggaatcatcaatcaggaagcgaaggcaacaactaattaagatgttttttcattccaaacagtaaaagcgaccctggatttgattaaatgtggggctgctaaagaagcagaccttgatttggtgttggtggaggttaatcttaacaatatggcaccagacacttcggcaaactctgattgttccatcacatattgaatgaacttaaagcccctcttatcgcaatgtgttcttgtgacgactaagaggcactttccaaatgtatgaacctgggtgcatgcttccatgtgatgaagccactggacagaagaagcttcaggattctaaggcaccaagcactggattacaagtctaaaaaggcagcacctcaaggatcaagtctcaataatagtaccaaaaatagaatggtttcaccatctactgaaaagcctaaggaagtgcttattctaaagacaaatgattatctgttcctgaaagcaatggacatgaagagacaaaaaagcaaaatcaggccacatggaccattgaactccatgaaaagttcttggaggctatcgaagctcttggggggacaagtttgctgcacctgagagaatcctgcacctgatgaatgtaaagggtttgactgtgaagcatatagccatccatctccaggtgggtgattaattgattatttgtaccgaaaaccccatccactaaaacttccttataagcttgattttctaatattggagctttcaagggaagcactaattttgtaaccttgaaacattcaatacagtgaagatagaaacatcgtttaggatagttttgattaagcagcacaagttgacaacttgttcactcgctcacatattttccattgccattaaaagtctactccacccttctactctatttattttgtattttcacacttctatggtcttcaattgttagtttctttgcccttgtgggatcaatatcttctgctaatttattgtggaatctgacaaatcggcacccttcatgtttctaccttcatctggttgataacatgccttaacctttttttatgtgttgggtgaggggtgggggatggtcttgaccttatgttacccttcccttggtaccccaaggaccttaaactactcacctccttgcattttcattcagctcttgatgcctatgactgaactgatcctgtagttcttttgctaaattgccactttaaattgttgtattggtttgacctttaataccagcccatgacatagtcaagaaaaaaaaataactgaacccatgtgcttataattctaactctattagtaggtattgttatcaggtgcctttaaaaattgtggtcgtcttttgggacatttgtcttcttaaactgcttgttgtcttattatgttatgttactccctccatttttaaatatatggcatctaggggagctaatatttttttgtttgaactgaggtaaacccatttccaccatcacaactgttcataagctaatatatgtcatctaggtgacaagtattgtttgacaagtatatgacatctaggtgaactgaggtactcaagtatagagtaggcaattagtggctgaagcaggaaatgaggtttccagaatgcttgaaaccaagaagatccgacttgacacgtgttaaaataccagtatgcagaacagaaaccagtgatgttcatgagacaacccagtgtcgtgctcaaggacgggatgacgcgagccccggtcgtccggttcccatctgcacgccgcgccgccgagctcaaggccttcttggaggacccagcgaactttgacaccctggctatggtgtttaacaggagcaattgaagccattggacattggttgcacaacttgataaagtgaagaatctgcttgcgtctgagtttgggagtctataaacatggggaagagcacattttcatagtaacttgatgaagaagaggaacaagaagtaacaactattctaggtagatctggatatctttcccagcaggaaatcaaatctgccattttgaaagcaacacaattcctaaggaaagcaaaaggggagtccaatggcaacagtgaaaaaacagatgcgtcagcatctgtccctgatgagacactgacgccagaacagttaagggaaaagaagaaacaaatattacttaaaaccacaacagagggcaaattgcacgctaagcagaaacgtgcttgctgaagaggaggctttgcaggagaaacaagaagagaagaagcgtgcgtaagttgtgatgtaaccagtttgaaatttatcttcctctatgctttcttatatcaaatgatatactcctatcattccatgtcttgttaactttcggtattagttatttcaaagccgctttcagcaagttcttctttatatactatgacccattgcagatcaatgtccaaatatagaaaaacaacgttgtgtatttttccataccaaatagtgattaccctttataaattttattccaagcatgtttttaatcttgcatatataaggccctgtgtttgt

SEQ ID NO: 60333 - DNA, 1752 bp, Zea Mays
cagtgaccgaccgttaaaaaaagaatatgcagtcatgaattggcacttggagaatcagttctgttgggtgtagtttatagtcgcacatgatggttactataccttgatagcagggaatcatcaatcaggaagcgaaggcaacaactaattaagatgttttttcattccaaacagtaaaagcgaccctggatttgattaaatgtggggctgctaaagaagcagaccttgatttggtgttggtggaggttaatcttaacaatatggcaccagacacttcggcaaactctgattgttccatcacatattgaatgaacttaaagcccctcttatcgcaatgtgttcttgtgacgactaagaggcactttccaaatgtatgaacctgggtgcatgcttccatgtgatgaagccactggacagaagaagcttcaggattctaaggcaccaagcactggattacaagtctaaaaaggcagcacctcaaggatcaagtctcaataatagtaccaaaaatagaatggtttcaccatctactgaaaagcctaaggaagtgcttattctaaagacaaatgattatctgttcctgaaagcaatggacatgaagagacaaaaaagcaaaatcaggccacatggaccattgaactccatgaaaagttcttggaggctatcgaagctcttggggggacaagtttgctgcacctgagagaatcctgcacctgatgaatgtaaagggtttgactgtgaagcatatagccatccatctccaggtgaactgaggtactcaagtatagagtaggcaattagtggctgaagcaggaaatgaggtttccagaatgcttgaaaccaagaagatccgacttgacacgtgttaaaataccagtatgcagaacagaaaccagtgatgttcatgagacaacccagtgtcgtgctcaaggacgggatgacgcgagccccggtcgtccggttcccatctgcacgccgcgccgccgagctcaaggccttcttggaggacccagcgaactttgacaccctggctatggtgtttaacaggagcaattgaagccattggacattggttgcacaacttgataaagtgaagaatctgcttgcgtctgagtttgggagtctataaacatggggaagagcacattttcatagtaacttgatgaagaagaggaacaagaagtaacaactattctaggtagatctggatatctttcccagcaggaaatcaaatctgccattttgaaagcaacacaattcctaaggaaagcaaaaggggagtccaatggcaacagtgaaaaaacagatgcgtcagcatctgtccctgatgagacactgacgccagaacagttaagggaaaagaagaaacaaatattacttaaaaccacaacagagggcaaattgcacgctaagcagaaacgtgcttgctgaagaggaggctttgcaggagaaacaagaagagaagaagcgtgcgtaagttgtgatgtaaccagtttgaaatttatcttcctctatgctttcttatatcaaatgatatactcctatcattccatgtcttgttaactttcggtattagttatttcaaagccgctttcagcaagttcttctttatatactatgacccattgcagatcaatgtccaaatatagaaaaacaacgttgtgtatttttccataccaaatagtgattaccctttataaattttattccaagcatgtttttaatcttgcatatataaggccctgtgtttgt

SEQ ID NO: 60334 - DNA, 1632 bp, Zea Mays
cgaccgttaaaaaaagaatatgcagtcatgaattggcacttggagaatcagttctgttgggtgtagtttatagtcgcacatgatggttactataccttgatagcagggaatcatcaatcaggaagcgaaggcaacaactaattaagatgttttttcattccaaacagtaaaagcgaccctggatttgattaaatgtggggctgctaaagaagcagaccttgatttggtgttggtggaggttaatcttaacaatatggcaccagacacttcggcaaactctgattgttccatcacatattgaatgaacttaaagcccctcttatcgcaatgtgttcttgtgacgactaagaggcactttccaaatgtatgaacctgggtgcatgcttccatgtgatgaagccactggacagaagaagcttcaggattctaaggcaccaagcactggattacaagtctaaaaaggcagcacctcaaggatcaagtctcaataatagtaccaaaaatagaatggtttcaccatctactgaaaagcctaaggaagtgcttattctaaagacaaatgattatctgttcctgaaagcaatggacatgaagagacaaaaaagcaaaatcaggccacatggaccattgaactccatgaaaagttcttggaggctatcgaagctcttggggggacaagtttgctgcacctgagagaatcctgcacctgatgaatgtaaagggtttgactgtgaagcatatagccatccatctccagtatgcagaacagaaaccagtgatgttcatgagacaacccagtgtcgtgctcaaggacgggatgacgcgagccccggtcgtccggttcccatctgcacgccgcgccgccgagctcaaggccttcttggaggacccagcgaactttgacaccctggctatggtgtttaacaggagcaattgaagccattggacattggttgcacaacttgataaagtgaagaatctgcttgcgtctgagtttgggagtctataaacatggggaagagcacattttcatagtaacttgatgaagaagaggaacaagaagtaacaactattctaggtagatctggatatctttcccagcaggaaatcaaatctgccattttgaaagcaacacaattcctaaggaaagcaaaaggggagtccaatggcaacagtgaaaaaacagatgcgtcagcatctgtccctgatgagacactgacgccagaacagttaagggaaaagaagaaacaaatattacttaaaaccacaacagagggcaaattgcacgctaagcagaaacgtgcttgctgaagaggaggctttgcaggagaaacaagaagagaagaagcgtgcgtaagttgtgatgtaaccagtttgaaatttatcttcctctatgctttcttatatcaaatgatatactcctatcattccatgtcttgttaactttcggtattagttatttcaaagccgctttcagcaagttcttctttatatactatgacccattgcagatcaatgtccaaatatagaaaaacaacgttgtgtatttttccataccaaatagtgattaccctttataaattttattccaagcatgtttttaatcttgcatatataaggccctgtgtttgt

SEQ ID NO: 60335 - DNA, 1826 bp, Zea Mays
cgaccgttaaaaaaagaatatgcagtcatgaattggcacttggagaatcagttctgttgggtgtagtttatagtcgcacatgatggttactataccttgatagcagggaatcatcaatcaggaagcgaaggcaacaactaattaagatgttttttcattccaaacagtaaaagcgaccctggatttgattaaatgtggggctgctaaagaagcagaccttgatttggtgttggtggaggttaatcttaacaatatggcaccagacacttcggcaaactctgattgttccatcacatattgaatgaacttaaagcccctcttatcgcaatgtgttcttgtgacgactaagaggcactttccaaatgtatgaacctgggtgcatgcttccatgtgatgaagccactggacagaagaagcttcaggattctaaggcaccaagcactggattacaagtctaaaaaggcagcacctcaaggatcaagtctcaataatagtaccaaaaatagaatggtttcaccatctactgaaaagcctaaggaagtgcttattctaaagacaaatgattatctgttcctgaaagcaatggacatgaagagacaaaaaagcaaaatcaggccacatggaccattgaactccatgaaaagttcttggaggctatcgaagctcttggggggacaagtttgctgcacctgagagaatcctgcacctgatgaatgtaaagggtttgactgtgaagcatatagccatccatctccaggtgaactgaggtactcaagtatagagtaggcaattagtggctgaagcaggaaatgaggtttccagaatgcttgaaaccaagaagatccgacttgacacgtgttaaaataccaggttcttcggtcaagctacctaccacccgatttgtgtcgacacttcgagtgtgctttaatcatgatgctattctcaactaggtatgcagaacagaaaccagtgatgttcatgagacaacccagtgtcgtgctcaaggacgggatgacgcgagccccggtcgtccggttcccatctgcacgccgcgccgccgagctcaaggccttcttggaggacccagcgaactttgacaccctggctatggtgtttaacaggagcaattgaagccattggacattggttgcacaacttgataaagtgaagaatctgcttgcgtctgagtttgggagtctataaacatggggaagagcacattttcatagtaacttgatgaagaagaggaacaagaagtaacaactattctaggtagatctggatatctttcccagcaggaaatcaaatctgccattttgaaagcaacacaattcctaaggaaagcaaaaggggagtccaatggcaacagtgaaaaaacagatgcgtcagcatctgtccctgatgagacactgacgccagaacagttaagggaaaagaagaaacaaatattacttaaaaccacaacagagggcaaattgcacgctaagcagaaacgtgcttgctgaagaggaggctttgcaggagaaacaagaagagaagaagcgtgcgtaagttgtgatgtaaccagtttgaaatttatcttcctctatgctttcttatatcaaatgatatactcctatcattccatgtcttgttaactttcggtattagttatttcaaagccgctttcagcaagttcttctttatatactatgacccattgcagatcaatgtccaaatatagaaaaacaacgttgtgtatttttccataccaaatagtgattaccctttataaattttattccaagcatgtttttaatcttgcatatataaggccctgtgtttgt

SEQ ID NO: 60336 - DNA, 2008 bp, Zea Mays
cgaccgttaaaaaaagaatatgcagtcatgaattggcacttggagaatcagttctgttgggtgtagtttatagtcgcacatgatggttactataccttgatagcagggaatcatcaatcaggaagcgaaggcaacaactaattaagatgttttttcattccaaacagtaaaagcgaccctggatttgattaaatgtggggctgctaaagaagcagaccttgatttggtgttggtggaggttaatcttaacaatatggcaccagacacttcggcaaactctgattgttccatcacatattgaatgaacttaaagcccctcttatcgcaatgtgttcttgtgacgactaagaggcactttccaaatgtatgaacctgggtgcatgcttccatgtgatgaagccactggacagaagaagcttcaggattctaaggcaccaagcactggattacaagtctaaaaaggcagcacctcaaggatcaagtctcaataatagtaccaaaaatagaatggtttcaccatctactgaaaagcctaaggaagtgcttattctaaagacaaatgattatctgttcctgaaagcaatggacatgaagagacaaaaaagcaaaatcaggccacatggaccattgaactccatgaaaagttcttggaggctatcgaagctcttggggggacaagtttgctgcacctgagagaatcctgcacctgatgaatgtaaagggtttgactgtgaagcatatagccatccatctccaggtgacaagtattgtttgacaagtatatgacatctaggtgaactgaggtactcaagtatagagtaggcaattagtggctgaagcaggaaatgaggtttccagaatgcttgaaaccaagaagatccgacttgacacgtgttaaaataccagtatgcagaacagaaaccagtgatgttcatgagacaacccagtgtcgtgctcaaggacgggatgacgcgagccccggtcgtccggttcccatctgcacgccgcgccgccgagctcaaggccttcttggaggacccagcgaactttgacaccctggctatggtgtttaacaggagcaattgaagccattggacattggttgcacaacttgataaagtgaagaatctgcttgcgtctgagtttgggagtctataaacatggggaagagcacattttcatagtaacttgatgaagaagaggaacaagaagtaacaactattctaggtagatctggatatctttcccagcaggaaatcaaatctgccattttgaaagcaacacaattcctaaggaaagcaaaaggggagtccaatggcaacagtgaaaaaacagatgcgtcagcatctgtccctgatgagacactgacgccagaacagttaagggaaaagaagaaacaaatattacttaaaaccacaacagagggcaaattgcacgctaagcagaaacgtgcttgctgaagaggaggctttgcaggagaaacaagaagagaagaagcgtgcaactttcagagaaatttgatcagaggaagcgacagaaagttagtggtggtcagacaaacgggaagtcgggaaccattgtgcatctggtggtgaaggccatggagaacgactaaatgcaggtcataaagaaaggatgcggctgctggcgtcagctgaatttgatcgaggcaaaggcgaggacacttttggaatgagagacgaggattggttagtgttcaacaagatgagccattgctcccctgaagcttgttagagcacctgatcttgttttagatgcgtggaggggtgatgttgcctttgcggcatcaagcaagtttggtattgcagagagcacagtacaacattgtttactcaatataacctctcacagaaaatgacataatgagctattcatctcagttaggctatttatttgacagctgatacaatttgatgtagcaacaaaatttttcagaactgaaagtgatttttttaatgatcggatttggagggttcaaattacgaag

SEQ ID NO: 60337 - DNA, 3216 bp, Zea Mays
cagccactcaccctcctgcctccccacttcacttgcagcattggccatgccattgccatctgcccatctccagggttccaaccatattccaaagtgcacaatggaaacgtacacaaattacggtctttcactccgtttcgatgaaagtttcgcgtactgtaatgtatcgctctatcgaatttaaagattatataaaggtctagagttttggctttttaaggccattaattgtggacgaatcacaactagctagaggaccaatgaccatgctagcgacgggggaactgttgggtgccaaggtcttaactctaaaaaaaccaagtgggcccgagcaagtacgtgggacgcaatccaaggtgcgtgtagcaggtattccaggccgacacgacccagtggcccagtccttatcaccgacacgtgtctcgtgacgtggctcaagcctttggcgcgcctctccctctcccctcccctcgtcccattcctcctctgtcctcccccactcgctcccgttctcccctgcctcgccgcctctctccctgtcgtacccacctgccccctcgcggtctctctctccttcctgattggatcaatctggcctcgcggctccgactgatccgtggcgcctcgctcccgagcggaaccaccacctgatttgacgagactagcagatactgtcatggctcaggatgaagctgtggctacccaaaagactggaaatacaacatctccttctaaggattacccaactccttctccatatcctgattggtcaaccatgcaggcatattatggccctggtgtcttgccaccaacatattttactcctgcaatagctccaggtcatccaccgccatatatgtggggtcctcagcctataatgccaccccctttcgggacaccatatgctgcagtatacccacatggtggagcttacccacacccccttgtgcccatggtaatgatgcctatggacattttttgtttaattaagcacactatatatgtccaaacttggctgatcaagtgaccaagccattcaatgtaggaaatggaaagtaaaacttgattatagttggacaacatttctactcttttggtctgtagttcaccattgatgcacagcatgtagaatgttgtccataacctgtaattttgtagcctcatcagaacaaaggatctgcactgtgcatctagctctattttatattagctgcccgaggcttgccctaccagcagaagatgctgcgcacttattaatcatccattgccgctactccattcggatctgggacaagatatatgcctggcttgcggctgttttggagcctcgtggggtatgtgaaaattttatatcggtgacagagtggtggaatgaggttgtacactcaaaactcaaaagggtgtcctagaaaggcattttgttcgatcccaattctgtaacctgggaaatctcgaaggagcgaaatgcaagaatttcaatcggagacactctttggcaatctatcttgtgacaaagataaaggagcaggccacgacttggggcagtgcaggtgcaagacaccttaaggagatcctacagagcacttagctttttgctgtaaattcttgttagtctttccttcctctcgtatttatgcatgtttaacaatgtatacagttgttggcttaagcctcttcccctatttttaaataaatggcagatcctgcctgtctacgttcaaaaaatatatatttacacttcatcatgcccttggacgatctactaatctcctttagttccttctaaagttattatgttcatctttgtcttaatcactaagaataaatcattcgtttttgaagttttccattctaatcaatgttatcaatttgatgttctcatgctgctttcaagatgtcaactccaatgagcgtggagccagccaaatctacaaatagcaaggagaaaaattccaataagaaacttaaggaaatagatcggactgcagtgtctgctggcagtggtaacagtaaaagaacagtgtcatccattgaagattacagtgcagaaggctcaagcgatgtaaacgatcagaatgtgaacgaaacgtccaggaagcggagctcagatggtggacctggcgcagaaaccaccacaggtggaaacacggaatgtgttttagctcctaaccatacgctggggaatgctaccattttgccacaacactgcttttcagctccagtaattaagcccagtgctacaaatgtcgcgaactcgagggcgataggcacagcattatctccaccacctggtgtgatggttccagttcataatgcagtaccatctgacttatcagttaaggatgagagggaattgaagcgcgaaaagaggaagcagtcaaatagggagtctgctagacgatcaaggctgagaaaacaggctgagacagaggagttggctacacaagtggagtctcttgcagcagagaacacgtcccttagatctgaaatcggccagctaacagagagctcagagaagctcagactagagaattcagctctaatggtgaagctgaaggacaccgcagaaccgtctccgattaaagcatccgcatccccgtcctctccccgtgcctccgcggagaacttcctttccatgatcgacagcgccaacgcgccgagcgtcagcaggcacacggagcacggcggtcccaggctccggcagctcctggactccagtccggcgacagacgtcgccgccgtaagctgatgatgaagccggtccggcaaatacgccacagcacatgcatgtgtcctggggattccgcaggctcatgctgctcgagtgctcgtcagcgttacggactcggactctgtactccagtttaggcactgattccagtgaagtaaccgagggtaccggtaattttatctgctctcgcgccagagtgccgggctgccttgcctgcgaccactcctgtcctgtgtacccagagttgtaacgtagtagggtgttgtgctgcatgccgaccttttgaaactttcgagaccgtcatttggaccatttttttcgtcgcagtaacacaatacagatcggagtttgtacaggacggatgctgcctggtgtgcgcaattctctactgcaaaataccgacaaaaattctgtttgttttttgggttcctggagtagtggagttaggcgtaaggcgttggattccagggtcaagacggcacgcg

SEQ ID NO: 60338 - DNA, 1980 bp, Zea Mays
gacacgtgtctcgtgacgtggctcaagcctttggcgcgcctctccctctcccctcccctcgtcccattcctcctctgtcctcccccactcgctcccgttctcccctgcctcgccgcctctctccctgtcgtacccacctgccccctcgcggtctctctctccttcctgattggatcaatctggcctcgcggctccgactgatccgtggcgcctcgctcccgagcggaaccaccacctgatttgacgagagagctaggtgggccgtagaaaaggcttcagttcagatctcatttcagatagcacaggaccaatctggtctgcagtgttcaactggaatataagatttcgctgcataggtcaaagactagcagatactgtcatggctcaggatgaagctgtggctacccaaaagactggaaatacaacatctccttctaaggattacccaactccttctccatatcctgattggtcaaccatgcaggcatattatggccctggtgtcttgccaccaacatattttactcctgcaatagctccaggtcatccaccgccatatatgtggggtcctcagcctataatgccaccccctttcgggacaccatatgctgcagtatacccacatggtggagcttacccacacccccttgtgcccatgatgtcaactccaatgagcgtggagccagccaaatctacaaatagcaaggagaaaaattccaataagaaacttaaggaaatagatcggactgcagtgtctgctggcagtggtaacagtaaaagaacagtgtcatccattgaagattacagtgcagaaggctcaagcgatgtaaacgatcagaatgtgaacgaaacgtccaggaagcggagctcagatggtggacctggcgcagaaaccaccacaggtggaaacacggaatgtgttttagctcctaaccatacgctggggaatgctaccattttgccacaacactgcttttcagctccagtaattaagcccagtgctacaaatgtcgcgaactcgagggcgataggcacagcattatctccaccacctggtgtgatggttccagttcataatgcagtaccatctgacttatcagttaaggatgagagggaattgaagcgcgaaaagaggaagcagtcaaatagggagtctgctagacgatcaaggctgagaaaacaggctgagacagaggagttggctacacaagtggagtctcttgcagcagagaacacgtcccttagatctgaaatcggccagctaacagagagctcagagaagctcagactagagaattcagctctaatggtgaagctgaaggacaccgcagaaccgtctccgattaaagcatccgcatccccgtcctctccccgtgcctccgcggagaacttcctttccatgatcgacagcgccaacgcgccgagcgtcagcaggcacacggagcacggcggtcccaggctccggcagctcctggactccagtccggcgacagacgtcgccgccgtaagctgatgatgaagccggtccggcaaatacgccacagcacatgcatgtgtcctggggattccgcaggctcatgctgctcgagtgctcgtcagcgttacggactcggactctgtactccagtttaggcactgattccagtgaagtaaccgagggtaccggtaattttatctgctctcgcgccagagtgccgggctgccttgcctgcgaccactcctgtcctgtgtacccagagttgtaacgtagtagggtgttgtgctgcatgccgaccttttgaaactttcgagaccgtcatttggaccatttttttcgtcgcagtaacacaatacagatcggagtttgtacaggacggatgctgcctggtgtgcgcaattctctactgcaaaataccgacaaaaattctgtttgttttttgggttcctggagtagtggagttaggcgtaaggcgttggattccagggtcaagacggcacgcg

SEQ ID NO: 60339 - DNA, 3060 bp, Zea Mays
cgcctctccctctcccctcccctcgtcccattcctcctctgtcctcccccactcgctcccgttctcccctgcctcgccgcctctctccctgtcgtacccacctgccccctcgcggtctctctctccttcctgattggatcaatctggcctcgcggctccgactgatccgtggcgcctcgctcccgagcggaaccaccacctgatttgacgagactagcagatactgtcatggctcaggatgaagctgtggctacccaaaagactggaaatacaacatctccttctaaggattacccaactccttctccatatcctgattggtcaaccatgcaggcatattatggccctggtgtcttgccaccaacatattttactcctgcaatagctccaggtcatccaccgccatatatgtggggtcctcagcctataatgccaccccctttcgggacaccatatgctgcagtatacccacatggtggagcttacccacacccccttgtgcccatggtaatgatgcctatggacattttttgtttaattaagcacactatatatgtccaaacttggctgatcaagtgaccaagccattcaatgtaggaaatggaaagtaaaacttgattatagttggacaacatttctactcttttggtctgtagttcaccattgatgcacagcatgtagaatgttgtccataacctgtaattttgtagcctcatcagaacaaaggatctgcactgtgcatctagctctattttatattagctgcccgaggcttgccctaccagcagaagatgctgcgcacttattaatcatccattgccgctactccattcggatctgggacaagatatatgcctggcttgcggctgttttggagcctcgtggggtatgtgaaaattttatatcggtgacagagtggtggaatgaggttgtacactcaaaactcaaaagggtgtcctagaaaggcattttgttcgatcccaattctgtaacctgggaaatctcgaaggagcgaaatgcaagaatttcaatcggagacactctttggcaatctatcttgtgacaaagataaaggagcaggccacgacttggggcagtgcaggtgcaagacaccttaaggagatcctacagagcacttagctttttgctgtaaattcttgttagtctttccttcctctcgtatttatgcatgtttaacaatgtatacagttgttggcttaagcctcttcccctatttttaaataaatggcagatcctgcctgtctacgttcaaaaaatatatatttacacttcatcatgcccttggacgatctactaatctcctttagttccttctaaagttattatgttcatctttgtcttaatcactaagaataaatcattcgtttttgaagttttccattctaatcaatgttatcaatttgatgttctcatgctgctttcaagatgtcaactccaatgagcgtggagccagccaaatctacaaatagcaaggagaaaaattccaataagaaacttaaggaaatagatcggactgcagtgtctgctggcagtggtaacagtaaaagaacagtgtcatccattgaagattacagtgcagaaggctcaagcgatgtaaacgatcagaatgtgaacgaaacgtccaggaagcggagctcagatggtggacctggtattttacttctctaacaagtctttcagtgtatatagataccatgctagtcattacttctcgccaatacttgttagaggcagagatgttacctaatataatcagtcattctgccaaattggtcatcttgttctcttctactatgccttcttcagtggtcccgcgtgcatgttttccttttgacaatagttgcacaaaacctttcagttgcttcagggggtagtaactagatcaaaccatgttctgtgcatcagaacatgcaagaaaatggctaatcaaaatatatttgcaggcgcagaaaccaccacaggtggaaacacggaatgtgttttagctcctaaccatacgctggggaatgctaccattttgccacaacactgcttttcagctccagtaattaagcccagtgctacaaatgtcgcgaactcgagggcgataggcacagcattatctccaccacctggtgtgatggttccagttcataatgcagtaccatctgacttatcagttaaggatgagagggaattgaagcgcgaaaagaggaagcagtcaaatagggagtctgctagacgatcaaggctgagaaaacaggctgagacagaggagttggctacacaagtggagtctcttgcagcagagaacacgtcccttagatctgaaatcggccagctaacagagagctcagagaagctcagactagagaattcagctctaatggtgaagctgaaggacaccgcagaaccgtctccgattaaagcatccgcatccccgtcctctccccgtgcctccgcggagaacttcctttccatgatcgacagcgccaacgcgccgagcgtcagcaggcacacggagcacggcggtcccaggctccggcagctcctggactccagtccggcgacagacgtcgccgccgtaagctgatgatgaagccggtccggcaaatacgccacagcacatgcatgtgtcctggggattccgcaggctcatgctgctcgagtgctcgtcagcgttacggactcggactctgtactccagtttaggcactgattccagtgaagtaaccgagggtaccggtaattttatctgctctcgcgccagagtgccgggctgccttgcctgcgaccactcctgtcctgtgtacccagagttgtaacgtagtagggtgttgtgctgcatgccgaccttttgaaactttcgagaccgtcatttggaccatttttttcgtcgcagtaacacaatacagatcggagtttgtacaggacggatgctgcctggtgtgcgcaattctctactgcaaaataccgacaaaaattctgtttgttttttgggttcctggagtagtggagttaggcgtaaggcgttggattccagggtcaagacggcacgcg

SEQ ID NO: 60340 - DNA, 3112 bp, Zea Mays
cgcctctccctctcccctcccctcgtcccattcctcctctgtcctcccccactcgctcccgttctcccctgcctcgccgcctctctccctgtcgtacccacctgccccctcgcggtctctctctccttcctgattggatcaatctggcctcgcggctccgactgatccgtggcgcctcgctcccgagcggaaccaccacctgatttgacgagagagctaggtgggccgtagaaaaggcttcagttcagatctcatttcagatagcacaggaccaatctggtctgcagtgttcaactggaatataagatttcgctgcataggtcaaagactagcagatactgtcatggctcaggatgaagctgtggctacccaaaagactggaaatacaacatctccttctaaggattacccaactccttctccatatcctgattggtcaaccatgcaggcatattatggccctggtgtcttgccaccaacatattttactcctgcaatagctccaggtcatccaccgccatatatgtggggtcctcagcctataatgccaccccctttcgggacaccatatgctgcagtatacccacatggtggagcttacccacacccccttgtgcccatggtaatgatgcctatggacattttttgtttaattaagcacactatatatgtccaaacttggctgatcaagtgaccaagccattcaatgtaggaaatggaaagtaaaacttgattatagttggacaacatttctactcttttggtctgtagttcaccattgatgcacagcatgtagaatgttgtccataacctgtaattttgtagcctcatcagaacaaaggatctgcactgtgcatctagctctattttatattagctgcccgaggcttgccctaccagcagaagatgctgcgcacttattaatcatccattgccgctactccattcggatctgggacaagatatatgcctggcttgcggctgttttggagcctcgtggggtatgtgaaaattttatatcggtgacagagtggtggaatgaggttgtacactcaaaactcaaaagggtgtcctagaaaggcattttgttcgatcccaattctgtaacctgggaaatctcgaaggagcgaaatgcaagaatttcaatcggagacactctttggcaatctatcttgtgacaaagataaaggagcaggccacgacttggggcagtgcaggtgcaagacaccttaaggagatcctacagagcacttagctttttgctgtaaattcttgttagtctttccttcctctcgtatttatgcatgtttaacaatgtatacagttgttggcttaagcctcttcccctatttttaaataaatggcagatcctgcctgtctacgttcaaaaaatatatatttacacttcatcatgcccttggacgatctactaatctcctttagttccttctaaagttattatgttcatctttgtcttaatcactaagaataaatcattcgtttttgaagttttccattctaatcaatgttatcaatttgatgttctcatgctgctttcaagatgtcaactccaatgagcgtggagccagccaaatctacaaatagcaaggagaaaaattccaataagaaacttaaggaaatagatcggactgcagtgtctgctggcagtggtaacagtaaaagaacagtgtcatccatgtatggcatacattttgcttctgtctgtggattcttttactgcccccagccccctcctgttctcttttggtaaactgaagttatattttctgactatttatccagtgaagattacagtgcagaaggctcaagcgatgtaaacgatcagaatgtgaacgaaacgtccaggaagcggagctcagatggtggacctggcgcagaaaccaccacaggtggaaacacggaatgtgttttagctcctaaccatacgctggggaatgctaccattttgccacaacactgcttttcagctccagtaattaagcccagtgctacaaatgtcgcgaactcgagggcgataggcacagcattatctccaccacctggtgtgatggttccagttcataatgcagtaccatctgacttatcagttaaggatgagagggaattgaagcgcgaaaagaggaagcagtcaaatagggagtctgctagacgatcaaggctgagaaaacaggtgtgctgtgtgatacagttgtacaatgaagcagcatcctgaaacatgggagtggagtctggcttggattatttgtcctaacaacatatcttcaatcttatacttatgccctcccttggtgtaggctgagacagaggagttggctacacaagtggagtctcttgcagcagagaacacgtcccttagatctgaaatcggccagctaacagagagctcagagaagctcagactagagaattcagctctaatggtgaagctgaaggacaccgcagaaccgtctccgattaaagcatccgcatccccgtcctctccccgtgcctccgcggagaacttcctttccatgatcgacagcgccaacgcgccgagcgtcagcaggcacacggagcacggcggtcccaggctccggcagctcctggactccagtccggcgacagacgtcgccgccgtaagctgatgatgaagccggtccggcaaatacgccacagcacatgcatgtgtcctggggattccgcaggctcatgctgctcgagtgctcgtcagcgttacggactcggactctgtactccagtttaggcactgattccagtgaagtaaccgagggtaccggtaattttatctgctctcgcgccagagtgccgggctgccttgcctgcgaccactcctgtcctgtgtacccagagttgtaacgtagtagggtgttgtgctgcatgccgaccttttgaaactttcgagaccgtcatttggaccatttttttcgtcgcagtaacacaatacagatcggagtttgtacaggacggatgctgcctggtgtgcgcaattctctactgcaaaataccgacaaaaattctgtttgttttttgggttcctggagtagtggagttaggcgtaaggcgttggattccagggtcaagacggcacgcg

SEQ ID NO: 60341 - DNA, 3052 bp, Zea Mays
ctctccctctcccctcccctcgtcccattcctcctctgtcctcccccactcgctcccgttctcccctgcctcgccgcctctctccctgtcgtacccacctgccccctcgcggtctctctctccttcctgattggatcaatctggcctcgcggctccgactgatccgtggcgcctcgctcccgagcggaaccaccacctgatttgacgagactagcagatactgtcatggctcaggatgaagctgtggctacccaaaagactggaaatacaacatctccttctaaggattacccaactccttctccatatcctgattggtcaaccatgcaggcatattatggccctggtgtcttgccaccaacatattttactcctgcaatagctccaggtcatccaccgccatatatgtggggtcctcagcctataatgccaccccctttcgggacaccatatgctgcagtatacccacatggtggagcttacccacacccccttgtgcccatggtaatgatgcctatggacattttttgtttaattaagcacactatatatgtccaaacttggctgatcaagtgaccaagccattcaatgtaggaaatggaaagtaaaacttgattatagttggacaacatttctactcttttggtctgtagttcaccattgatgcacagcatgtagaatgttgtccataacctgtaattttgtagcctcatcagaacaaaggatctgcactgtgcatctagctctattttatattagctgcccgaggcttgccctaccagcagaagatgctgcgcacttattaatcatccattgccgctactccattcggatctgggacaagatatatgcctggcttgcggctgttttggagcctcgtggggtatgtgaaaattttatatcggtgacagagtggtggaatgaggttgtacactcaaaactcaaaagggtgtcctagaaaggcattttgttcgatcccaattctgtaacctgggaaatctcgaaggagcgaaatgcaagaatttcaatcggagacactctttggcaatctatcttgtgacaaagataaaggagcaggccacgacttggggcagtgcaggtgcaagacaccttaaggagatcctacagagcacttagctttttgctgtaaattcttgttagtctttccttcctctcgtatttatgcatgtttaacaatgtatacagttgttggcttaagcctcttcccctatttttaaataaatggcagatcctgcctgtctacgttcaaaaaatatatatttacacttcatcatgcccttggacgatctactaatctcctttagttccttctaaagttattatgttcatctttgtcttaatcactaagaataaatcattcgtttttgaagttttccattctaatcaatgttatcaatttgatgttctcatgctgctttcaagatgtcaactccaatgagcgtggagccagccaaatctacaaatagcaaggagaaaaattccaataagaaacttaaggaaatagatcggactgcagtgtctgctggcagtggtaacagtaaaagaacagtgtcatccatattacagtgcagaaggctcaagcgatgtaaacgatcagaatgtgaacgaaacgtccaggaagcggagctcagatggtggacctggtattttacttctctaacaagtctttcagtgtatatagataccatgctagtcattacttctcgccaatacttgttagaggcagagatgttacctaatataatcagtcattctgccaaattggtcatcttgttctcttctactatgccttcttcagtggtcccgcgtgcatgttttccttttgacaatagttgcacaaaacctttcagttgcttcagggggtagtaactagatcaaaccatgttctgtgcatcagaacatgcaagaaaatggctaatcaaaatatatttgcaggcgcagaaaccaccacaggtggaaacacggaatgtgttttagctcctaaccatacgctggggaatgctaccattttgccacaacactgcttttcagctccagtaattaagcccagtgctacaaatgtcgcgaactcgagggcgataggcacagcattatctccaccacctggtgtgatggttccagttcataatgcagtaccatctgacttatcagttaaggatgagagggaattgaagcgcgaaaagaggaagcagtcaaatagggagtctgctagacgatcaaggctgagaaaacaggctgagacagaggagttggctacacaagtggagtctcttgcagcagagaacacgtcccttagatctgaaatcggccagctaacagagagctcagagaagctcagactagagaattcagctctaatggtgaagctgaaggacaccgcagaaccgtctccgattaaagcatccgcatccccgtcctctccccgtgcctccgcggagaacttcctttccatgatcgacagcgccaacgcgccgagcgtcagcaggcacacggagcacggcggtcccaggctccggcagctcctggactccagtccggcgacagacgtcgccgccgtaagctgatgatgaagccggtccggcaaatacgccacagcacatgcatgtgtcctggggattccgcaggctcatgctgctcgagtgctcgtcagcgttacggactcggactctgtactccagtttaggcactgattccagtgaagtaaccgagggtaccggtaattttatctgctctcgcgccagagtgccgggctgccttgcctgcgaccactcctgtcctgtgtacccagagttgtaacgtagtagggtgttgtgctgcatgccgaccttttgaaactttcgagaccgtcatttggaccatttttttcgtcgcagtaacacaatacagatcggagtttgtacaggacggatgctgcctggtgtgcgcaattctctactgcaaaataccgacaaaaattctgtttgttttttgggttcctggagtagtggagttaggcgtaaggcgttggattccagggtcaagacggcacgcg

SEQ ID NO: 60342 - DNA, 2789 bp, Zea Mays
ctcccctcccctcgtcccattcctcctctgtcctcccccactcgctcccgttctcccctgcctcgccgcctctctccctgtcgtacccacctgccccctcgcggtctctctctccttcctgattggatcaatctggcctcgcggctccgactgatccgtggcgcctcgctcccgagcggaaccaccacctgatttgacgagactagcagatactgtcatggctcaggatgaagctgtggctacccaaaagactggaaatacaacatctccttctaaggtagaatttgagtactttgctgcactcccacctcgttggaacagggtggtctaagcaataagcacgatatttcacaggcatattatggccctggtgtcttgccaccaacatattttactcctgcaatagctccaggtcatccaccgccatatatgtggggtcctcagcctataatgccaccccctttcgggacaccatatgctgcagtatacccacatggtggagcttacccacacccccttgtgcccatggtaatgatgcctatggacattttttgtttaattaagcacactatatatgtccaaacttggctgatcaagtgaccaagccattcaatgtaggaaatggaaagtaaaacttgattatagttggacaacatttctactcttttggtctgtagttcaccattgatgcacagcatgtagaatgttgtccataacctgtaattttgtagcctcatcagaacaaaggatctgcactgtgcatctagctctattttatattagctgcccgaggcttgccctaccagcagaagatgctgcgcacttattaatcatccattgccgctactccattcggatctgggacaagatatatgcctggcttgcggctgttttggagcctcgtggggtatgtgaaaattttatatcggtgacagagtggtggaatgaggttgtacactcaaaactcaaaagggtgtcctagaaaggcattttgttcgatcccaattctgtaacctgggaaatctcgaaggagcgaaatgcaagaatttcaatcggagacactctttggcaatctatcttgtgacaaagataaaggagcaggccacgacttggggcagtgcaggtgcaagacaccttaaggagatcctacagagcacttagctttttgctgtaaattcttgttagtctttccttcctctcgtatttatgcatgtttaacaatgtatacagttgttggcttaagcctcttcccctatttttaaataaatggcagatcctgcctgtctacgttcaaaaaatatatatttacacttcatcatgcccttggacgatctactaatctcctttagttccttctaaagttattatgttcatctttgtcttaatcactaagaataaatcattcgtttttgaagttttccattctaatcaatgttatcaatttgatgttctcatgctgctttcaagatgtcaactccaatgagcgtggagccagccaaatctacaaatagcaaggagaaaaattccaataagaaacttaaggaaatagatcggactgcagtgtctgctggcagtggtaacagtaaaagaacagtgtcatccattgaagattacagtgcagaaggctcaagcgatgtaaacgatcagaatgtgaacgaaacgtccaggaagcggagctcagatggtggacctggcgcagaaaccaccacaggtggaaacacggaatgtgttttagctcctaaccatacgctggggaatgctaccattttgccacaacactgcttttcagctccagtaattaagcccagtgctacaaatgtcgcgaactcgagggcgataggcacagcattatctccaccacctggtgtgatggttccagttcataatgcagtaccatctgacttatcagttaaggatgagagggaattgaagcgcgaaaagaggaagcagtcaaatagggagtctgctagacgatcaaggctgagaaaacaggctgagacagaggagttggctacacaagtggagtctcttgcagcagagaacacgtcccttagatctgaaatcggccagctaacagagagctcagagaagctcagactagagaattcagctctaatggtgaagctgaaggacaccgcagaaccgtctccgattaaagcatccgcatccccgtcctctccccgtgcctccgcggagaacttcctttccatgatcgacagcgccaacgcgccgagcgtcagcaggcacacggagcacggcggtcccaggctccggcagctcctggactccagtccggcgacagacgtcgccgccgtaagctgatgatgaagccggtccggcaaatacgccacagcacatgcatgtgtcctggggattccgcaggctcatgctgctcgagtgctcgtcagcgttacggactcggactctgtactccagtttaggcactgattccagtgaagtaaccgagggtaccggtaattttatctgctctcgcgccagagtgccgggctgccttgcctgcgaccactcctgtcctgtgtacccagagttgtaacgtagtagggtgttgtgctgcatgccgaccttttgaaactttcgagaccgtcatttggaccatttttttcgtcgcagtaacacaatacagatcggagtttgtacaggacggatgctgcctggtgtgcgcaattctctactgcaaaataccgacaaaaattctgtttgttttttgggttcctggagtagtggagttaggcgtaaggcgttggattccagggtcaagacggcacgcg

SEQ ID NO: 60343 - DNA, 2455 bp, Zea Mays
cccattcctcctctgtcctcccccactcgctcccgttctcccctgcctcgccgcctctctccctgtcgtacccacctgccccctcgcggtctctctctccttcctgattggatcaatctggcctcgcggctccgactgatccgtggcgcctcgctcccgagcggaaccaccacctgatttgacgagactagcagatactgtcatggctcaggatgaagctgtggctacccaaaagactggaaatacaacatctccttctaaggattacccaactccttctccatatcctgattggtcaaccatgcaggcatattatggccctggtgtcttgccaccaacatattttactcctgcaatagctccaggtcatccaccgccatatatgtggggtcctcagcctataatgccaccccctttcgggacaccatatgctgcagtatacccacatggtggagcttacccacacccccttgtgcccatggtaatgatgcctatggacattttttgtttaattaagcacactatatatgtccaaacttggctgatcaagtgaccaagccattcaatgtaggaaatggaaagtaaaacttgattatagttggacaacatttctactcttttggtctgtagttcaccattgatgcacagcatgtagaatgttgtccataacctgtaattttgtagcctcatcagaacaaaggatctgcactgtgcatctagctctattttatattagctgcccgaggcttgccctaccagcagaagatgctgcgcacttattaatcatccattgccgctactccattcggatctgggacaagatatatgcctggcttgcggctgttttggagcctcgtggggtatgtgaaaattttatatcggtgacagagtggtggaatgaggttgtacactcaaaactcaaaagggtgtcctagaaaggcattttgttcgatcccaattctgtaacctgggaaatctcgaaggagcgaaatgcaagaatttcaatcggagacactctttggcaatctatcttgtgacaaagataaaggagcaggccacgacttggggcagtgcaggtgcaagacaccttaaggagatcctacagagcacttagctttttgctgtaaattcttatgtcaactccaatgagcgtggagccagccaaatctacaaatagcaaggagaaaaattccaataagaaacttaaggaaatagatcggactgcagtgtctgctggcagtggtaacagtaaaagaacagtgtcatccattgaagattacagtgcagaaggctcaagcgatgtaaacgatcagaatgtgaacgaaacgtccaggaagcggagctcagatggtggacctggcgcagaaaccaccacaggtggaaacacggaatgtgttttagctcctaaccatacgctggggaatgctaccattttgccacaacactgcttttcagctccagtaattaagcccagtgctacaaatgtcgcgaactcgagggcgataggcacagcattatctccaccacctggtgtgatggttccagttcataatgcagtaccatctgacttatcagttaaggatgagagggaattgaagcgcgaaaagaggaagcagtcaaatagggagtctgctagacgatcaaggctgagaaaacaggctgagacagaggagttggctacacaagtggagtctcttgcagcagagaacacgtcccttagatctgaaatcggccagctaacagagagctcagagaagctcagactagagaattcagctctaatggtgaagctgaaggacaccgcagaaccgtctccgattaaagcatccgcatccccgtcctctccccgtgcctccgcggagaacttcctttccatgatcgacagcgccaacgcgccgagcgtcagcaggcacacggagcacggcggtcccaggctccggcagctcctggactccagtccggcgacagacgtcgccgccgtaagctgatgatgaagccggtccggcaaatacgccacagcacatgcatgtgtcctggggattccgcaggctcatgctgctcgagtgctcgtcagcgttacggactcggactctgtactccagtttaggcactgattccagtgaagtaaccgagggtaccggtaattttatctgctctcgcgccagagtgccgggctgccttgcctgcgaccactcctgtcctgtgtacccagagttgtaacgtagtagggtgttgtgctgcatgccgaccttttgaaactttcgagaccgtcatttggaccatttttttcgtcgcagtaacacaatacagatcggagtttgtacaggacggatgctgcctggtgtgcgcaattctctactgcaaaataccgacaaaaattctgtttgttttttgggttcctggagtagtggagttaggcgtaaggcgttggattccagggtcaagacggcacgcg

SEQ ID NO: 60344 - DNA, 3126 bp, Zea Mays
ctcctctgtcctcccccactcgctcccgttctcccctgcctcgccgcctctctccctgtcgtacccacctgccccctcgcggtctctctctccttcctgattggatcaatctggcctcgcggctccgactgatccgtggcgcctcgctcccgagcggaaccaccacctgatttgacgagactagcagatactgtcatggctcaggatgaagctgtggctacccaaaagactggaaatacaacatctccttctaaggattacccaactccttctccatatcctgattggtcaaccatgcaggcatattatggccctggtgtcttgccaccaacatattttactcctgcaatagctccaggtcatccaccgccatatatgtggggtcctcagcctataatgccaccccctttcgggacaccatatgctgcagtatacccacatggtggagcttacccacacccccttgtgcccatggtaatgatgcctatggacattttttgtttaattaagcacactatatatgtccaaacttggctgatcaagtgaccaagccattcaatgtaggaaatggaaagtaaaacttgattatagttggacaacatttctactcttttggtctgtagttcaccattgatgcacagcatgtagaatgttgtccataacctgtaattttgtagcctcatcagaacaaaggatctgcactgtgcatctagctctattttatattagctgcccgaggcttgccctaccagcagaagatgctgcgcacttattaatcatccattgccgctactccattcggatctgggacaagatatatgcctggcttgcggctgttttggagcctcgtggggtatgtgaaaattttatatcggtgacagagtggtggaatgaggttgtacactcaaaactcaaaagggtgtcctagaaaggcattttgttcgatcccaattctgtaacctgggaaatctcgaaggagcgaaatgcaagaatttcaatcggagacactctttggcaatctatcttgtgacaaagataaaggagcaggccacgacttggggcagtgcaggtgcaagacaccttaaggagatcctacagagcacttagctttttgctgtaaattcttgttagtctttccttcctctcgtatttatgcatgtttaacaatgtatacagttgttggcttaagcctcttcccctatttttaaataaatggcagatcctgcctgtctacgttcaaaaaatatatatttacacttcatcatgcccttggacgatctactaatctcctttagttccttctaaagttattatgttcatctttgtcttaatcactaagaataaatcattcgtttttgaagttttccattctaatcaatgttatcaatttgatgttctcatgctgctttcaagatgtcaactccaatgagcgtggagccagccaaatctacaaatagcaaggagaaaaattccaataagaaacttaaggaaatagatcggactgcagtgtctgctggcagtggtaacagtaaaagaacagtgtcatccatgtatggcatacattttgcttctgtctgtggattcttttactgcccccagccccctcctgttctcttttggtaaactgaagttatattttctgactatttatccagtgaagattacagtgcagaaggctcaagcgatgtaaacgatcagaatgtgaacgaaacgtccaggaagcggagctcagatggtggacctggtattttacttctctaacaagtctttcagtgtatatagataccatgctagtcattacttctcgccaatacttgttagaggcagagatgttacctaatataatcagtcattctgccaaattggtcatcttgttctcttctactatgccttcttcagtggtcccgcgtgcatgttttccttttgacaatagttgcacaaaacctttcagttgcttcagggggtagtaactagatcaaaccatgttctgtgcatcagaacatgcaagaaaatggctaatcaaaatatatttgcaggcgcagaaaccaccacaggtggaaacacggaatgtgttttagctcctaaccatacgctggggaatgctaccattttgccacaacactgcttttcagctccagtaattaagcccagtgctacaaatgtcgcgaactcgagggcgataggcacagcattatctccaccacctggtgtgatggttccagttcataatgcagtaccatctgacttatcagatgagagggaattgaagcgcgaaaagaggaagcagtcaaatagggagtctgctagacgatcaaggctgagaaaacaggctgagacagaggagttggctacacaagtggagtctcttgcagcagagaacacgtcccttagatctgaaatcggccagctaacagagagctcagagaagctcagactagagaattcagctctaatggtgaagctgaaggacaccgcagaaccgtctccgattaaagcatccgcatccccgtcctctccccgtgcctccgcggagaacttcctttccatgatcgacagcgccaacgcgccgagcgtcagcaggcacacggagcacggcggtcccaggctccggcagctcctggactccagtccggcgacagacgtcgccgccgtaagctgatgatgaagccggtccggcaaatacgccacagcacatgcatgtgtcctggggattccgcaggctcatgctgctcgagtgctcgtcagcgttacggactcggactctgtactccagtttaggcactgattccagtgaagtaaccgagggtaccggtaattttatctgctctcgcgccagagtgccgggctgccttgcctgcgaccactcctgtcctgtgtacccagagttgtaacgtagtagggtgttgtgctgcatgccgaccttttgaaactttcgagaccgtcatttggaccatttttttcgtcgcagtaacacaatacagatcggagtttgtacaggacggatgctgcctggtgtgcgcaattctctactgcaaaataccgacaaaaattctgtttgttttttgggttcctggagtagtggagttaggcgtaaggcgttggattccagggtcaagacggcacgcg

SEQ ID NO: 60345 - DNA, 2727 bp, Zea Mays
cctctgtcctcccccactcgctcccgttctcccctgcctcgccgcctctctccctgtcgtacccacctgccccctcgcggtctctctctccttcctgattggatcaatctggcctcgcggctccgactgatccgtggcgcctcgctcccgagcggaaccaccacctgatttgacgagactagcagatactgtcatggctcaggatgaagctgtggctacccaaaagactggaaatacaacatctccttctaaggattacccaactccttctccatatcctgattggtcaaccatgcaggcatattatggccctggtgtcttgccaccaacatattttactcctgcaatagctccaggtcatccaccgccatatatgtggggtcctcagcctataatgccaccccctttcgggacaccatatgctgcagtatacccacatggtggagcttacccacacccccttgtgcccatggtaatgatgcctatggacattttttgtttaattaagcacactatatatgtccaaacttggctgatcaagtgaccaagccattcaatgtaggaaatggaaagtaaaacttgattatagttggacaacatttctactcttttggtctgtagttcaccattgatgcacagcatgtagaatgttgtccataacctgtaattttgtagcctcatcagaacaaaggatctgcactgtgcatctagctctattttatattagctgcccgaggcttgccctaccagcagaagatgctgcgcacttattaatcatccattgccgctactccattcggatctgggacaagatatatgcctggcttgcggctgttttggagcctcgtggggtatgtgaaaattttatatcggtgacagagtggtggaatgaggttgtacactcaaaactcaaaagggtgtcctagaaaggcattttgttcgatcccaattctgtaacctgggaaatctcgaaggagcgaaatgcaagaatttcaatcggagacactctttggcaatctatcttgtgacaaagataaaggagcaggccacgacttggggcagtgcaggtgcaagacaccttaaggagatcctacagagcacttagctttttgctgtaaattcttgttagtctttccttcctctcgtatttatgcatgtttaacaatgtatacagttgttggcttaagcctcttcccctatttttaaataaatggcagatcctgcctgtctacgttcaaaaaatatatatttacacttcatcatgcccttggacgatctactaatctcctttagttccttctaaagttattatgttcatctttgtcttaatcactaagaataaatcattcgtttttgaagttttccattctaatcaatgttatcaatttgatgttctcatgctgctttcaagatgtcaactccaatgagcgtggagccagccaaatctacaaatagcaaggagaaaaattccaataagaaacttaaggaaatagatcggactgcagtgtctgctggcagtggtaacagtaaaagaacagtgtcatccattgaagattacagtgcagaaggctcaagcgatgtaaacgatcagaatgtgaacgaaacgtccaggaagcggagctcagatggtggacctgaaaccaccacaggtggaaacacggaatgtgttttagctcctaaccatacgctggggaatgctaccattttgccacaacactgcttttcagctccagtaattaagcccagtgctacaaatgtcgcgaactcgagggcgataggcacagcattatctccaccacctggtgtgatggttccagttcataatgcagtaccatctgacttatcagttaaggatgagagggaattgaagcgcgaaaagaggaagcagtcaaatagggagtctgctagacgatcaaggctgagaaaacaggctgagacagaggagttggctacacaagtggagtctcttgcagcagagaacacgtcccttagatctgaaatcggccagctaacagagagctcagagaagctcagactagagaattcagctctaatggtgaagctgaaggacaccgcagaaccgtctccgattaaagcatccgcatccccgtcctctccccgtgcctccgcggagaacttcctttccatgatcgacagcgccaacgcgccgagcgtcagcaggcacacggagcacggcggtcccaggctccggcagctcctggactccagtccggcgacagacgtcgccgccgtaagctgatgatgaagccggtccggcaaatacgccacagcacatgcatgtgtcctggggattccgcaggctcatgctgctcgagtgctcgtcagcgttacggactcggactctgtactccagtttaggcactgattccagtgaagtaaccgagggtaccggtaattttatctgctctcgcgccagagtgccgggctgccttgcctgcgaccactcctgtcctgtgtacccagagttgtaacgtagtagggtgttgtgctgcatgccgaccttttgaaactttcgagaccgtcatttggaccatttttttcgtcgcagtaacacaatacagatcggagtttgtacaggacggatgctgcctggtgtgcgcaattctctactgcaaaataccgacaaaaattctgtttgttttttgggttcctggagtagtggagttaggcgtaaggcgttggattccagggtcaagacggcacgcg

SEQ ID NO: 60346 - DNA, 2331 bp, Zea Mays
accacgggctcctcaccctcctacgcattagtagcagcggccgcaggtccgcacccccccactcccacgcacactcgtgcgtctctcctcctcctcccccgcgtcgcgtgcgcgctctgcttcccttgccgccgtgcgctgcgagggtcgactgtcgagcgcgcgctgcttgctgctcgcctggccgtcgatgagcatggggcgcttcgtcaactccatggatccgacgtcggggctggaggtgatcagggactggaacggcgtcgcccaggtcgtgctccgctcgcccaagggagcctccgcgcgggtgagcctgtgcggtgggcaggtcgtctcatggaggaacgaccgcggcgaggagctcctcttcaccagcagcaaagtgaatccccctcccctctttttcttatttcccacactactcctaccgtcgtccagtaatctgtaatgcttacaggttttcagattttccttcctttttgcttcagtgttcttctagcatttctgtatgtgttcctgaaaccggcacctgtgaaaaggcgtctgttcaaccggggctgcaaagaacaacactgtgaatcgtattcatgtataattgccgttgtttctgtagtccatcctgacggctggagaagcgaatgacaaattaagctttgctatgtgcctacgttacctgtgagctgggactattttgtggtcctaaaatttcagtagccagttgttcattctttgttacggtttttatatatcatatagatatgtattaagatatttatttaaatataattattgtttattaaataataataaggtacatgtggtttggtggttagctccaaatttatagagtagggggtgaggtttgattgctcgctctgcactattttatggcgctagagtccataatttatagagtaggtggtggggtttgattgttcgcttatactattttttggcgctggggtccacagggcagtagctgagagagcgctgtgcgggcactgaacgtgggtccacagggcacggtgctgagacggggtgcatggggtgggtttagagtgtcagtatagagggtaaaaccgtaatagtaccaagcattaggttcttaataaaataatatagatatagataatggtttccctcggcttcatgtgctgacacctcctttttctcgtcttccttaatagggccagtagtgggactgtgtagccttactaaagcactttcatgtctgttgtttttgacgtgcaggcaaccttcaagccgccaaatgccatgcgaggtggaattcagatgtgtttccctcagtttggatactctgggacattggagcgacatggatttgcaagaaacaggatatggtccctggatgatgagcagccaccactgaatcataatgataacggaagcaaagtttctgttgaccttattctaaagccatctgaagatgacctcaagtgctggccacattgtttgagttccgtctgagggcctctctttcaaaggatggggacttgtcattgatatcacgcatcaggaatgtcaatggcaagccattcagtttctcatttgcttatcacacatatctttctgtttctgacatcaggtcaggcattatttgccctgcacatcgttctgtatacctcactatctaactactccctcaagtgaatttccatgagtgacatgctacgccttgttaattccagtgaggtcaggattgaaggtctggagacacttgattatcttgacaaccttagccacaaagaacggtttacggaacaaggagatgccataacatttgagtcagaggtcgaccgagtctacgttagctccccaaatgtagtagcagttattgaccatgagaagaaacactcgtttgtcataagaaaggaaggacttcctgacgttgttgtgtggaatccatgggaaaagaaatcgaagaccatggtagacctcggcgacgaggagtacaagcagatgctttgcgttgatgcggctgctgtggagagagcaatctcgctgagaccaggggaggagtggactgggaagctggagctttctgcggttttatccactaactgcagcgaccatcttgatcatcctgtcagcatctagcgtttattcccattgtagtgctatatatttgcctcacaagagaagtatgggccccttttgtaaatgagatcaataggtagctctgttatcagttagcagctcgacttgatcctggaaccggcacaatttgtgacctgtttttttaatgtgagtattgaatgatagcagcgccttgcttcatgcataatgcacacaaaatggcaagatttatca

SEQ ID NO: 60347 - DNA, 2190 bp, Zea Mays
ctacatctagggttttctcaccatacgcttcatcgccgtcgcatgggtttcctcaccatacgcttcgccgacggcggccttgcatggcaccggagagggcggcccctgcgcggacgcggaccacggccttagccccgatggcggcgcgctgcccccccgaccacccggcgcgagcgggtgcggcgcggcccccacccgacggcgcgggcgaggcacgcgggcctcccggcggcgcggacgcgacccctggccacagcggcggcgggcgcgacccctggccccggcgtcggcgggcgcgctctcctctccaaatctcgccgtctgcgcgcgtccaaatcgaggaatccgcgccccaaattgaggaatccgcctccgctatggaaggagatcgcctccgctgcgccccgactctcggtcgtcatcatcgtccgtgtccgctgtgccctggctctcggtccttcgcgcgcgcgcccttcatcgacctctctgccttctcccacctcgaggcccacacccacgtcggtggcgatgcccacagacacgcccaccaagaaacgccctatgcgctatgcgccaagaaacatgcttccctcgacgacgaccgagaagacccggcgagcccccgcttggcaccttcatcttcgtgatgatgttgtccttcaggctgaagtgccacacatgttcgtttagcgtaggtgctacttggtttttggcggtgcatgccgggtgttcaacttaatgtttccaaggttctgtggcagtgctaggcattttgggaggtggtgagcgcctcgcttggcaccttcattttcgtgatgatgctgtccttcaggctgcagtgccacatagtgcgaggcattttgggagggacatcatcatgcccaacttgaagtcgtccgtgaccacaacagcgagcgcggtggagcacagggatgaagtattgaaggcgctgccaccagtctgtagatcagctgtgagtgtcgtggtcgtggtgttttctgtacatccatctgctctgaagtataaagtataatccaatatgatggacgttgccgcgtgggttggccatgggatatattccccattcctctcctgtccacaccgcaggtcggtagccttgaggaggcaactaaagctaaagaagccggtgtagatgggatcattgttcagggacgtgaggcagggggtcatgtaattggtcaggaaggactgtttccagcgagaatgacctcaagaagtatgacaagaagaacaacaggttacaggtggatcacccttggaaaactgcctgatcggtctgtgtcagtgaatggttggggccttgctttccggtcctgcggtgactgtgtacttagatgggatccatgtgggcattatggatggccaaaatccactcctcacaagcggacccttccatacttggcactcttcctttatcaccccactaccatccccttccatatgcgacgaggacgatctgggaagcccaccatctactcccccttccacaagtcgagagcttcctatttattaatccaaagggtgaacataggcaaggccgccaccccagtttcatcctcctctcgttgagttgaatttgcaaattgttttgtcaaggtaaccctacacgtggacagaatcaccacactattaccactgttttgtcaaggtacatgttggtgacttgttgtcaaatgctaagagtcaagaacaaggcaacataaaaagtgttaaatgttaaagtccttcgtccttcaagacattatatcccttcggatataatgaatttcagacgaaggttatgagggaaaagaccttcgtaagtccaacatatgatgaaggagaatacatacatggaatacgaagaataacacagatattatcaccaatttatttctattttgtattatcagagtcataataacaaattataaatgtacctttggattgtcgaaaagtaaagatacaggcatgatgcgaaaagcagatgccagatcagcgtgaacagtacgggaatattgttcatctatttataggcacagggcgcagcccgtggagaattacattaatgccctttacatttatcaataattctatagtgattcttcgaggttcaatttgtcttttcaccatataagtcggttccccttttctgctgtcatgccgaagctttttctgcgcatagctttg

SEQ ID NO: 60348 - DNA, 2728 bp, Zea Mays
ctacatctagggttttctcaccatacgcttcatcgccgtcgcatgggtttcctcaccatacgcttcgccgacggcggccttgcatggcaccggagagggcggcccctgcgcggacgcggaccacggccttagccccgatggcggcgcgctgcccccccgaccacccggcgcgagcgggtgcggcgcggcccccacccgacggcgcgggcgaggcacgcgggcctcccggcggcgcggacgcgacccctggccacagcggcggcgggcgcgacccctggccccggcgtcggcgggcgcgctctcctctccaaatctcgccgtctgcgcgcgtccaaatcgaggaatccgcgccccaaattgaggaatccgcctccgctatggaaggagatcgcctccgctgcgccccgactctcggtcgtcatcatcgtccgtgtccgctgtgccctggctctcggtccttcgcgcgcgcgcccttcatcgacctctctgccttctcccacctcgaggcccacacccacgtcggtggcgatgcccacagacacgcccaccaagaaacgccctatgcgctatgcgccaagaaacatgcttccctcgacgacgaccgagaagacccggcgagcccccgcttggcaccttcatcttcgtgatgatgttgtccttcaggctgaagtgccacacatgttcgtttagcgtaggtgctacttggtttttggcggtgcatgccgggtgttcaacttaatgtttccaaggttctgtggcagtgctaggcattttgggaggtggtgagcgcctcgcttggcaccttcattttcgtgatgatgctgtccttcaggctgcagtgccacatagtgcgaggcattttgggagggacatcatcatgcccaacttgaagtcgtccgtgaccacaacagcgagcgcggtggagcacagggatgaagtattgaaggcgctgccaccaggtagtaccttcttcccactcatgacactacctcatagacaacgcaagtctagatgagatcaggctcgcaagtatgacctacctgttgccattttttgttaatcttttgaactgaagcatcgtgtttacctagctgtaagccgacatgtagtctgtagatcagctgtgagtgtcgtggtcgtggtgttttctgtacatccatctgctctgaagtataaagtataatccaatatgatggacgttgccgcgtgggttggccatgggatatattccccattcctctcctgtccacaccgcaggtcggtagccttgaggaggcaactaaagctaaagaagccggtgtagatgggatcattgttcagggacgtgaggcagggggtcatgtaattggtcaggaaggactgtttccagcgagaatgacctcaagaagtatgacaagaagaacaacaggttacaggtggatcacccttggaaaactgcctgatcggtctgtgtcagtgaatggttggggccttgctttccggtcctgcggtgactgtgtacttaggtaatttatcttctcccacttgccattactatgtcaatgtaatttgcactgtttattatttcgataggaatgaaaaaaatcttagttttatatgggcttcttctagatttttttcttaattaatatagcatttttattctcaattcactcaactattcaacaaagtaaataagtcttgagtgatcaataatgatcttttcttagatacctggtcgacctaattttaggactattatgtcaacactgattaccagtgtaggaatcttaattataatttatagctgattaccagtgtaggaatcttaatctgtgcttggcaggcaaaagccaagccatgctaccctgtgcttatctactgtggtgttgtccttgctcaaatccatgctagatgggatccatgtgggcattatggatggccaaaatccactcctcacaagcggacccttccatacttggcactcttcctttatcaccccactaccatccccttccatatgcgacgaggacgatctgggaagcccaccatctactcccccttccacaagtcgagagcttcctatttattaatccaaagggtgaacataggcaaggccgccaccccagtttcatcctcctctcgttgagttgaatttgcaaattgttttgtcaaggtaaccctacacgtggacagaatcaccacactattaccactgttttgtcaaggtacatgttggtgacttgttgtcaaatgctaagagtcaagaacaaggcaacataaaaagtgttaaatgttaaagtccttcgtccttcaagacattatatcccttcggatataatgaatttcagacgaaggttatgagggaaaagaccttcgtaagtccaacatatgatgaaggagaatacatacatggaatacgaagaataacacagatattatcaccaatttatttctattttgtattatcagagtcataataacaaattataaatgtacctttggattgtcgaaaagtaaagatacaggcatgatgcgaaaagcagatgccagatcagcgtgaacagtacgggaatattgttcatctatttataggcacagggcgcagcccgtggagaattacattaatgccctttacatttatcaataattctatagtgattcttcgaggttcaatttgtcttttcaccatataagtcggttccccttttctgctgtcatgccgaagctttttctgcgcatagctttg

SEQ ID NO: 60349 - DNA, 2374 bp, Zea Mays
catgggtttcctcaccatacgcttcgccgacggcggccttgcatggcaccggagagggcggcccctgcgcggacgcggaccacggccttagccccgatggcggcgcgctgcccccccgaccacccggcgcgagcgggtgcggcgcggcccccacccgacggcgcgggcgaggcacgcgggcctcccggcggcgcggacgcgacccctggccacagcggcggcgggcgcgacccctggccccggcgtcggcgggcgcgctctcctctccaaatctcgccgtctgcgcgcgtccaaatcgaggaatccgcgccccaaattgaggaatccgcctccgctatggaaggagatcgcctccgctgcgccccgactctcggtcgtcatcatcgtccgtgtccgctgtgccctggctctcggtccttcgcgcgcgcgcccttcatcgacctctctgccttctcccacctcgaggcccacacccacgtcggtggcgatgcccacagacacgcccaccaagaaacgccctatgcgctatgcgccaagaaacatgcttccctcgacgacgaccgagaagacccggcgagcccccgcttggcaccttcatcttcgtgatgatgttgtccttcaggctgaagtgccacacatgttcgtttagcgtaggtgctacttggtttttggcggtgcatgccgggtgttcaacttaatgtttccaaggttctgtggcagtgctaggcattttgggaggtggtgagcgcctcgcttggcaccttcattttcgtgatgatgctgtccttcaggctgcagtgccacataggttcgtttggcgtaggtgctgcttggtttttggcggtgcatgtcgggtgttcaacaatgtttccgaggttttgtggcagtgcgaggcattttgggagggacatcatcatgcccaacttgaagtcgtccgtgaccacaacagcgagcgcggtggagcacagggatgaagtattgaaggcgctgccaccaggtagtaccttcttcccactcatgacactacctcatagacaacgcaagtctagatgagatcaggctcgcaagtatgacctacctgttgccattttttgttaatcttttgaactgaagcatcgtgtttacctagctgtaagccgacatgtagtctgtagatcagctgtgagtgtcgtggtcgtggtgttttctgtacatccatctgctctgaagtataaagtataatccaatatgatggacgttgccgcgtgggttggccatgggatatattccccattcctctcctgtccacaccgcaggtcggtagccttgaggaggcaactaaagctaaagaagccggtgtagatgggatcattgttcagggacgtgaggcagggggtcatgtaattggtcaggactgtttccagcgagaatgacctcaagaagtatgacaagaagaacaacaggttacaggtggatcacccttggaaaactgcctgatcggtctgtgtcagtgaatggttggggccttgctttccggtcctgcggtgactgtgtacttagatgggatccatgtgggcattatggatggccaaaatccactcctcacaagcggacccttccatacttggcactcttcctttatcaccccactaccatccccttccatatgcgacgaggacgatctgggaagcccaccatctactcccccttccacaagtcgagagcttcctatttattaatccaaagggtgaacataggcaaggccgccaccccagtttcatcctcctctcgttgagttgaatttgcaaattgttttgtcaaggtaaccctacacgtggacagaatcaccacactattaccactgttttgtcaaggtacatgttggtgacttgttgtcaaatgctaagagtcaagaacaaggcaacataaaaagtgttaaatgttaaagtccttcgtccttcaagacattatatcccttcggatataatgaatttcagacgaaggttatgagggaaaagaccttcgtaagtccaacatatgatgaaggagaatacatacatggaatacgaagaataacacagatattatcaccaatttatttctattttgtattatcagagtcataataacaaattataaatgtacctttggattgtcgaaaagtaaagatacaggcatgatgcgaaaagcagatgccagatcagcgtgaacagtacgggaatattgttcatctatttataggcacagggcgcagcccgtggagaattacattaatgccctttacatttatcaataattctatagtgattcttcgaggttcaatttgtcttttcaccatataagtcggttccccttttctgctgtcatgccgaagctttttctgcgcatagctttg

SEQ ID NO: 60350 - DNA, 1277 bp, Zea Mays
cataggttcgtttggcgtaggtgctgcttggtttttggcggtgcatgtcgggtgttcaacaatgtttccgaggttttgtggcagtgcgaggcattttgggagggacatcatcatgcccaacttgaagtcgtccgtgaccacaacagcgagcgcggtggagcacagggatgaagtattgaaggcgctgccaccaggtcggtagccttgaggaggcaactaaagctaaagaagccggtgtagatgggatcattgttcagggacgtgaggcagggggtcatgtaattggtcaggaaggactgtttccagcgagaatgacctcaagaagtatgacaagaagaacaacaggttacaggtggatcacccttggaaaactgcctgatcggtctgtgtcagtgaatggttggggccttgctttccggtcctgcggtgactgtgtacttagatgggatccatgtgggcattatggatggccaaaatccactcctcacaagcggacccttccatacttggcactcttcctttatcaccccactaccatccccttccatatgcgacgaggacgatctgggaagcccaccatctactcccccttccacaagtcgagagcttcctatttattaatccaaagggtgaacataggcaaggccgccaccccagtttcatcctcctctcgttgagttgaatttgcaaattgttttgtcaaggtaaccctacacgtggacagaatcaccacactattaccactgttttgtcaaggtacatgttggtgacttgttgtcaaatgctaagagtcaagaacaaggcaacataaaaagtgttaaatgttaaagtccttcgtccttcaagacattatatcccttcggatataatgaatttcagacgaaggttatgagggaaaagaccttcgtaagtccaacatatgatgaaggagaatacatacatggaatacgaagaataacacagatattatcaccaatttatttctattttgtattatcagagtcataataacaaattataaatgtacctttggattgtcgaaaagtaaagatacaggcatgatgcgaaaagcagatgccagatcagcgtgaacagtacgggaatattgttcatctatttataggcacagggcgcagcccgtggagaattacattaatgccctttacatttatcaataattctatagtgattcttcgaggttcaatttgtcttttcaccatataagtcggttccccttttctgctgtcatgccgaagctttttctgcgcatagctttg

SEQ ID NO: 60351 - DNA, 1485 bp, Zea Mays
cataggttcgtttggcgtaggtgctgcttggtttttggcggtgcatgtcgggtgttcaacaatgtttccgaggttttgtggcagtgcgaggcattttgggagggacatcatcatgcccaacttgaagtcgtccgtgaccacaacagcgagcgcggtggagcacagggatgaagtattgaaggcgctgccaccaggtcggtagccttgaggaggcaactaaagctaaagaagccggtgtagatgggatcattgttcagggacgtgaggcagggggtcatgtaattggtcaggaaggactgtttccagcgagaatgacctcaagaagtatgacaagaagaacaacaggttacaggtggatcacccttggaaaactgcctgatcggtctgtgtcagtgaatggttggggccttgctttccggtcctgcggtgactgtgtacttaggtaatttatcttctcccacttgccattactatgtcaatgtaatttgcactgtttattatttcgataggaatgaaaaaaatcttagttttatatgggcttcttctagatttttttcttaattaatatagcatttttattctcaattcactcaactattcaacaaagtaaataagtcttgagtgatcaataatgatcttttcttagatacctggtcgacctaattttaggactattatgtcaacactgattaccagtgtaggaatcttaattataatttatagctgattaccagtgtaggaatcttaatctgtgcttggcaggcaaaagccaagccatgctaccctgtgcttatctactgtggtgttgtccttgctcaaatccatgctagatgggatccatgtgggcattatggatggccaaaatccactcctcacaagcggacccttccatacttggcactcttcctttatcaccccactaccatccccttccatatgcgacgaggacgatctgggaagcccaccatctactcccccttccacaagtcgagagcttcctatttattaatccaaagggtgaacataggcaaggccgccaccccagtttcatcctcctctcgttgagttgaatttgcaaattgttttgtcaaggtaaccctacacgtggacagaatcaccacactattaccactgttttgtcaaggatataactcgacgcgaggatagtgaaagggtctatgactgcatggcagtgcgtgggactcctcatccaaccctgcatcctggcccgttgctcacttcatcttgccgaggtttttctgatgtcagactgctaatagatctttggttagctcattgttatcttcaaatcaaaactgttgtgattgtcttacgttcatgtgcctactttgtactggaacattgtatgttcctactttgtctacttttgtgaaggacatttctttaaggtttcctacatatattttctacatgctttactaaaaactcacaaatttgtctcgggaacttcatactgaaacattg

SEQ ID NO: 60352 - DNA, 1538 bp, Zea Mays
tcgtccgtgaccacaacagcgagcgcggtggagcacagggatgaagtattgaaggcgctgccaccaggtcggtagccttgaggaggcaactaaagctaaagaagccggtgtagatgggatcattgttcagggacgtgaggcagggggtcatgtaattggtcaggaaggactgtttccagcgagaatgacctcaagaagtatgacaagaagaacaacaggttacaggtggatcacccttggaaaactgcctgatcggtctgtgtcagtgaatggttggggccttgctttccggtcctgcggtgactgtgtacttaggtaatttatcttctcccacttgccattactatgtcaatgtaatttgcactgtttattatttcgataggaatgaaaaaaatcttagttttatatgggcttcttctagatttttttcttaattaatatagcatttttattctcaattcactcaactattcaacaaagtaaataagtcttgagtgatcaataatgatcttttcttagatacctggtcgacctaattttaggactattatgtcaacactgattaccagtgtaggaatcttaattataatttatagctgattaccagtgtaggaatcttaatctgtgcttggcaggcaaaagccaagccatgctaccctgtgcttatctactgtggtgttgtccttgctcaaatccatgctagatgggatccatgtgggcattatggatggccaaaatccactcctcacaagcggacccttccatacttggcactcttcctttatcaccccactaccatccccttccatatgcgacgaggacgatctgggaagcccaccatctactcccccttccacaagtcgagagcttcctatttattaatccaaagggtgaacataggcaaggccgccaccccagtttcatcctcctctcgttgagttgaatttgcaaattgttttgtcaaggtaaccctacacgtggacagaatcaccacactattaccactgttttgtcaaggtacatgttggtgacttgttgtcaaatgctaagagtcaagaacaaggcaacataaaaagtgttaaatgttaaagtccttcgtccttcaagacattatatcccttcggatataatgaatttcagacgaaggttatgagggaaaagaccttcgtaagtccaacatatgatgaaggagaatacatacatggaatacgaagaataacacagatattatcaccaatttatttctattttgtattatcagagtcataataacaaattataaatgtacctttggattgtcgaaaagtaaagatacaggcatgatgcgaaaagcagatgccagatcagcgtgaacagtacgggaatattgttcatctatttataggcacagggcgcagcccgtggagaattacattaatgccctttacatttatcaataattctatagtgattcttcgaggttcaatttgtcttttcaccatataagtcggttccccttttctgctgtcatgccgaagctttttctgcgcatagctttg

SEQ ID NO: 60353 - DNA, 1178 bp, Zea Mays
atgaagtattgaaggcgctgccaccaggtcggtagccttgaggaggcaactaaagctaaagaagccggtgtagatgggatcattgttcagggacgtgaggcagggggtcatgtaattggtcaggaaggactgtttccagcgagaatgacctcaagaagtatgacaagaagaacaacaggttacaggtggatcacccttggaaaactgcctgatcggtctgtgtcagtgaatggttggggccttgctttccggtcctgcggtgactgtgtacttaggcaaaagccaagccatgctaccctgtgcttatctactgtggtgttgtccttgctcaaatccatgctagatgggatccatgtgggcattatggatggccaaaatccactcctcacaagcggacccttccatacttggcactcttcctttatcaccccactaccatccccttccatatgcgacgaggacgatctgggaagcccaccatctactcccccttccacaagtcgagagcttcctatttattaatccaaagggtgaacataggcaaggccgccaccccagtttcatcctcctctcgttgagttgaatttgcaaattgttttgtcaaggtaaccctacacgtggacagaatcaccacactattaccactgttttgtcaaggtacatgttggtgacttgttgtcaaatgctaagagtcaagaacaaggcaacataaaaagtgttaaatgttaaagtccttcgtccttcaagacattatatcccttcggatataatgaatttcagacgaaggttatgagggaaaagaccttcgtaagtccaacatatgatgaaggagaatacatacatggaatacgaagaataacacagatattatcaccaatttatttctattttgtattatcagagtcataataacaaattataaatgtacctttggattgtcgaaaagtaaagatacaggcatgatgcgaaaagcagatgccagatcagcgtgaacagtacgggaatattgttcatctatttataggcacagggcgcagcccgtggagaattacattaatgccctttacatttatcaataattctatagtgattcttcgaggttcaatttgtcttttcaccatataagtcggttccccttttctgctgtcatgccgaagctttttctgcgcatagctttg

SEQ ID NO: 60354 - DNA, 957 bp, Zea Mays
ctttccggtcctgcggtgactgtgtacttaggaatcttaatctgtgcttggcaggcaaaagccaagccatgctaccctgtgcttatctactgtggtgttgtccttgctcaaatccatgctagatgggatccatgtgggcattatggatggccaaaatccactcctcacaagcggacccttccatacttggcactcttcctttatcaccccactaccatccccttccatatgcgacgaggacgatctgggaagcccaccatctactcccccttccacaagtcgagagcttcctatttattaatccaaagggtgaacataggcaaggccgccaccccagtttcatcctcctctcgttgagttgaatttgcaaattgttttgtcaaggtaaccctacacgtggacagaatcaccacactattaccactgttttgtcaaggtacatgttggtgacttgttgtcaaatgctaagagtcaagaacaaggcaacataaaaagtgttaaatgttaaagtccttcgtccttcaagacattatatcccttcggatataatgaatttcagacgaaggttatgagggaaaagaccttcgtaagtccaacatatgatgaaggagaatacatacatggaatacgaagaataacacagatattatcaccaatttatttctattttgtattatcagagtcataataacaaattataaatgtacctttggattgtcgaaaagtaaagatacaggcatgatgcgaaaagcagatgccagatcagcgtgaacagtacgggaatattgttcatctatttataggcacagggcgcagcccgtggagaattacattaatgccctttacatttatcaataattctatagtgattcttcgaggttcaatttgtcttttcaccatataagtcggttccccttttctgctgtcatgccgaagctttttctgcgcatagctttg

SEQ ID NO: 60355 - DNA, 1139 bp, Zea Mays
gaaaaatccagagcggcgcgcgggaggcgacttctcctaggccgcgtctcccgcgacttctcctaggccacgcgacgctagcagcgccatggctgaactgaaagcaaagaggggtagtcgtacttacctcacatggacagatgcgatggatctagctcttttggaagttcttgtggagcatcacaataatggagaccgtggtcaaaatggttggaagccacatgtctacaatgctgccataagaaatgtgaaggataagtgcaatgtggatatcacaaaggataatatttccgcaaggtgcaagacctttgataagcactatgaaatcattagcaagatactatcgcagagtggctttgggtgggattgggagaacaatagactttctatggacagcgaagatgtttggtttagatatgtggagttgtgtgattatttgtccattgtacaggctaacaaaggagcagcatgctacaagacaaaagtggtgaagaactgggatgcaatctacactatatactccaaagaccatgccaatggtgaaggtgccaagacagggactgaaagtggtcaagatgtggtgaatgacagtcctacaaatgccaatgaaaactctccggtgttagctccaaagaagcagcgaactggtgatgcaattatgggtgtacttactgatatgaaagcttcatttcaagaggctatgcagtccaatgcacctttagaattgccaaagaagacggctccgtctaagatccttgcagcgcttcaagaaattcctgatttacctcgtgaagacatgctacgatcttatggtatgctgctaagccgtgatgatcgcatatttgaagctcttatggagctcccaatggaaatgaggaaagattggctgctgtttgagaatgagaggaagtgaagtatgtggagacaacatagtcttttgctacttcaggatgctagttaaaacttgttctcctagttagttagtggagaaagactttgcttttgctacaatgtagtagttaagaacttgttgaaatattaactagttatcgtcatgttgtattgtcacaggtattgtagtatttatttgtgatttgagtgatctgaatgttcatttgctttctcctccatgctataag

SEQ ID NO: 60356 - DNA, 1285 bp, Zea Mays
ctaatgatatgtttgctgactaccaagcttcttagttggggtcttttgccgccatggctgaactgaaagcaaagaggggtagtcgtacttacctcacatggacagatgcgatggatctagctcttttggaagttcttgtggagcatcacaataatggagaccgtggtcaaaatggttggaagccacatgtctacaatgctgccataagaaatgtgaaggataagtgcaatgtggatatcacaaaggataatatttccgcaaggtgcaagacctttgataagcactatgaaatcattagcaagatactatcgcagagtggctttgggtgggattgggagaacaatagactttctatggacagcgaagatgtttggtttagatatgtggaggctaacaaaggagcagcatgctacaagacaaaagtggtgaagaactgggatgcaatctacactatatactccaaagaccatgccaatggtgaaggtgccaagacagggactgaaagtggtcaagatgtggtgaatgacagtcctacaaatgccaatgaaaactctctggtgttagctccaaagaagcagcgaactggtgatgcaattatgggtgtacttactgatatgaaagcttcatttcaagaggctatgcagtccaatgcacctttagaattgccaaagaagacggctccgtctaagatccttgcagcgcttcaagaaattcctgatttacctcgtgaagacatgctacgatcttatggtatgctgctaagccgtgatgatcgcatatttgaagctcttatggagctccctatggaaatgaggaaagattggctgctgtttgagaatgagaggaagtgaagtatgtggagacaacatagtcttttgctacttcaggatgctagttaaaacttgttctcctagttagttagtggagaaagactttgcttttgctacaatgtagtagttaagaacttgttgaaatattaactagttatcgtcatgttgtattgtcacaggtattgtagtatttatttgtgatttgagtgatctgaatgttcacttgctttctcctccatgctataatgctctgtttggatgtaagtattcaggtgcaggaattgaaatggtggaggaattccaaagctgaggggaaatggaaatggtctgcaattccattgttggtgtttggatgagcatgtaacggcagttggaatcatagtgtagcgtccaattccaattcttgtttgggtgtgcagttgattgaaatgtacaaaacacattgagaaaaaaat

SEQ ID NO: 60357 - DNA, 825 bp, Zea Mays
aactcaaactggatgttggcccagccagcccatctcattccgcccacatgcagcctcaaaaggcccagagcccaatcttatcctctccatcgtcgtccaacgaacggcggcgcgagtgggcgtgcagaagccgagagaaggcactcggcagatggaggggctgacgtccagtgagatcgccggattcgtggtgggtgccctgctgctcggcgccaccatcgctgcccccaaggtcgacggcttcatcgcctcctcccagagaaggtcactagggatgtgtaagaggtgcggtgaccttcggattgtagcatgctcgcagtgcaaaggaacaggatcagctcggagcggagggatgctcagtttgggaatgctggatgacctctacgagtctcttggagccgaagccaagactgagaatctggttccctgcacaaagtgcaggtcgagaggccgtctcctgtgtccagaatgctccaaggtcgcatgaccctggaaccaaggccgtctcctgtgtccagaatactctcaatgcagttgttctcagtgcttttggttgggctggttgggtgttttgtatcttgttcttttttattctctcgtctaataaaaattatggtaaatatattgtcatccttccccaaaaagtaaagtatcccaatgcaatctcacctcaacttgcaactctagccactacagatgatagaacaaagagtatacattcgtcattttaaagttgatttatcgtgggagtattactaaaggtgaatgtgcaacatcttcgtagttcctagtgaaaagaggccttctacatccacaaaattcgca

SEQ ID NO: 60358 - DNA, 747 bp, Zea Mays
taggtctgtcgttcggtttgtgtacaagtgcacagtgccaatgcaaaaaattagcattgctttggatgggcagatggaggggctgacgtccagtgagatcgccggattcgtggtgggtgccctgctgctcggcgccaccatcgctgcccccaaggtcgacggcttcatcgcctcctcccagagaaggtcactagggatgtgtaagaggtgcggtgaccttcggattgtagcatgctcgcagtgcaaaggaacaggatcagctcggagcggagggatgctcagtttgggaatgctggatgacctctacgagtctcttggagccgaagccaagactgagaatctggttccctgcacaaagtgcaggtcgagaggccgtctcctgtgtccagaatgctccaaggtcgcatgaccctggaaccaaggccgtctcctgtgtccagaatactctcaatgcagttgttctcagtgcttttggttgggctggttgggtgttttgtatcttgttcttttttattctctcgtctaataaaaattatggtaaatatattgtcatccttccccaaaaagtaaagtatcccaatgcaatctcacctcaacttgcaactctagccactacagatgatagaacaaagagtatacattcgtcattttaaagttgatttatcgtgggagtattactaaaggtgaatgtgcaacatcttcgtagttcctagtgaaaagaggccttctacatccacaaaattcgca

SEQ ID NO: 60359 - DNA, 2084 bp, Zea Mays
cgatcccgccgcgacccccgcccgccgccaatcgcccgccgcgaaccccgtccgccgccaaccgcaaggcgcgaacgcccgcccgccgcgaccgctcggcaaacgccgtgaacagcccgccaccaaccgcgatacgcccgtcgcgaccttccgcgaaccctgcccgccgccacgaatgcccgcctctgcgaaccctgcaagccacgatacgcccgccgcgacccgccgcgaattccctcccgcaacgcccgcacgaccgcccgcacaacccgcatgcccgccgcgagcccgccgcaaaccccgcccgcacgcccgccagccatgccgcgacagacctaccacaatttcacaaagatgttttctgctatttacagatgaatagttattgtcagggacaacaaggttccatcatttccagggaggaaaatgttcgtgtaatgattattggtagtccacccgctcttgttcgttgcagtcggcagcacaccacaaggaagtgaagttaggttgaaacagactcttgacttgtgaaaataattgatgaagatttcttctctttctccagatacttttgaagaggtgaagagcaagcgtgataggaaaaaaactcggtggcaaggcaatctttatcaaggtcaaatgtggctggctgggcaacagatggaggatttggctccaaaccttttcttgatggtctcgaagtgtataataaacaaaagaacaattctggaagccttgacagattcaagatggattcaagaccttcggggtgttttatcttgggaggtgttcatggaaatcacacttctttggaagctttcgaaggggttaacctgcagcccggcattgccggatagacacttttagaggttgtccagttccagaaaatatttagcaacctcggcttatgcagccatcttctaaggatccttgcagtaggaggcttttgatcgtgtctagaagatttgggctcctcctaggcagttctggttctttattctccaaagaatggggctcattgctcacgacctgtgaaaataattaatcaagatttcttatctttctccggatacttttcaagagatgaagagcaagtgtgataggaaaaaagactcggtggtaaggcaaggtacgccgaggtcaaatgtaatattgttctgtacttcgatttggtgtattttgcttttttagtccctacaaaatgactgggatttagcaaagcggcttatctgttgtgcatcatttctattgtccctccgaattgcatattataaactatttctgaaatttcagtatattttttgtcgtttctatggtagatatatgttgaccggtaacatgtgtcacacataataaggggattaacaatgagggttcaacttgtttatacagctggtaacatgtttttctgaccggtaacatgtgtcacgcataataaggggattaacagtgagggtaacatgtgccaatgctcttggtaatttcagttcgcctaatagccaacttgttttttgtaacactcgataattcatttactaagttgttccttatttgtttttatattgtgaactgagtatatatgtgattaaatgttgcattcattgcagcaattcaaaaggctttggtggcgcggaacgatcgtcagtttgccgttagatatcttgacgaccaaatgtgtagatagagtctaaaacttttgcaaatctgaattttaggatggaataaatgtactattattgatgcaacttacatgtgtcaagatttgtaaaacattttgttctactgggaaatattaatgaataagtggaacatcaaatcgtttagcccgtacgttttccatttagaacaatattggtttaatgttgtgtcatgtttgacattgaaatcgtaacttcgctcgtgaaattatgtcaaatatgcaaatcaaatccggaacaaatttaatgtacattcggtataccgaagcccatctacaggagctaggcgtgctccatgaagatgttccacatcaccagagttatgaaaacaattactcgtcgcgtcacccatatccatctatgcagttcaagcttggaatataattt

SEQ ID NO: 60360 - DNA, 1615 bp, Zea Mays
cgatcccgccgcgacccccgcccgccgccaatcgcccgccgcgaaccccgtccgccgccaaccgcaaggcgcgaacgcccgcccgccgcgaccgctcggcaaacgccgtgaacagcccgccaccaaccgcgatacgcccgtcgcgaccttccgcgaaccctgcccgccgccacgaatgcccgcctctgcgaaccctgcaagccacgatacgcccgccgcgacccgccgcgaattccctcccgcaacgcccgcacgaccgcccgcacaacccgcatgcccgccgcgagcccgccgcaaaccccgcccgcacgcccgccagccatgccgcgacagacctaccacaatttcacaaagatgttttctgctatttacagatgaatagttattgtcagggacaacaaggttccatcatttccagggaggaaaatatacttttgaagaggtgaagagcaagcgtgataggaaaaaaactcggtggcaaggcaatctttatcaaggtggctggctgggcaacagatggaggatttggctccaaaccttttcttgatggtctcgaagtgtataataaacaaaagaacaattctggaagccttgacagattcaagatggattcaagaccttcggggtgttttatcttgggaggtgttcatggaaatcacacttctttggaagctttcgaaggggttaacctgcagcccggcattgccggatagacacttttagaggttgtccagttccagaaaatatttagcaacctcggcttatgcagccatcttctaaggatccttgcagtaggaggcttttgatcgtgtctagaagatttgggctcctcctaggtgcactttcttcatctgccttgtgatccacaatcgatgttggacattggatcgattggctaagagaaatctccctcgaccgagctgttgtcccctttgtgaacaggaagatgagacaattaatcatatcttagtaatctgtgttttcagcaggcagttctggttctttattctccaaagaatggggctcattgctcacgacctgtgaaaataattaatcaagatttcttatctttctccggatacttttcaagagatgaagagcaagtgtgataggaaaaaagactcggtggtaaggcaagcaattcaaaaggctttggtggcgcggaacgatcgtcagtttgccgttagatatcttgacgaccaaatgtgtagatagagtctaaaacttttgcaaatctgaattttaggatggaataaatgtactattattgatgcaacttacatgtgtcaagatttgtaaaacattttgttctactgggaaatattaatgaataagtggaacatcaaatcgtttagcccgtacgttttccatttagaacaatattggtttaatgttgtgtcatgtttgacattgaaatcgtaacttcgctcgtgaaattatgtcaaatatgcaaatcaaatccggaacaaatttaatgtacattcggtataccgaagcccatctacaggagctaggcgtgctccatgaagatgttccacatcaccagagttatgaaaacaattactcgtcgcgtcacccatatccatctatgcagttcaagcttggaatataattt

SEQ ID NO: 60361 - DNA, 1724 bp, Zea Mays
taccagctctctgggcatcatgtcaaaaagactagatatgcgcttcttcttttgattagtttgtctaagaaaatatttctgagcatgacttacaacttgagttggtgttctggtggtaacaaatttttttgctatacccctccaatctcccttacctagcttttcaagaccagcaagaaatgttcgatgctcctcttcagtccaaggaacagttgaagcaaaacagaaataaaaatatttaacgagtattacagatatggaaataaaggcttgcatatctcttcttcaattgaacatagtaaaacttcttgagttggctcttggaatgattcactaaaagaattgtccacaataataataaaaattgttagatgactctcctgatttccatataagttgttgtcgtctaaacaaaaaaggtaaacaagaaccaaacaaacatcacaaatatccaatgcaataaagaatttttcaaataaaaattaactacgatagtgggcaaaaagccaaaaactttcattattgcaggttttcagtttttaatgctaaatggcttgctgtagagataagctttacttttcaaatatgtgtattctggagtgacaggtggctggctgggcaacagatggaggatttggctccaaaccttttcttgatggtctcgaagtgtataataaacaaaagaacaattctggaagccttgacagattcaagatggattcaagaccttcggggtgttttatcttgggaggtgttcatggaaatcacacttctttggaagctttcgaaggggttaacctgcagcccggcattgccggatagacacttttagaggttgtccagttccagaaaatatttagcaacctcggcttatgcagccatcttctaaggatccttgcagtaggaggcttttgatcgtgtctagaagatttgggctcctcctaggtgcactttcttcatctgccttgtgatccacaatcgatgttggacattggatcgattggctaagagaaatctccctcgaccgagctgttgtcccctttgtgaacaggaagatgagacaattaatcatatcttagtaatctgtgttttcagcaggcagttctggttctttattctccaaagaatggggctcattgctcacgacctgtgaaaataattaatcaagatttcttatctttctccggatacttttcaagagatgaagagcaagtgtgataggaaaaaagactcggtggtaaggcaagcaattcaaaaggctttggtggcgcggaacgatcgtcagtttgccgttagatatcttgacgaccaaatgtgtagatagagtctaaaacttttgcaaatctgaattttaggatggaataaatgtactattattgatgcaacttacatgtgtcaagatttgtaaaacattttgttctactgggaaatattaatgaataagtggaacatcaaatcgtttagcccgtacgttttccatttagaacaatattggtttaatgttgtgtcatgtttgacattgaaatcgtaacttcgctcgtgaaattatgtcaaatatgcaaatcaaatccggaacaaatttaatgtacattcggtataccgaagcccatctacaggagctaggcgtgctccatgaagatgttccacatcaccagagttatgaaaacaattactcgtcgcgtcacccatatccatctatgcagttcaagcttggaatataattt

SEQ ID NO: 60362 - DNA, 1600 bp, Zea Mays
ctcaactgatgatgcccccctgttcctcctgtcatcttctcctcctcagaaacccaccaaccccgtccagccgccggctgtctcggccgccgccgccgccgccgccgccctatcccggtccttcaggcgaaccaggttggtcatggccttcaacaagatcaaggtctccaaccccgtcgtcgagatggacggcgatgagatgaccagggtgttctggaaatctatcaaggacaagcttatattccctttcgtagacctcgacatcaaatattttgacctcgggcttccacaccgtgatgctaccgacgacaaagtcacagtggaggctgcggaggccacactcaagtacaatgtggctatcaagtgtgccaccattacaccagatgaagcaagggtaaatgagtttggcttgaaggctatgtggaagagcccaaatggcacaattaggaatattctgaatggcactgtgttcagagaaccaatcatctgcaaaaacatcccacggcttgttccagggtggacaaaacccatttgcatcgggaggcatgcattcggtgatcagtaccgggcaactgatgcagttatcaaggggccagggaagcttaaattagtttttgagggaaaagaagagcaagttgagctggaggtgttcaacttcactggtgcaggaggagttgccttatcaatgtacaacactgacgagtccatccatgcctttgctgacgcttctatggccactgcttatgaaaagaaatggccattgtatcttagcaccaaaaacactattttgaagaaatatgatggcaggttcaaggacattttccaggaggtgtatgaagctggttggaaaaccaaatttgaagctgccggcatatggtatgagcaccgccttatcgatgacatggtagcatacgcacttaagagtgaaggagggtatgtctgggcttgcaagaattatgatggagatgtgcagagcgatttcttagctcaaggttttggctcattgggtttgatgacttcggtactggtgtgccctgatggaaagacgatcgaagctgaagctgcccatggtactgttacccgtcattaccgtgttcaccagaaaggaggtgaaactagtacgaacagtattgcctcaatctttgcgtggacaagaggacttgcacacagggcaaagcttgatgacaatgctagactacttgacttcacccagaagcttgaggctgcctgcgttggagccgtcgagtctgggaagatgaccaaggaccttgcccttctcgttcacggatcttcaaatatcacgaggagccattacctgaacacggaggagttcattgacgctgttgctgatgagctcagatcaaggctggcagccaactcgaacctttgaaatccttgccgaagttgtggctgcagcagtatgccaaatcattatcattaccgttaccattaccaattggagattgccgtagatttccgcgattatgggaactcatttacctgattatctgatacgtttgaaataaaaggtcgcccattagaatgatttctggttgtctcttcatctgtgcccgatttcgtgctagccattggatttttg

SEQ ID NO: 60363 - DNA, 1587 bp, Zea Mays
gcccccctgttcctcctgtcatcttctcctcctcagaaacccaccaaccccgtccagccgccggctgtctcggccgccgccgccgccgccgccgccctatcccggtccttcaggcgaaccaggttggtcatggccttcaacaagatcaaggtctccaaccccgtcgtcgagatggacggcgatgagatgaccagggtgttctggaaatctatcaaggacaaggtacaatgtggctatcaagtgtgccaccattacaccagatgaagcaagggtaaatgagtttggcttgaaggctatgtggaagagcccaaatggcacaattaggaatattctgaatggcactgtgttcagagaaccaatcatctgcaaaaacatcccacggcttgttccagggtggacaaaacccatttgcatcgggaggcatgcattcggtgatcagtaccgggcaactgatgcagttatcaaggggccagggaagcttaaattagtttttgagggaaaagaagagcaagttgagctggaggtgttcaacttcactggtgcaggaggagttgccttatcaatgtacaacactgacgagtccatccatgcctttgctgacgcttctatggccactgcttatgaaaagaaatggccattgtatcttagcaccaaaaacactattttgaagaaatatgatggcaggttcaaggacattttccaggaggtgtatgaagctggttggaaaaccaaatttgaagctgccggcatatggtatgagcaccgccttatcgatgacatggtagcatacgcacttaagagtgaaggagggtatgtctgggcttgcaagaattatgatggagatgtgcagagcgatttcttagctcaaggttttggctcattgggtttgatgacttcggtactggtgtgccctgatggaaagacgatcgaagctgaagctgcccatggtactgttacccgtcattaccgtgttcaccagaaaggaggtgaaactagtacgaacagtattgcctcaatctttgcgtggacaagaggacttgcacacagggcaaagcttgatgacaatgctagactacttgacttcacccagaagcttgaggctgcctgcgttggagccgtcgagtctgggaagatgaccaaggaccttgcccttctcgttcacggatcttcaaatatcacgaggagccattacctgaacacggaggagttcattgacgctgttgctgatgagctcagatcaaggctggcagccaactcgaacctttgaaatccttgccgaagttgtggtgctttcctgcgcgacgctttcgaaccgtttttattatgtcgccattttctttccctgtgccaccaccctgatgaatgaagaaggcctgagctaggcgaacatctgcaggctgcagcagtatgccaaatcattatcattaccgttaccattaccaattggagattgccgtagatttccgcgattatgggaactcatttacctgattatctgatacgtttgaaataaaaggtcgcccattagaatgatttctggttgtctcttcatctgtgcccgatttcgtgctagccattggatttttg

SEQ ID NO: 60364 - DNA, 1543 bp, Zea Mays
gcccccctgttcctcctgtcatcttctcctcctcagaaacccaccaaccccgtccagccgccggctgtctcggccgccgccgccgccgccgccgccctatcccggtccttcaggcgaaccaggttggtcatggccttcaacaagatcaaggtctccaaccccgtcgtcgagatggacggtacaatgtggctatcaagtgtgccaccattacaccagatgaagcaagggtaaatgagtttggcttgaaggctatgtggaagagcccaaatggcacaattaggaatattctgaatggcactgtgttcagagaaccaatcatctgcaaaaacatcccacggcttgttccagggtggacaaaacccatttgcatcgggaggcatgcattcggtgatcagtaccgggcaactgatgcagttatcaaggggccagggaagcttaaattagtttttgagggaaaagaagagcaagttgagctggaggtgttcaacttcactggtgcaggaggagttgccttatcaatgtacaacactgacgagtccatccatgcctttgctgacgcttctatggccactgcttatgaaaagaaatggccattgtatcttagcaccaaaaacactattttgaagaaatatgatggcaggttcaaggacattttccaggaggtgtatgaagctggttggaaaaccaaatttgaagctgccggcatatggtatgagcaccgccttatcgatgacatggtagcatacgcacttaagagtgaaggagggtatgtctgggcttgcaagaattatgatggagatgtgcagagcgatttcttagctcaaggttttggctcattgggtttgatgacttcggtactggtgtgccctgatggaaagacgatcgaagctgaagctgcccatggtactgttacccgtcattaccgtgttcaccagaaaggaggtgaaactagtacgaacagtattgcctcaatctttgcgtggacaagaggacttgcacacagggcaaagcttgatgacaatgctagactacttgacttcacccagaagcttgaggctgcctgcgttggagccgtcgagtctgggaagatgaccaaggaccttgcccttctcgttcacggatcttcaaatatcacgaggagccattacctgaacacggaggagttcattgacgctgttgctgatgagctcagatcaaggctggcagccaactcgaacctttgaaatccttgccgaagttgtggtgctttcctgcgcgacgctttcgaaccgtttttattatgtcgccattttctttccctgtgccaccaccctgatgaatgaagaaggcctgagctaggcgaacatctgcaggctgcagcagtatgccaaatcattatcattaccgttaccattaccaattggagattgccgtagatttccgcgattatgggaactcatttacctgattatctgatacgtttgaaataaaaggtcgcccattagaatgatttctggttgtctcttcatctgtgcccgatttcgtgctagccattggatttttg

SEQ ID NO: 60365 - DNA, 1332 bp, Zea Mays
caacccaaaccgcccgctactacgttacgttggcagcgcgaaaaaccaaaaaaacgtccaccacctccgtgcgcatgcaccggcgccaccgagccggcccgcctcagccgcacacctcactggcggggagccggggatcatgggggcagcagcggacgacgctgcgtcagtgcgggccgcggtgatgcggctcagcttcggcgcggcggcggaggagaggcgggacgccgcgggggaggtcgcgaggctggcgcgcgcggacgagcggaccaagcgcctcctgcccgagctcggcgtcctgcccccgctcctggacatgctgggcggcgcgggaccgggggcgcgcctggccgcggcgggggcgctgctggagctcgcccgagggacgcacaggttcgtcgaaataaggtgcgcatcgtgcaggccggcctgctcaagaagttgccggtggtcgcggacgacagggacgtgtgcagaagccaggagctggcgctgctgctcctgtccatctcgtcgctagccaacaccgacttcccgctccgcaccaccgagctcctcccgttcctcgtggccacgctgggagccaccgacgtcccgcccgacgcgaagctgccgtgcctggccgcgctccgcaacctgtcggcgaagctggagcacgcgcgcgacgtggcgtccagcggggccgtgcgcgcgctcctgccgctctcgctggagcccaagacgtcggagccggcgctggccgtcctcggggagctggcggcggcggcggggcgggaggcgatggaggcggagggcgaggcggtgccgcgggcgctcctggaggccatgacgcggcacgggagcgcgcggtgccaggagcgcgccacgtacctggccatggtgctcgcgcacggcagccgcgcgctgcggcgcgccatgcgccggctcggcgtcgtgcaggcgctcctggaggtctcgctactcagcagcagcccactcgcgcagcggagggcggccatcatcctgcgctggttcaaggaggatgggccgcagagcaggacgaccagggcgcattcggggcctcgcgtggagggagtggcagaggccacgtcgtgccgcgacgacgacgtagccggcgaggcgaagggttgccgggataccaccgtggacgagattgtgaggcggagcctggataggaacatgaagtctatactgaggagggccacggcgtccgtggacctgaccaatgttaaactgctcgttacgagctccagctctaagagcttgccttgctgaactcacaagtcacaatgacacaagtgctcagttttccctggagtattttgatcatcg

SEQ ID NO: 60366 - DNA, 1371 bp, Zea Mays
atgtcccagcacggcggcctcggcgacacggcccggcggtggcgcgagctccacggcgacggcggctgggcgggaatgctggacccgctggacctcgacctgcggcgcaccgtgctccgctacggcgagatggcgcaggcgacctacgacgccttcaaccgcgagcgggcgtcgccgcacgcggggctgtcccgcttcgccagggcgcacttcttcgaccgggtgcggctgccggcgcacgccgccgcgtaccgggtcaccaggttcctgtacgccacgtcgtcggtggccgtgccggacgccttcatcctcaggtccgtgtccaggtcgcgccggtgcagggagtccaactggatcggctacgtcgcggtggccaccgacgaagggaaggccgcgctcggccgccgcgacgtcgtggtcgcgtggcgcggcaccatgcgggcgctggagtgggccgacgacctcgagttccccatggtgccgacgggaggcctcctcggggacggcgacgccatggtgcaccgcggctggctgtccatgtacacctccagcgacccggcgtccagccacaaccaggacagcgcacggcatcaggcgctgggcgaggtgcggaggctggtggacgcgtacaggggcgaggagctgagcatcaccgtgacgggccacagcctcggcgcggcgctcgccacgctcaacgcgttcgacatcgccgccaacggctacaacgtggcggccacgggcgcggccgcctgcccggtgacctcgttcgcgttcgccagcccgcgcgtcggcggcggcggcttcaagaagcggttcgacgccgtcccggggctgcggctcctccgcgtccgcaacgcccgcgacgtggttcccaagtacccggtcgtgttctaccacgacgtaggcgcggagctcgcgatcgacacgggggagtcgccgtacctgagaagccccgggggcgagcagacctggcacaacctcgaggtgtacctgcacggcgtggcgggcacgcggggcgcgcgcggcgggttcgagctcgccgtggcgcgggacgtggcgctggtgaacaaggcgtacgacgccctgcgggaccaccacggggtgccgccagggtggtgggtgccgctcaacaggggaatggtggagggcgccgacgggcgctggagcttggtggattgcgaggaggacgaggatgatgagtagtagacagcagtctgagtaaacgcttggcatgctggcagtggcagcagacaacatcggtagctgctcttgtaggtttcgtttgtgcatgattattatgacgccatgtatgagacacaatcacaatcagaggatggtttatttataaatataactgactccccgtcacaa

SEQ ID NO: 60367 - DNA, 827 bp, Zea Mays
cccaggctgtgcccgcacaccgtgatgctcgtcacctcgtccttgtacagtgccaccagcctgctcacctccgccaggaccttttcaacatcacgagtatctttattcgaactgggatcgttgaggtgggtccaccaagatgtggcattttggtaatttattagttttattacatagtttattttgcattcaaataatataatgttcatatagtcgtaccacattgtgatgaatattgtacatgatcattaatgtcgtcaaacctacgatctaataaaattagccgggtttttttttattttcttttctcttctcttcagaaaagagcgtgcccgttctaagccaatgatcattaatgtcgtcaaactcctctttcgcatgagctaactcgttgcttaaatggatgcaagttctaagccagtgatcagttcctgacaagtaggagtaggtcattcatgcaacgtgtgcatatgatgtgtctagattctacagccacgaaatcttcaaggtgaacaatttccatcaatggatgatgaaccatcaggagcccttcaaatgttgacagaaattcaacgagaactttttttgaatgatttttaggtgaaggcaaagaactgggaaacggtcgacctagctcaacctcagcattcgatcagtcagtaagtgaaacctgcagggtatacgtagccaagagcccaagagcaagctaagaaaagcatgcaggtaacacttgcctggtctctggcgctggtctggttgtacttggagtccgggttgctggacgtgtacacggagaggaagccccggtgcaccaaggcgaacgggtt

SEQ ID NO: 60368 - DNA, 911 bp, Zea Mays
cttctgtttcacatcggcaaaaccactataaaaacggctaagagtgcaacaatgaaccgtttttaaaaaataaagagggcttaaaaactgatctaatggatgaagaggaatatcggcccaagcccaaacaataagctcacagtcatagacgtggtggccttgatagggcccaagtaataatataaccacgattcacggtctcccggttggattccccggcaagcggccgcgcccggagccggaacccaaccgacgagttcttccacccacgcgacggcgacactgccaccgcgctcggaggcgctgaagccagccgagaggcggggcccggccccccggcgactagtaggcagccacagccaaccactcgaagtgttcggttccacttccacgttcagggaggaaagaacgcctcttcgtggctgctgctttggcccggccgtgaagtacagagcgaaagacttgtggcttggaagccggtaggcccatttgctatgcacgggatgacgagaatgggtggtgctggcctgctgggtatcacaagaaaaatgacgaggggagttatcaggctcacaggatggagcatgtcgttaccctgacatggatcagtctagatttgtttcatccaaagcaatactggatttttttttcttgtttcactgtatacgctggaaaactaggacagattttgactgggcgtaattggaataactgacctagttaactgctactgcctctttcctgaattataaggtgttctagaggcgcatagaaagagctaaaagcctaaacatcttataatttagaactcatggcactatttacctccggtttaaattcaaatactgttttattatattagaagaatattttgttgcataaactgaattgcttgccatggtaggcgcgct

SEQ ID NO: 60369 - DNA, 1184 bp, Zea Mays
cttctgtttcacatcggcaaaaccactataaaaacggctaagagtgcaacaatgaaccgtttttaaaaaataaagagggcttaaaaactgatctaatggatgaagaggaatatcggcccaagcccaaacaataagctcacagtcatagacgtggtggccttgatagggcccaagtaataatataaccacgattcacggtctcccggttggattccccggcaagcggccgcgcccggagccggaacccaaccgacgagttcttccacccacgcgacggcgacactgccaccgcgctcggaggcgctgaagccagccgagaggcggggcccggccccccggcgactagtaggcagccacagccaaccactcgaagtgttcggttccacttccacgttcagtctgaaaacagggacccttgaatgaagaattcaaatgaagagaagaaacctaaggaaaggagagcagaacaagattggtacctttgctgtgcctggccccactgttagctctctgaagagttaaagctgcgacggaggctacaacgacaaagcctaatctcacaagcatgactccgttcactcatcactctgctggcctcaaccggcaggagggccgagacggggagccccctctactcatcaaaaaatggtgacccggagttagagcagcagggaggaaagaacgcctcttcgtggctgctgctttggcccggccgtgaagtacagagcgaaagacttgtggcttggaagccggtaggcccatttgctatgcacgggatgacgagaatgggtggtgctggcctgctgggtatcacaagaaaaatgacgaggggagttatcaggctcacaggatggagcatgtcgttaccctgacatggatcagtctagatttgtttcatccaaagcaatactggatttttttttcttgtttcactgtatacgctggaaaactaggacagattttgactgggcgtaattggaataactgacctagttaactgctactgcctctttcctgaattataaggtgttctagaggcgcatagaaagagctaaaagcctaaacatcttataatttagaactcatggcactatttacctccggtttaaattcaaatactgttttattatattagaagaatattttgttgcataaactgaattgcttgccatggtaggcgcgct

SEQ ID NO: 60370 - DNA, 819 bp, Zea Mays
ctcgtcgccgcaacatcgaccttctccgtccagtctgaaaacagggacccttgaatgaagaattcaaatgaagagaagaaacctaaggaaaggagagcagaacaagattggtacctttgctgtgcctggccccactgttagctctctgaagagttaaagctgcgacggaggctacaacgacaaagcctaatctcacaagcatgactccgttcactcatcactctgctggcctcaaccggcaggagggccgagacggggagccccctctactcatcaaaaaatggtgacccggagttagagcagcagggaggaaagaacgcctcttcgtggctgctgctttggcccggccgtgaagtacagagcgaaagacttgtggcttggaagccggtaggcccatttgctatgcacgggatgacgagaatgggtggtgctggcctgctgggtatcacaagaaaaatgacgaggggagttatcaggctcacaggatggagcatgtcgttaccctgacatggatcagtctagatttgtttcatccaaagcaatactggatttttttttcttgtttcactgtatacgctggaaaactaggacagattttgactgggcgtaattggaataactgacctagttaactgctactgcctctttcctgaattataaggtgttctagaggcgcatagaaagagctaaaagcctaaacatcttataatttagaactcatggcactatttacctccggtttaaattcaaatactgttttattatattagaagaatattttgttgcataaactgaattgcttgccatggtaggcgcgct

SEQ ID NO: 60371 - DNA, 1916 bp, Zea Mays
ttgtcgtaccactcaactgtttgcgctttacggaaacaatcgaatctgaattcttcaccgagtatggtgaggcaagccggtatcaggtcagtgaagtcattggcaaagggagctatggtgttgtggctgctgccgtcgacacccagactggtgagcgtgtggctatcaagaagatcgttgatgtctttgatcacgtctccgatgcaactcgcatccttagggagatcaagttgctccggttgctgcgtcacccagacttagttgagatcaaacacattatgcttcctccttcgaggagggaatttagggatatctatgtgatctttgagttgatggagtcggatctccatcaagtaataaaagcaaacgatgatctcacagcagagcatcaccagttcttcttgtaccagctgctccgtgggatgaagtacatccatgcagcaagcgtcttccatcgggatcttaagcccaagaatattctagccaatgctgactgcaagctgaagatttgtgattttggccttgcccgcgtttcattcaatgacactccatcagccatattctggacggattacgtggccactagatggtatcgagctccagaattatgtggctcctttttttcaaagtacactcctgccattgatatttggagcgtagggtgtatatttgctgaattgctcacagggaagccactctttccagggaagaatgttgtgcatcagttggatcttatgactgatctacttggtacaccttcagcagagtctatctccaagataaggaatgagaaagctcgacgatacatgaacaatatgaggaaaaagcctcgggttccctttactaaaaagtttccagggatagatcctatggctctccatttgcttgaacgtcttcttgcttttgatcctaaggaacgaccaagtgctgctgaggccctggcagatccatactttaatggattagcaaataatgaacgtgaacccatagcacaacctatctcaaaacttgaatttgagtttgagaagcggaaactggccaaagatgatgtccgagaattgatttaccgagagattttggagtaccatcctcaaatgctacaagaatacctacaaggagcagaccacaatcagatgaccttcatgtatccaagtggggtggatcgcttcaggcgccaatttgctcatttggaagaaggtactgcaaagggtgaaaaacacagtccacagctgcgacagaatgtttctttgccaagggaaagagtaattggcaataaacatggagatggcaatacaggtgataagctagcgcatgcctcagtgacggatggcatcagccaaccgagcttgagtgagagaagctttctgaagagtgaaagcatcagtgcttccaagtgtataggtgaaaaaccgaagcatgtcaaagatggagaatctgttttagagagcgtggatgaaacagtcgatgatttgtcgaagaaaattcctcaactgaaaacctgatttttctcaagttcactggagcaatgaatagctcgtagtatggcacgttaggttctcaagacgatggacctacggcaaaggtctatagccaatgagaccacaagttctaatgccagtaattctgttgtgatgtaaatttcctcccatttgtgtttgtacttcgcgactgcaaacaacctgtttctgactaaatggctcgtgttttcctccgtggagccatcaccatattctgtaaattttcagttggaagtgaatcttcagctgcagaggcatatttgattttcccccagcaagtaggcctaggcattcagttaattctgtaaagttggttatggaaattttcagttttgacaaaatgttaactgaatttgctaccaaatactccattctaaattacaagacattttgattttg

SEQ ID NO: 60372 - DNA, 1165 bp, Zea Mays
caggcagtactctgtttcagatttttagataaggaatgagaaagctcgacgatacatgaacaatatgaggaaaaagcctcgggttccctttactaaaaagtttccagggatagatcctatggctctccatttgcttgaacgtcttcttgcttttgatcctaaggaacgaccaagtgctgctgaggccctggcagatccatactttaatggattagcaaataatgaacgtgaacccatagcacaacctatctcaaaacttgaatttgagtttgagaagcggaaactggccaaagatgatgtccgagaattgatttaccgagagattttggagtaccatcctcaaatgctacaagaatacctacaaggagcagaccacaatcagatgaccttcatgtatccaagtggggtggatcgcttcaggcgccaatttgctcatttggaagaaggtactgcaaagggtgaaaaacacagtccacagctgcgacagaatgtttctttgccaagggaaagagtaattggcaataaacatggagatggcaatacaggtgataagctagcgcatgcctcagtgacggatggcatcagccaaccgagcttgagtgagagaagctttctgaagagtgaaagcatcagtgcttccaagtgtataggtgaaaaaccgaagcatgtcaaagatggagaatctgttttagagagcgtggatgaaacagtcgatgatttgtcgaagaaaattcctcaactgaaaacctgatttttctcaagttcactggagcaatgaatagctcgtagtatggcacgttaggttctcaagacgatggacctacggcaaaggtctatagccaatgagaccacaagttctaatgccagtaattctgttgtgatgtaaatttcctcccatttgtgtttgtacttcgcgactgcaaacaacctgtttctgactaaatggctcgtgttttcctccgtggagccatcaccatattctgtaaattttcagttggaagtgaatcttcagctgcagaggcatatttgattttcccccagcaagtaggcctaggcattcagttaattctgtaaagttggttatggaaattttcagttttgacaaaatgttaactgaatttgctaccaaatactccattctaaattacaagacattttgattttg

SEQ ID NO: 60373 - DNA, 1031 bp, Zea Mays
cagtgcacaagagtgtgtccacgtcagctaaaaatcggtgttcatccgatactacatcaacggctgaggaagcacctcgtggcaacgcaactgaaacataggtgggaaaagactgtctcccgcagcggctgttcagcttgctttcctcacgcggctggagacttctaggctgcttccatatgcgtgcgagtgccagccgttacggagcaaaaaagctttgccagccttaccgtccctacggcacgacgtctctaacgtcggcgaccgcgacgacgacgcccccgcgtatcccctcctcgcgtgctccgttcgcaaacgctgcctccatctcctgcagcttgatgcaatatccgacgacaaagaaaaaggttcaagcaaggacccttgcgcatcagtgaagaaacggacaataaaatcttccaagaactaaaagattccctcgtatcaccgccagtcttttgagttgagggatatttattttgtattatctatgtaatgatatgtatatatgtttttttaaaacaatttgtttaaatataacaaactaactccagatattgcaacagacatattaacccttggtatgtctcacctaactttattttagataaacctatctattctagactctactcatatgttctgtgtttggtgtgagtatattaattacaataagtacaaatagtttgcttacaatcaatataacatatttaatattaaaattacaaaacatttgtgttatgctgtaaatagattatattgaacaaacctattcacttattgtaaacagattcatcttgtccctgtattacaatatttagcaaattaaataaactaaaaatgttacagtttgtttaacctgtaaacagattttcatatcgctttttgcaccaaatttgtttcctcattaattcaaaggtccatatacactaaaattatttttcccttaattcaaagagacttagttctcttgtgttttttgggaaaacaaagatgtctaaaattttgcacttcgtttgccaggactgttt

SEQ ID NO: 60374 - DNA, 851 bp, Zea Mays
cgcggctggagacttctaggctgcttccatatgcgtgcgagtgccagccgttacggagcaaaaaagctttgccagccttaccgtccctacggcacgacgtctctaacgtcggcgaccgcgacgacgacgcccccgcgtatcccctcctcgcgtgctccgttcgcaaacgctgcctccatctcctgcaggttcaagcaaggacccttgcgcatcagtgaagaaacggacaataaaatcttccaagaactaaaagattccctcgtatcaccgccagtcttttgagttgagggatatttattttgtattatctatgtaatgatatgtatatatgtttttttaaaacaatttgtttaaatataacaaactaactccagatattgcaacagacatattaacccttggtatgtctcacctaactttattttagataaacctatctattctagactctactcatatgttctgtgtttggtgtgagtatattaattacaataagtacaaatagtttgcttacaatcaatataacatatttaatattaaaattacaaaacatttgtgttatgctgtaaatagattatattgaacaaacctattcacttattgtaaacagattcatcttgtccctgtattacaatatttagcaaattaaataaactaaaaatgttacagtttgtttaacctgtaaacagattttcatatcgctttttgcaccaaatttgtttcctcattaattcaaaggtccatatacactaaaattatttttcccttaattcaaagagacttagttctcttgtgttttttgggaaaacaaagatgtctaaaattttgcacttcgtttgccaggactgttt

SEQ ID NO: 60375 - DNA, 2122 bp, Zea Mays
ctccttcaagcttagcggtaagatcgtacgtctggaaatagcccatacaatctgaagcccgtacaaaatagcccagcaagagaaataaaggccgaaacggcccatttgtctaggtgtctcgtctctaggccctggccgctaattgagcacacgttcgtcttcctccttccgtcccccggcgtccttatccccacacaagcgccgcttaccgccgggacaggactgttggaagtccccagacggcagcgatggcggaactatcgacatcttcggatggattggtggacgaagaagcgaggcagcaggaaccaggttcaatttggcaagggatgctcctgtagtcctgttctctttggcttttatatgctaattgcttgtgctgctaaccgttagggtttcatcgccttgcctgttcgaagggttaggggttcctactgtccaaattcacctgatccaacctcgtccgttcataccgtttcctgatacgtactacaccacatcccggagatgtgttcactttcaattttgaaggcctgtactgtactgtaccctagttactaaaccttgggtttccctcgtctctcgcttcatttaggatacgtacgacgcttaagtcattcagatcggctaacctatccggtggaatgagtactgtctgcgaatctacatcatgcctttgtgaattttccttcaactttagtagtattattaaattatacccgttttgagcccatacgcttaaaagaggggaaacagtaatattatagctttaacgaacacacgattggagtgtcaagcatggatcatatttcctctgttcctgtttatatagtaccatccgtgatgccgttatagtatttatggaagtcaaactttttttgctggactgcatacaggacaaggaagcgctgaaggtagccatggtctgcaagacacaaaggagcaggacataaaaaagggaaaggcggctcttgtttccactgaactgctgagggaggatctggttcagagtgctgttagttttctgaaacacccgaaagtagtagcctcttcagatggacagaggcgatctttccttgtaaataaaggactcaccatggatgaaatagatgaagcatttcgacgtctacaaagcccgtcatcgaattctgcgagctcaaatatgtgcacatctcaaggattactgaggtcagcacaaactacaaataatagtattggccaggcatgactggtatctatgctgcaaattttaagctactgccattttcttcaatgcagcaggaaattaaagtcgatagaaagtgtatgaatggtttagtcattttggctttttaggtatgtagattttgctgtgcacctaactctaagcctagacacatagtaaaaacaatatatctagaaaagccaaaatgacttacaatttgaaaaaggagggagtactttcatttatagagagggtggaacctgaagctggacctgtggcccctgtggtacctcgtcatccaaaatcatatatggagatcatggaaatgatacaaaggggtgagcggccagacgatatacaggatattaacgatgaccctccaaatcctgatcaaccaatctcagaacctcgtatggcaccgaaaccaaagccatgggaaaagcaaggtcaagggagtttggcctgtgatttgaaatcgctgccaagggaatccgacgtgctgaggtcagaagttcagcacgacgacggcaccaaccaggttacggagtccgccgatggcgccaaccaagcggactcattgctgcaggcaggcgtagctgctggatctgaatctcctggggttccagatgacgccgcttcttcgcttgagtaaccaccgcgaaaataaatgaatgacgccgtaatcagacgcgaaaacaaacgacctcattaccacaacactgttctgatatttttgggtcctgagagagccacttgagttcacaataaatgtagtacccatcactggatgatcttttttagttgctggaaccatatgatatgagcattgttggcacttgctctcagcagcaaggaagccaacaagggtgaacggtggtgacaacagggttacgcgcacgggggcaatagctctgttga

SEQ ID NO: 60376 - DNA, 2039 bp, Zea Mays
cgaaacggcccatttgtctaggtgtctcgtctctaggccctggccgctaattgagcacacgttcgtcttcctccttccgtcccccggcgtccttatccccacacaagcgccgcttaccgccgggacaggactgttggaagtccccagacggcagcgatggcggaactatcgacatcttcggatggattggtggacgaagaagcgaggcagcaggaaccaggttcaatttggcaagggatgctcctgtagtcctgttctctttggcttttatatgctaattgcttgtgctgctaaccgttagggtttcatcgccttgcctgttcgaagggttaggggttcctactgtccaaattcacctgatccaacctcgtccgttcataccgtttcctgatacgtactacaccacatcccggagatgtgttcactttcaattttgaaggcctgtactgtactgtaccctagttactaaaccttgggtttccctcgtctctcgcttcatttaggatacgtacgacgcttaagtcattcagatcggctaacctatccggtggaatgagtactgtctgcgaatctacatcatgcctttgtgaattttccttcaactttagtagtattattaaattatacccgttttgagcccatacgcttaaaagaggggaaacagtaatattatagctttaacgaacacacgattggagtgtcaagcatggatcatatttcctctgttcctgtttatatagtaccatccgtgatgccgttatagtatttatggaagtcaaactttttttgctggactgcatacaggacaaggaagcgctgaaggtagccatggtctgcaagacacaaaggagcaggacataaaaaagggaaaggcggctcttgtttccactgaactgctgagggaggatctggttcagagtgctgttagttttctgaaacacccgaaagtagtagcctcttcagatggacagaggcgatctttccttgtaaataaaggactcaccatggatgaaatagatgaagcatttcgacgtctacaaagcccgtcatcgaattctgcgagctcaaatatgtgcacatctcaagagtttcagacctaaatggcttcatcatgacaaatctaacttagtaacttcattgccttattattgcctgcattttgtcaggggtgtttgatcattcatgcaggattactgaggaaattaaagtcgatagaaagtgtatgaatggtttagtcattttggctttttaggtatgtagattttgctgtgcacctaactctaagcctagacacatagtaaaaacaatatatctagaaaagccaaaatgacttacaatttgaaaaaggagggagtactttcatttatagagagggtggaacctgaagctggacctgtggcccctgtggtacctcgtcatccaaaatcatatatggagatcatggaaatgatacaaaggggtgagcggccagacgatatacaggatattaacgatgaccctccaaatcctgatcaaccaatctcagaacctcgtatggcaccgaaaccaaagccatgggaaaagcaaggtcaagggagtttggcctgtgatttgaaatcgctgccaagggaatccgacgtgctgaggtcagaagttcagcacgacgacggcaccaaccaggttacggagtccgccgatggcgccaaccaagcggactcattgctgcaggcaggcgtagctgctggatctgaatctcctggggttccagatgacgccgcttcttcgcttgagtaaccaccgcgaaaataaatgaatgacgccgtaatcagacgcgaaaacaaacgacctcattaccacaacactgttctgatatttttgggtcctgagagagccacttgagttcacaataaatgtagtacccatcactggatgatcttttttagttgctggaaccatatgatatgagcattgttggcacttgctctcagcagcaaggaagccaacaagggtgaacggtggtgacaacagggttacgcgcacgggggcaatagctctgttga

SEQ ID NO: 60377 - DNA, 1864 bp, Zea Mays
ctaggtgtctcgtctctaggccctggccgctaattgagcacacgttcgtcttcctccttccgtcccccggcgtccttatccccacacaagcgccgcttaccgccgggacaggactgttggaagtccccagacggcagcgatggcggaactatcgacatcttcggatggattggtggacgaagaagcgaggcagcaggaaccagggtttcatcgccttgcctgttcgaagggttaggggttcctactgtccaaattcacctgatccaacctcgtccgttcataccgtttcctgatacgtactacaccacatcccggagatgtgttcactttcaattttgaaggcctgtactgtactgtaccctagttactaaaccttgggtttccctcgtctctcgcttcatttaggatacgtacgacgcttaagtcattcagatcggctaacctatccggtggaatgagtactgtctgcgaatctacatcatgcctttgtgaattttccttcaactttagtagtattattaaattatacccgttttgagcccatacgcttaaaagaggggaaacagtaatattatagctttaacgaacacacgattggagtgtcaagcatggatcatatttcctctgttcctgtttatatagtaccatccgtgatgccgttatagtatttatggaagtcaaactttttttgctggactgcatacaggacaaggaagcgctgaaggtagccatggtctgcaagacacaaaggagcaggacataaaaaagggaaaggcggctcttgtttccactgaactgctgagggaggatctggttcagagtgctgttagttttctgaaacacccgaaagtagtagcctcttcagatggacagaggcgatctttccttgtaaataaaggactcaccatggatgaaatagatgaagcatttcgacgtctacaaagcccgtcatcgaattctgcgagctcaaatatgtgcacatctcaaggggtgtttgatcattcatgcaggattactgagcaggaaattaaagtcgatagaaagtgtatgaatggtttagtcattttggctttttaggtatgtagattttgctgtgcacctaactctaagcctagacacatagtaaaaacaatatatctagaaaagccaaaatgacttacaatttgaaaaaggagggagtactttcatttatagagagggtggaacctgaagctggacctgtggcccctgtggtacctcgtcatccaaaatcatatatggagatcatggaaatgatacaaaggggtgagcggccagacgatatacaggatattaacgatgaccctccaaatcctgatcaaccaatctcagaacctcgtatggcaccgaaaccaaagccatgggaaaagcaaggtcaagggagtttggcctgtgatttgaaatcgctgccaagggaatccgacgtgctgaggtcagaagttcagcacgacgacggcaccaaccaggttacggagtccgccgatggcgccaaccaagcggactcattgctgcaggcaggcgtagctgctggatctgaatctcctggggttccagatgacgccgcttcttcgcttgagtaaccaccgcgaaaataaatgaatgacgccgtaatcagacgcgaaaacaaacgacctcattaccacaacactgttctgatatttttgggtcctgagagagccacttgagttcacaataaatgtagtacccatcactggatgatcttttttagttgctggaaccatatgatatgagcattgttggcacttgctctcagcagcaaggaagccaacaagggtgaacggtggtgacaacagggttacgcgcacgggggcaatagctctgttga

SEQ ID NO: 60378 - DNA, 1426 bp, Zea Mays
ggtgtctcgtctctaggccctggccgctaattgagcacacgttcgtcttcctccttccgtcccccggcgtccttatccccacacaagcgccgcttaccgccgggacaggactgttggaagtccccagacggcagcgatggcggaactatcgacatcttcggatggattggtggacgaagaagcgaggcagcaggaaccaggacaaggaagcgctgaaggtagccatggtctgcaagacacaaaggagcaggacataaaaaagggaaaggcggctcttgtttccactgaactgctgagggaggatctggttcagagtgctgttagttttctgaaacacccgaaagtagtagcctcttcagatggacagaggcgatctttccttgtaaataaaggactcaccatggatgaaatagatgaagcatttcgacgtctacaaagcccgtcatcgaattctgcgagctcaaatatgtgcacatctcaaggattactgaggtcagcacaaactacaaataatagtattggccaggcatgactggtatctatgctgcaaattttaagctactgccattttcttcaatgcagcaggaaattaaagtcgatagaaagtgtatgaatggtttagtcattttggctttttaggtatgtagattttgctgtgcacctaactctaagcctagacacatagtaaaaacaatatatctagaaaagccaaaatgacttacaatttgaaaaaggagggagtactttcatttatagagagggtggaacctgaagctggacctgtggcccctgtggtacctcgtcatccaaaatcatatatggagatcatggaaatgatacaaaggggtgagcggccagacgatatacaggatattaacgatgaccctccaaatcctgatcaaccaatctcagaacctcgtatggcaccgaaaccaaagccatgggaaaagcaaggtcaagggagtttggcctgtgatttgaaatcgctgccaagggaatccgacgtgctgaggtcagaagttcagcacgacgacggcaccaaccaggttacggagtccgccgatggcgccaaccaagcggactcattgctgcaggcaggcgtagctgctggatctgaatctcctggggttccagatgacgccgcttcttcgcttgagtaaccaccgcgaaaataaatgaatgacgccgtaatcagacgcgaaaacaaacgacctcattaccacaacactgttctgatatttttgggtcctgagagagccacttgagttcacaataaatgtagtacccatcactggatgatcttttttagttgctggaaccatatgatatgagcattgttggcacttgctctcagcagcaaggaagccaacaagggtgaacggtggtgacaacagggttacgcgcacgggggcaatagctctgttga

SEQ ID NO: 60379 - DNA, 1803 bp, Zea Mays
ctcgtctctaggccctggccgctaattgagcacacgttcgtcttcctccttccgtcccccggcgtccttatccccacacaagcgccgcttaccgccgggacaggactgttggaagtccccagacggcagcgatggcggaactatcgacatcttcggatggattggtggacgaagaagcgaggcagcaggaaccaggttcaatttggcaagggatgctcctgtagtcctgttctctttggcttttatatgctaattgcttgtgctgctaaccgttagggtttcatcgccttgcctgttcgaagggttaggggttcctactgtccaaattcacctgatccaacctcgtccgttcataccgtttcctgatacgtactacaccacatcccggagatgtgttcactttcaattttgaaggcctgtactgtactgtaccctagttactaaaccttgggtttccctcgtctctcgcttcatttaggatacgtacgacgcttaagtcattcagatcggctaacctatccggtggaatgagtactgtctgcgaatctacatcatgcctttgtgaattttccttcaactttagtagtattattaaattatacccgttttgagcccatacgcttaaaagaggggaaacagtaatattatagctttaacgaacacacgattggagtgtcaagcatggatcatatttcctctgttcctgtttatatagtaccatccgtgatgccgttatagtatttatggaagtcaaactttttttgctggactgcatacaggacaaggaagcgctgaaggtagccatggtctgcaagacacaaaggagcaggacataaaaaagggaaaggcggctcttgtttccactgaactgctgagggaggatctggttcagagtgctgttagttttctgaaacacccgaaagtagtagcctcttcagatggacagaggcgatctttccttgtaaataaaggactcaccatggatgaaatagatgaagcatttcgacgtctacaaagcccgtcatcgaattctgcgagctcaaatatgtgcacatctcaaggggtgtttgatcattcatgcaggattactgagcaggaaattaaagtcgatagaaagtgtatgaatggtttagagagggtggaacctgaagctggacctgtggcccctgtggtacctcgtcatccaaaatcatatatggagatcatggaaatgatacaaaggggtgagcggccagacgatatacaggatattaacgatgaccctccaaatcctgatcaaccaatctcagaacctcgtatggcaccgaaaccaaagccatgggaaaagcaaggtcaagggagtttggcctgtgatttgaaatcgctgccaagggaatccgacgtgctgaggtcagaagttcagcacgacgacggcaccaaccaggttacggagtccgccgatggcgccaaccaagcggactcattgctgcaggcaggcgtagctgctggatctgaatctcctggggttccagatgacgccgcttcttcgcttgagtaaccaccgcgaaaataaatgaatgacgccgtaatcagacgcgaaaacaaacgacctcattaccacaacactgttctgatatttttgggtcctgagagagccacttgagttcacaataaatgtagtacccatcactggatgatcttttttagttgctggaaccatatgatatgagcattgttggcacttgctctcagcagcaaggaagccaacaagggtgaacggtggtgacaacagggttacgcgcacgggggcaatagctctgttga

SEQ ID NO: 60380 - DNA, 1865 bp, Zea Mays
ctcgtctctaggccctggccgctaattgagcacacgttcgtcttcctccttccgtcccccggcgtccttatccccacacaagcgccgcttaccgccgggacaggactgttggaagtccccagacggcagcgatggcggaactatcgacatcttcggatggattggtggacgaagaagcgaggcagcaggaaccaggttcaatttggcaagggatgctcctgtagtcctgttctctttggcttttatatgctaattgcttgtgctgctaaccgttagggtttcatcgccttgcctgttcgaagggttaggggttcctactgtccaaattcacctgatccaacctcgtccgttcataccgtttcctgatacgtactacaccacatcccggagatgtgttcactttcaattttgaaggcctgtactgtactgtaccctagttactaaaccttgggtttccctcgtctctcgcttcatttaggatacgtacgacgcttaagtcattcagatcggctaacctatccggtggaatgagtactgtctgcgaatctacatcatgcctttgtgaattttccttcaactttagtagtattattaaattatacccgttttgagcccatacgcttaaaagaggggaaacagtaatattatagctttaacgaacacacgattggagtgtcaagcatggatcatatttcctctgttcctgtttatatagtaccatccgtgatgccgttatagtatttatggaagtcaaactttttttgctggactgcatacaggacaaggaagcgctgaaggtagccatggtctgcaagacacaaaggagcaggacataaaaaagggaaaggcggctcttgtttccactgaactgctgagggaggatctggttcagagtgctgttagttttctgaaacacccgaaagtagtagcctcttcagatggacagaggcgatctttccttgtaaataaaggactcaccatggatgaaatagatgaagcatttcgacgtctacaaagcccgtcatcgaattctgcgagctcaaatatgtgcacatctcaagtcattttggctttttaggtatgtagattttgctgtgcacctaactctaagcctagacacatagtaaaaacaatatatctagaaaagccaaaatgacttacaatttgaaaaaggagggagtactttcatttatagagagggtggaacctgaagctggacctgtggcccctgtggtacctcgtcatccaaaatcatatatggagatcatggaaatgatacaaaggggtgagcggccagacgatatacaggatattaacgatgaccctccaaatcctgatcaaccaatctcagaacctcgtatggcaccgaaaccaaagccatgggaaaagcaaggtcaagggagtttggcctgtgatttgaaatcgctgccaagggaatccgacgtgctgaggtcagaagttcagcacgacgacggcaccaaccaggttacggagtccgccgatggcgccaaccaagcggactcattgctgcaggcaggcgtagctgctggatctgaatctcctggggttccagatgacgccgcttcttcgcttgagtaaccaccgcgaaaataaatgaatgacgccgtaatcagacgcgaaaacaaacgacctcattaccacaacactgttctgatatttttgggtcctgagagagccacttgagttcacaataaatgtagtacccatcactggatgatcttttttagttgctggaaccatatgatatgagcattgttggcacttgctctcagcagcaaggaagccaacaagggtgaacggtggtgacaacagggttacgcgcacgggggcaatagctctgttga

SEQ ID NO: 60381 - DNA, 1287 bp, Zea Mays
ctcgtctctaggccctggccgctaattgagcacacgttcgtcttcctccttccgtcccccggcgtccttatccccacacaagcgccgcttaccgccgggacaggactgttggaagtccccagacggcagcgatggcggaactatcgacatcttcggatggattggtggacgaagaagcgaggcagcaggaaccaggacaaggaagcgctgaaggtagccatggtctgcaagacacaaaggagcaggacataaaaaagggaaaggcggctcttgtttccactgaactgctgagggaggatctggttcagagtgctgttagttttctgaaacacccgaaagtagtagcctcttcagatggacagaggcgatctttccttgtaaataaaggactcaccatggatgaaatagatgaagcatttcgacgtctacaaagcccgtcatcgaattctgcgagctcaaatatgtgcacatctcaaggattactgaggtcagcacaaactacaaataatagtattggccaggcatgactggtatctatgctgcaaattttaagctactgccattttcttcaatgcagcaggaaattaaagtcgatagaaagtgtatgaatggtttagagagggtggaacctgaagctggacctgtggcccctgtggtacctcgtcatccaaaatcatatatggagatcatggaaatgatacaaaggggtgagcggccagacgatatacaggatattaacgatgaccctccaaatcctgatcaaccaatctcagaacctcgtatggcaccgaaaccaaagccatgggaaaagcaaggtcaagggagtttggcctgtgatttgaaatcgctgccaagggaatccgacgtgctgaggtcagaagttcagcacgacgacggcaccaaccaggttacggagtccgccgatggcgccaaccaagcggactcattgctgcaggcaggcgtagctgctggatctgaatctcctggggttccagatgacgccgcttcttcgcttgagtaaccaccgcgaaaataaatgaatgacgccgtaatcagacgcgaaaacaaacgacctcattaccacaacactgttctgatatttttgggtcctgagagagccacttgagttcacaataaatgtagtacccatcactggatgatcttttttagttgctggaaccatatgatatgagcattgttggcacttgctctcagcagcaaggaagccaacaagggtgaacggtggtgacaacagggttacgcgcacgggggcaatagctctgttga

SEQ ID NO: 60382 - DNA, 1350 bp, Zea Mays
ctcgtctctaggccctggccgctaattgagcacacgttcgtcttcctccttccgtcccccggcgtccttatccccacacaagcgccgcttaccgccgggacaggactgttggaagtccccagacggcagcgatggcggaactatcgacatcttcggatggattggtggacgaagaagcgaggcagcaggaaccaggacaaggaagcgctgaaggtagccatggtctgcaagacacaaaggagcaggacataaaaaagggaaaggcggctcttgtttccactgaactgctgagggaggatctggttcagagtgctgttagttttctgaaacacccgaaagtagtagcctcttcagatggacagaggcgatctttccttgtaaataaaggactcaccatggatgaaatagatgaagcatttcgacgtctacaaagcccgtcatcgaattctgcgagctcaaatatgtgcacatctcaaggggtgtttgatcattcatgcaggattactgaggaaattaaagtcgatagaaagtgtatgaatggtttagtcattttggctttttaggtatgtagattttgctgtgcacctaactctaagcctagacacatagtaaaaacaatatatctagaaaagccaaaatgacttacaatttgaaaaaggagggagtactttcatttatagagagggtggaacctgaagctggacctgtggcccctgtggtacctcgtcatccaaaatcatatatggagatcatggaaatgatacaaaggggtgagcggccagacgatatacaggatattaacgatgaccctccaaatcctgatcaaccaatctcagaacctcgtatggcaccgaaaccaaagccatgggaaaagcaaggtcaagggagtttggcctgtgatttgaaatcgctgccaagggaatccgacgtgctgaggtcagaagttcagcacgacgacggcaccaaccaggttacggagtccgccgatggcgccaaccaagcggactcattgctgcaggcaggcgtagctgctggatctgaatctcctggggttccagatgacgccgcttcttcgcttgagtaaccaccgcgaaaataaatgaatgacgccgtaatcagacgcgaaaacaaacgacctcattaccacaacactgttctgatatttttgggtcctgagagagccacttgagttcacaataaatgtagtacccatcactggatgatcttttttagttgctggaaccatatgatatgagcattgttggcacttgctctcagcagcaaggaagccaacaagggtgaacggtggtgacaacagggttacgcgcacgggggcaatagctctgttga

SEQ ID NO: 60383 - DNA, 1853 bp, Zea Mays
ctcgtctctaggccctggccgctaattgagcacacgttcgtcttcctccttccgtcccccggcgtccttatccccacacaagcgccgcttaccgccgggacaggactgttggaagtccccagacggcagcgatggcggaactatcgacatcttcggatggattggtggacgaagaagcgaggcagcaggaaccagggtttcatcgccttgcctgttcgaagggttaggggttcctactgtccaaattcacctgatccaacctcgtccgttcataccgtttcctgatacgtactacaccacatcccggagatgtgttcactttcaattttgaaggcctgtactgtactgtaccctagttactaaaccttgggtttccctcgtctctcgcttcatttaggatacgtacgacgcttaagtcattcagatcggctaacctatccggtggaatgagtactgtctgcgaatctacatcatgcctttgtgaattttccttcaactttagtagtattattaaattatacccgttttgagcccatacgcttaaaagaggggaaacagtaatattatagctttaacgaacacacgattggagtgtcaagcatggatcatatttcctctgttcctgtttatatagtaccatccgtgatgccgttatagtatttatggaagtcaaactttttttgctggactgcatacaggacaaggaagcgctgaaggtagccatggtctgcaagacacaaaggagcaggacataaaaaagggaaaggcggctcttgtttccactgaactgctgagggaggatctggttcagagtgctgttagttttctgaaacacccgaaagtagtagcctcttcagatggacagaggcgatctttccttgtaaataaaggactcaccatggatgaaatagatgaagcatttcgacgtctacaaagcccgtcatcgaattctgcgagctcaaatatgtgcacatctcaaggggtgtttgatcattcatgcaggattactgaggaaattaaagtcgatagaaagtgtatgaatggtttagtcattttggctttttaggtatgtagattttgctgtgcacctaactctaagcctagacacatagtaaaaacaatatatctagaaaagccaaaatgacttacaatttgaaaaaggagggagtactttcatttatagagagggtggaacctgaagctggacctgtggcccctgtggtacctcgtcatccaaaatcatatatggagatcatggaaatgatacaaaggggtgagcggccagacgatatacaggatattaacgatgaccctccaaatcctgatcaaccaatctcagaacctcgtatggcaccgaaaccaaagccatgggaaaagcaaggtcaagggagtttggcctgtgatttgaaatcgctgccaagggaatccgacgtgctgaggtcagaagttcagcacgacgacggcaccaaccaggttacggagtccgccgatggcgccaaccaagcggactcattgctgcaggcaggcgtagctgctggatctgaatctcctggggttccagatgacgccgcttcttcgcttgagtaaccaccgcgaaaataaatgaatgacgccgtaatcagacgcgaaaacaaacgacctcattaccacaacactgttctgatatttttgggtcctgagagagccacttgagttcacaataaatgtagtacccatcactggatgatcttttttagttgctggaaccatatgatatgagcattgttggcacttgctctcagcagcaaggaagccaacaagggtgaacggtggtgacaacagggttacgcgcacgggggcaatagctctgttga

SEQ ID NO: 60384 - DNA, 1719 bp, Zea Mays
ctcgtctctaggccctggccgctaattgagcacacgttcgtcttcctccttccgtcccccggcgtccttatccccacacaagcgccgcttaccgccgggacaggactgttggaagtccccagacggcagcgatggcggaactatcgacatcttcggatggattggtggacgaagaagcgaggcagcaggaaccagggtttcatcgccttgcctgttcgaagggttaggggttcctactgtccaaattcacctgatccaacctcgtccgttcataccgtttcctgatacgtactacaccacatcccggagatgtgttcactttcaattttgaaggcctgtactgtactgtaccctagttactaaaccttgggtttccctcgtctctcgcttcatttaggatacgtacgacgcttaagtcattcagatcggctaacctatccggtggaatgagtactgtctgcgaatctacatcatgcctttgtgaattttccttcaactttagtagtattattaaattatacccgttttgagcccatacgcttaaaagaggggaaacagtaatattatagctttaacgaacacacgattggagtgtcaagcatggatcatatttcctctgttcctgtttatatagtaccatccgtgatgccgttatagtatttatggaagtcaaactttttttgctggactgcatacaggacaaggaagcgctgaaggtagccatggtctgcaagacacaaaggagcaggacataaaaaagggaaaggcggctcttgtttccactgaactgctgagggaggatctggttcagagtgctgttagttttctgaaacacccgaaagtagtagcctcttcagatggacagaggcgatctttccttgtaaataaaggactcaccatggatgaaatagatgaagcatttcgacgtctacaaagcccgtcatcgaattctgcgagctcaaatatgtgcacatctcaaggggtgtttgatcattcatgcaggattactgaggaaattaaagtcgatagaaagtgtatgaatggtttagagagggtggaacctgaagctggacctgtggcccctgtggtacctcgtcatccaaaatcatatatggagatcatggaaatgatacaaaggggtgagcggccagacgatatacaggatattaacgatgaccctccaaatcctgatcaaccaatctcagaacctcgtatggcaccgaaaccaaagccatgggaaaagcaaggtcaagggagtttggcctgtgatttgaaatcgctgccaagggaatccgacgtgctgaggtcagaagttcagcacgacgacggcaccaaccaggttacggagtccgccgatggcgccaaccaagcggactcattgctgcaggcaggcgtagctgctggatctgaatctcctggggttccagatgacgccgcttcttcgcttgagtaaccaccgcgaaaataaatgaatgacgccgtaatcagacgcgaaaacaaacgacctcattaccacaacactgttctgatatttttgggtcctgagagagccacttgagttcacaataaatgtagtacccatcactggatgatcttttttagttgctggaaccatatgatatgagcattgttggcacttgctctcagcagcaaggaagccaacaagggtgaacggtggtgacaacagggttacgcgcacgggggcaatagctctgttga

SEQ ID NO: 60385 - DNA, 1941 bp, Zea Mays
gccgctaattgagcacacgttcgtcttcctccttccgtcccccggcgtccttatccccacacaagcgccgcttaccgccgggacaggactgttggaagtccccagacggcagcgatggcggaactatcgacatcttcggatggattggtggacgaagaagcgaggcagcaggaaccaggttcaatttggcaagggatgctcctgtagtcctgttctctttggcttttatatgctaattgcttgtgctgctaaccgttagggtttcatcgccttgcctgttcgaagggttaggggttcctactgtccaaattcacctgatccaacctcgtccgttcataccgtttcctgatacgtactacaccacatcccggagatgtgttcactttcaattttgaaggcctgtactgtactgtaccctagttactaaaccttgggtttccctcgtctctcgcttcatttaggatacgtacgacgcttaagtcattcagatcggctaacctatccggtggaatgagtactgtctgcgaatctacatcatgcctttgtgaattttccttcaactttagtagtattattaaattatacccgttttgagcccatacgcttaaaagaggggaaacagtaatattatagctttaacgaacacacgattggagtgtcaagcatggatcatatttcctctgttcctgtttatatagtaccatccgtgatgccgttatagtatttatggaagtcaaactttttttgctggactgcatacaggacaaggaagcgctgaaggtagccatggtctgcaagacacaaaggagcaggacataaaaaagggaaaggcggctcttgtttccactgaactgctgagggaggatctggttcagagtgctgttagttttctgaaacacccgaaagtagtagcctcttcagatggacagaggcgatctttccttgtaaataaaggactcaccatggatgaaatagatgaagcatttcgacgtctacaaagcccgtcatcgaattctgcgagctcaaatatgtgcacatctcaagagtttcagacctaaatggcttcatcatgacaaatctaacttagtaacttcattgccttattattgcctgcattttgtcaggggtgtttgatcattcatgcaggattactgaggtcagcacaaactacaaataatagtattggccaggcatgactggtatctatgctgcaaattttaagctactgccattttcttcaatgcagcaggaaattaaagtcgatagaaagtagagggtggaacctgaagctggacctgtggcccctgtggtacctcgtcatccaaaatcatatatggagatcatggaaatgatacaaaggggtgagcggccagacgatatacaggatattaacgatgaccctccaaatcctgatcaaccaatctcagaacctcgtatggcaccgaaaccaaagccatgggaaaagcaaggtcaagggagtttggcctgtgatttgaaatcgctgccaagggaatccgacgtgctgaggtcagaagttcagcacgacgacggcaccaaccaggttacggagtccgccgatggcgccaaccaagcggactcattgctgcaggcaggcgtagctgctggatctgaatctcctggggttccagatgacgccgcttcttcgcttgagtaaccaccgcgaaaataaatgaatgacgccgtaatcagacgcgaaaacaaacgacctcattaccacaacactgttctgatatttttgggtcctgagagagccacttgagttcacaataaatgtagtacccatcactggatgatcttttttagttgctggaaccatatgatatgagcattgttggcacttgctctcagcagcaaggaagccaacaagggtgaacggtggtgacaacagggttacgcgcacgggggcaatagctctgttga

SEQ ID NO: 60386 - DNA, 1539 bp, Zea Mays
gccgctaattgagcacacgttcgtcttcctccttccgtcccccggcgtccttatccccacacaagcgccgcttaccgccgggacaggactgttggaagtccccagacggcagcgatggcggaactatcgacatcttcggatggattggtggacgaagaagcgaggcagcaggaaccaggacaaggaagcgctgaaggtagccatggtctgcaagacacaaaggagcaggacataaaaaagggaaaggcggctcttgtttccactgaactgctgagggaggatctggttcagagtgctgttagttttctgaaacacccgaaagtagtagcctcttcagatggacagaggcgatctttccttgtaaataaaggactcaccatggatgaaatagatgaagcatttcgacgtctacaaagcccgtcatcgaattctgcgagctcaaatatgtgcacatctcaaggtatggcagagtccatttactaagttagctttttatatgatattttagttctatatgttcgtggatcatataatgatgtttcattgtttatgtgtgttttccgctgtaaatgatggtgattccatatgaaattacccattcagagtttcagacctaaatggcttcatcatgacaaatctaacttagtaacttcattgccttattattgcctgcattttgtcaggggtgtttgatcattcatgcaggattactgaggtcagcacaaactacaaataatagtattggccaggcatgactggtatctatgctgcaaattttaagctactgccattttcttcaatgcagcaggaaattaaagtcgatagaaagtgtatgaatggtttaggtttgccaatgcttctcatctatgagagggtggaacctgaagctggacctgtggcccctgtggtacctcgtcatccaaaatcatatatggagatcatggaaatgatacaaaggggtgagcggccagacgatatacaggatattaacgatgaccctccaaatcctgatcaaccaatctcagaacctcgtatggcaccgaaaccaaagccatgggaaaagcaaggtcaagggagtttggcctgtgatttgaaatcgctgccaagggaatccgacgtgctgaggtcagaagttcagcacgacgacggcaccaaccaggttacggagtccgccgatggcgccaaccaagcggactcattgctgcaggcaggcgtagctgctggatctgaatctcctggggttccagatgacgccgcttcttcgcttgagtaaccaccgcgaaaataaatgaatgacgccgtaatcagacgcgaaaacaaacgacctcattaccacaacactgttctgatatttttgggtcctgagagagccacttgagttcacaataaatgtagtacccatcactggatgatcttttttagttgctggaaccatatgatatgagcattgttggcacttgctctcagcagcaaggaagccaacaagggtgaacggtggtgacaacagggttacgcgcacgggggcaatagctctgttga

SEQ ID NO: 60387 - DNA, 1199 bp, Zea Mays
gccgctaattgagcacacgttcgtcttcctccttccgtcccccggcgtccttatccccacacaagcgccgcttaccgccgggacaggactgttggaagtccccagacggcagcgatggcggaactatcgacatcttcggatggattggtggacgaagaagcgaggcagcaggaaccaggacaaggaagcgctgaaggtagccatggtctgcaagacacaaaggagcaggacataaaaaagggaaaggcggctcttgtttccactgaactgctgagggaggatctggttcagagtgctgttagttttctgaaacacccgaaagtagtagcctcttcagatggacagaggcgatctttccttgtaaataaaggactcaccatggatgaaatagatgaagcatttcgacgtctacaaagcccgtcatcgaattctgcgagctcaaatatgtgcacatctcaaggggtgtttgatcattcatgcaggattactgaggaaattaaagtcgatagaaagtgtatgaatggtttagagagggtggaacctgaagctggacctgtggcccctgtggtacctcgtcatccaaaatcatatatggagatcatggaaatgatacaaaggggtgagcggccagacgatatacaggatattaacgatgaccctccaaatcctgatcaaccaatctcagaacctcgtatggcaccgaaaccaaagccatgggaaaagcaaggtcaagggagtttggcctgtgatttgaaatcgctgccaagggaatccgacgtgctgaggtcagaagttcagcacgacgacggcaccaaccaggttacggagtccgccgatggcgccaaccaagcggactcattgctgcaggcaggcgtagctgctggatctgaatctcctggggttccagatgacgccgcttcttcgcttgagtaaccaccgcgaaaataaatgaatgacgccgtaatcagacgcgaaaacaaacgacctcattaccacaacactgttctgatatttttgggtcctgagagagccacttgagttcacaataaatgtagtacccatcactggatgatcttttttagttgctggaaccatatgatatgagcattgttggcacttgctctcagcagcaaggaagccaacaagggtgaacggtggtgacaacagggttacgcgcacgggggcaatagctctgttga

SEQ ID NO: 60388 - DNA, 1385 bp, Zea Mays
gccgctaattgagcacacgttcgtcttcctccttccgtcccccggcgtccttatccccacacaagcgccgcttaccgccgggacaggactgttggaagtccccagacggcagcgatggcggaactatcgacatcttcggatggattggtggacgaagaagcgaggcagcaggaaccagggtttcatcgccttgcctgttcgaagggttaggggttcctactgtccaaattcacctgatccaacctcgtccgttcataccgtttcctgatacgtactacaccacatcccggagatgtgttcactttcaattttgaaggacaaggaagcgctgaaggtagccatggtctgcaagacacaaaggagcaggacataaaaaagggaaaggcggctcttgtttccactgaactgctgagggaggatctggttcagagtgctgttagttttctgaaacacccgaaagtagtagcctcttcagatggacagaggcgatctttccttgtaaataaaggactcaccatggatgaaatagatgaagcatttcgacgtctacaaagcccgtcatcgaattctgcgagctcaaatatgtgcacatctcaaggggtgtttgatcattcatgcaggattactgaggaaattaaagtcgatagaaagtgtatgaatggtttagagagggtggaacctgaagctggacctgtggcccctgtggtacctcgtcatccaaaatcatatatggagttcatatcgagccaaacttggcttctgaaatgtgatttgacttggcagatcatggaaatgatacaaaggggtgagcggccagacgatatacaggatattaacgatgaccctccaaatcctgatcaaccaatctcagaacctcgtatggcaccgaaaccaaagccatgggaaaagcaaggtcaagggagtttggcctgtgatttgaaatcgctgccaagggaatccgacgtgctgaggtcagaagttcagcacgacgacggcaccaaccaggttacggagtccgccgatggcgccaaccaagcggactcattgctgcaggcaggcgtagctgctggatctgaatctcctggggttccagatgacgccgcttcttcgcttgagtaaccaccgcgaaaataaatgaatgacgccgtaatcagacgcgaaaacaaacgacctcattaccacaacactgttctgatatttttgggtcctgagagagccacttgagttcacaataaatgtagtacccatcactggatgatcttttttagttgctggaaccatatgatatgagcattgttggcacttgctctcagcagcaaggaagccaacaagggtgaacggtggtgacaacagggttacgcgcacgggggcaatagctctgttga

SEQ ID NO: 60389 - DNA, 1431 bp, Zea Mays
gccgctaattgagcacacgttcgtcttcctccttccgtcccccggcgtccttatccccacacaagcgccgcttaccgccgggacaggactgttggaagtccccagacggcagcgatggcggaactatcgacatcttcggatggattggtggacgaagaagcgaggcagcaggaaccaggacaaggaagcgctgaaggtagccatggtctgcaagacacaaaggagcaggacataaaaaagggaaaggcggctcttgtttccactgaactgctgagggaggatctggttcagagtgctgttagttttctgaaacacccgaaagtagtagcctcttcagatggacagaggcgatctttccttgtaaataaaggactcaccatggatgaaatagatgaagcatttcgacgtctacaaagcccgtcatcgaattctgcgagctcaaatatgtgcacatctcaaggggtgtttgatcattcatgcaggattactgagcaggaaattaaagtcgatagaaagtgtatgaatggtttaggtttgccaatgcttctcatctatggtaaatattgactattccctgattaccttttttttgctaacgtttctactccctccatcccaaattgtaagtcattttggctttttaggtatgtagattttgctgtgcacctaactctaagcctagacacatagtaaaaacaatatatctagaaaagccaaaatgacttacaatttgaaaaaggagggagtactttcatttatagagagggtggaacctgaagctggacctgtggcccctgtggtacctcgtcatccaaaatcatatatggagatcatggaaatgatacaaaggggtgagcggccagacgatatacaggatattaacgatgaccctccaaatcctgatcaaccaatctcagaacctcgtatggcaccgaaaccaaagccatgggaaaagcaaggtcaagggagtttggcctgtgatttgaaatcgctgccaagggaatccgacgtgctgaggtcagaagttcagcacgacgacggcaccaaccaggttacggagtccgccgatggcgccaaccaagcggactcattgctgcaggcaggcgtagctgctggatctgaatctcctggggttccagatgacgccgcttcttcgcttgagtaaccaccgcgaaaataaatgaatgacgccgtaatcagacgcgaaaacaaacgacctcattaccacaacactgttctgatatttttgggtcctgagagagccacttgagttcacaataaatgtagtacccatcactggatgatcttttttagttgctggaaccatatgatatgagcattgttggcacttgctctcagcagcaaggaagccaacaagggtgaacggtggtgacaacagggttacgcgcacgggggcaatagctctgttga

SEQ ID NO: 60390 - DNA, 1508 bp, Zea Mays
gccgctaattgagcacacgttcgtcttcctccttccgtcccccggcgtccttatccccacacaagcgccgcttaccgccgggacaggactgttggaagtccccagacggcagcgatggcggaactatcgacatcttcggatggattggtggacgaagaagcgaggcagcaggaaccaggacaaggaagcgctgaaggtagccatggtctgcaagacacaaaggagcaggacataaaaaagggaaaggcggctcttgtttccactgaactgctgagggaggatctggttcagagtgctgttagttttctgaaacacccgaaagtagtagcctcttcagatggacagaggcgatctttccttgtaaataaaggactcaccatggatgaaatagatgaagcatttcgacgtctacaaagcccgtcatcgaattctgcgagctcaaatatgtgcacatctcaagagtttcagacctaaatggcttcatcatgacaaatctaacttagtaacttcattgccttattattgcctgcattttgtcaggggtgtttgatcattcatgcaggattactgaggaaattaaagtcgatagaaagtgtatgaatggtttaggtttgccaatgcttctcatctatggtaaatattgactattccctgattaccttttttttgctaacgtttctactccctccatcccaaattgtaagtcattttggctttttaggtatgtagattttgctgtgcacctaactctaagcctagacacatagtaaaaacaatatatctagaaaagccaaaatgacttacaatttgaaaaaggagggagtactttcatttatagagagggtggaacctgaagctggacctgtggcccctgtggtacctcgtcatccaaaatcatatatggagatcatggaaatgatacaaaggggtgagcggccagacgatatacaggatattaacgatgaccctccaaatcctgatcaaccaatctcagaacctcgtatggcaccgaaaccaaagccatgggaaaagcaaggtcaagggagtttggcctgtgatttgaaatcgctgccaagggaatccgacgtgctgaggtcagaagttcagcacgacgacggcaccaaccaggttacggagtccgccgatggcgccaaccaagcggactcattgctgcaggcaggcgtagctgctggatctgaatctcctggggttccagatgacgccgcttcttcgcttgagtaaccaccgcgaaaataaatgaatgacgccgtaatcagacgcgaaaacaaacgacctcattaccacaacactgttctgatatttttgggtcctgagagagccacttgagttcacaataaatgtagtacccatcactggatgatcttttttagttgctggaaccatatgatatgagcattgttggcacttgctctcagcagcaaggaagccaacaagggtgaacggtggtgacaacagggttacgcgcacgggggcaatagctctgttga

SEQ ID NO: 60391 - DNA, 1694 bp, Zea Mays
gccgctaattgagcacacgttcgtcttcctccttccgtcccccggcgtccttatccccacacaagcgccgcttaccgccgggacaggactgttggaagtccccagacggcagcgatggcggaactatcgacatcttcggatggattggtggacgaagaagcgaggcagcaggaaccagggtttcatcgccttgcctgttcgaagggttaggggttcctactgtccaaattcacctgatccaacctcgtccgttcataccgtttcctgatacgtactacaccacatcccggagatgtgttcactttcaattttgaaggacaaggaagcgctgaaggtagccatggtctgcaagacacaaaggagcaggacataaaaaagggaaaggcggctcttgtttccactgaactgctgagggaggatctggttcagagtgctgttagttttctgaaacacccgaaagtagtagcctcttcagatggacagaggcgatctttccttgtaaataaaggactcaccatggatgaaatagatgaagcatttcgacgtctacaaagcccgtcatcgaattctgcgagctcaaatatgtgcacatctcaaggtatggcagagtccatttactaagttagctttttatatgatattttagttctatatgttcgtggatcatataatgatgtttcattgtttatgtgtgttttccgctgtaaatgatggtgattccatatgaaattacccattcagagtttcagacctaaatggcttcatcatgacaaatctaacttagtaacttcattgccttattattgcctgcattttgtcaggggtgtttgatcattcatgcaggattactgaggaaattaaagtcgatagaaagtgtatgaatggtttagtcattttggctttttaggtatgtagattttgctgtgcacctaactctaagcctagacacatagtaaaaacaatatatctagaaaagccaaaatgacttacaatttgaaaaaggagggagtactttcatttatagagagggtggaacctgaagctggacctgtggcccctgtggtacctcgtcatccaaaatcatatatggagatcatggaaatgatacaaaggggtgagcggccagacgatatacaggatattaacgatgaccctccaaatcctgatcaaccaatctcagaacctcgtatggcaccgaaaccaaagccatgggaaaagcaaggtcaagggagtttggcctgtgatttgaaatcgctgccaagggaatccgacgtgctgaggtcagaagttcagcacgacgacggcaccaaccaggttacggagtccgccgatggcgccaaccaagcggactcattgctgcaggcaggcgtagctgctggatctgaatctcctggggttccagatgacgccgcttcttcgcttgagtaaccaccgcgaaaataaatgaatgacgccgtaatcagacgcgaaaacaaacgacctcattaccacaacactgttctgatatttttgggtcctgagagagccacttgagttcacaataaatgtagtacccatcactggatgatcttttttagttgctggaaccatatgatatgagcattgttggcacttgctctcagcagcaaggaagccaacaagggtgaacggtggtgacaacagggttacgcgcacgggggcaatagctctgttga

SEQ ID NO: 60392 - DNA, 1925 bp, Zea Mays
gccgctaattgagcacacgttcgtcttcctccttccgtcccccggcgtccttatccccacacaagcgccgcttaccgccgggacaggactgttggaagtccccagacggcagcgatggcggaactatcgacatcttcggatggattggtggacgaagaagcgaggcagcaggaaccagggtttcatcgccttgcctgttcgaagggttaggggttcctactgtccaaattcacctgatccaacctcgtccgttcataccgtttcctgatacgtactacaccacatcccggagatgtgttcactttcaattttgaaggcctgtactgtactgtaccctagttactaaaccttgggtttccctcgtctctcgcttcatttaggatacgtacgacgcttaagtcattcagatcggctaacctatccggtggaatgagtactgtctgcgaatctacatcatgcctttgtgaattttccttcaactttagtagtattattaaattatacccgttttgagcccatacgcttaaaagaggggaaacagtaatattatagctttaacgaacacacgattggagtgtcaagcatggatcatatttcctctgttcctgtttatatagtaccatccgtgatgccgttatagtatttatggaagtcaaactttttttgctggactgcatacaggacaaggaagcgctgaaggtagccatggtctgcaagacacaaaggagcaggacataaaaaagggaaaggcggctcttgtttccactgaactgctgagggaggatctggttcagagtgctgttagttttctgaaacacccgaaagtagtagcctcttcagatggacagaggcgatctttccttgtaaataaaggactcaccatggatgaaatagatgaagcatttcgacgtctacaaagcccgtcatcgaattctgcgagctcaaatatgtgcacatctcaaggtatggcagagtccatttactaagttagctttttatatgatattttagttctatatgttcgtggatcatataatgatgtttcattgtttatgtgtgttttccgctgtaaatgatggtgattccatatgaaattacccattcagagtttcagacctaaatggcttcatcatgacaaatctaacttagtaacttcattgccttattattgcctgcattttgtcaggggtgtttgatcattcatgcaggattactgaggaaattaaagtcgatagaaagtgtatgaatggtttagagagggtggaacctgaagctggacctgtggcccctgtggtacctcgtcatccaaaatcatatatggagatcatggaaatgatacaaaggggtgagcggccagacgatatacaggatattaacgatgaccctccaaatcctgatcaaccaatctcagaacctcgtatggcaccgaaaccaaagccatgggaaaagcaaggtcaagggagtttggcctgtgatttgaaatcgctgccaagggaatccgacgtgctgaggtcagaagttcagcacgacgacggcaccaaccaggttacggagtccgccgatggcgccaaccaagcggactcattgctgcaggcaggcgtagctgctggatctgaatctcctggggttccagatgacgccgcttcttcgcttgagtaaccaccgcgaaaataaatgaatgacgccgtaatcagacgcgaaaacaaacgacctcattaccacaacactgttctgatatttttgggtcctgagagagccacttgagttcacaataaatgtagtacccatcactggatgatcttttttagttgctggaaccatatgatatgagcattgttggcacttgctctcagcagcaaggaagccaacaagggtgaacggtggtgacaacagggttacgcgcacgggggcaatagctctgttga

SEQ ID NO: 60393 - DNA, 1933 bp, Zea Mays
gccgctaattgagcacacgttcgtcttcctccttccgtcccccggcgtccttatccccacacaagcgccgcttaccgccgggacaggactgttggaagtccccagacggcagcgatggcggaactatcgacatcttcggatggattggtggacgaagaagcgaggcagcaggaaccagggtttcatcgccttgcctgttcgaagggttaggggttcctactgtccaaattcacctgatccaacctcgtccgttcataccgtttcctgatacgtactacaccacatcccggagatgtgttcactttcaattttgaaggcctgtactgtactgtaccctagttactaaaccttgggtttccctcgtctctcgcttcatttaggatacgtacgacgcttaagtcattcagatcggctaacctatccggtggaatgagtactgtctgcgaatctacatcatgcctttgtgaattttccttcaactttagtagtattattaaattatacccgttttgagcccatacgcttaaaagaggggaaacagtaatattatagctttaacgaacacacgattggagtgtcaagcatggatcatatttcctctgttcctgtttatatagtaccatccgtgatgccgttatagtatttatggaagtcaaactttttttgctggactgcatacaggacaaggaagcgctgaaggtagccatggtctgcaagacacaaaggagcaggacataaaaaagggaaaggcggctcttgtttccactgaactgctgagggaggatctggttcagagtgctgttagttttctgaaacacccgaaagtagtagcctcttcagatggacagaggcgatctttccttgtaaataaaggactcaccatggatgaaatagatgaagcatttcgacgtctacaaagcccgtcatcgaattctgcgagctcaaatatgtgcacatctcaagtcaggggtgtttgatcattcatgcaggattactgaggtcagcacaaactacaaataatagtattggccaggcatgactggtatctatgctgcaaattttaagctactgccattttcttcaatgcagcaggaaattaaagtcgatagaaagtgtatgaatggtttagtcattttggctttttaggtatgtagattttgctgtgcacctaactctaagcctagacacatagtaaaaacaatatatctagaaaagccaaaatgacttacaatttgaaaaaggagggagtactttcatttatagagagggtggaacctgaagctggacctgtggcccctgtggtacctcgtcatccaaaatcatatatggagatcatggaaatgatacaaaggggtgagcggccagacgatatacaggatattaacgatgaccctccaaatcctgatcaaccaatctcagaacctcgtatggcaccgaaaccaaagccatgggaaaagcaaggtcaagggagtttggcctgtgatttgaaatcgctgccaagggaatccgacgtgctgaggtcagaagttcagcacgacgacggcaccaaccaggttacggagtccgccgatggcgccaaccaagcggactcattgctgcaggcaggcgtagctgctggatctgaatctcctggggttccagatgacgccgcttcttcgcttgagtaaccaccgcgaaaataaatgaatgacgccgtaatcagacgcgaaaacaaacgacctcattaccacaacactgttctgatatttttgggtcctgagagagccacttgagttcacaataaatgtagtacccatcactggatgatcttttttagttgctggaaccatatgatatgagcattgttggcacttgctctcagcagcaaggaagccaacaagggtgaacggtggtgacaacagggttacgcgcacgggggcaatagctctgttga

SEQ ID NO: 60394 - DNA, 1653 bp, Zea Mays
gccgctaattgagcacacgttcgtcttcctccttccgtcccccggcgtccttatccccacacaagcgccgcttaccgccgggacaggactgttggaagtccccagacggcagcgatggcggaactatcgacatcttcggatggattggtggacgaagaagcgaggcagcaggaaccagggtttcatcgccttgcctgttcgaagggttaggggttcctactgtccaaattcacctgatccaacctcgtccgttcataccgtttcctgatacgtactacaccacatcccggagatgtgttcactttcaattttgaaggacaaggaagcgctgaaggtagccatggtctgcaagacacaaaggagcaggacataaaaaagggaaaggcggctcttgtttccactgaactgctgagggaggatctggttcagagtgctgttagttttctgaaacacccgaaagtagtagcctcttcagatggacagaggcgatctttccttgtaaataaaggactcaccatggatgaaatagatgaagcatttcgacgtctacaaagcccgtcatcgaattctgcgagctcaaatatgtgcacatctcaaggtatggcagagtccatttactaagttagctttttatatgatattttagttctatatgttcgtggatcatataatgatgtttcattgtttatgtgtgttttccgctgtaaatgatggtgattccatatgaaattacccattcagagtttcagacctaaatggcttcatcatgacaaatctaacttagtaacttcattgccttattattgcctgcattttgtcaggggtgtttgatcattcatgcaggattactgaggtcagcacaaactacaaataatagtattggccaggcatgactggtatctatgctgcaaattttaagctactgccattttcttcaatgcagcaggaaattaaagtcgatagaaagtgtatgaatggtttagagagggtggaacctgaagctggacctgtggcccctgtggtacctcgtcatccaaaatcatatatggagatcatggaaatgatacaaaggggtgagcggccagacgatatacaggatattaacgatgaccctccaaatcctgatcaaccaatctcagaacctcgtatggcaccgaaaccaaagccatgggaaaagcaaggtcaagggagtttggcctgtgatttgaaatcgctgccaagggaatccgacgtgctgaggtcagaagttcagcacgacgacggcaccaaccaggttacggagtccgccgatggcgccaaccaagcggactcattgctgcaggcaggcgtagctgctggatctgaatctcctggggttccagatgacgccgcttcttcgcttgagtaaccaccgcgaaaataaatgaatgacgccgtaatcagacgcgaaaacaaacgacctcattaccacaacactgttctgatatttttgggtcctgagagagccacttgagttcacaataaatgtagtacccatcactggatgatcttttttagttgctggaaccatatgatatgagcattgttggcacttgctctcagcagcaaggaagccaacaagggtgaacggtggtgacaacagggttacgcgcacgggggcaatagctctgttga

SEQ ID NO: 60395 - DNA, 4906 bp, Zea Mays
ccacccctgccgctgtcggccgatgcattgcaccgcggaccgccctcgactcgcctcgccgcagggggtcacggtcacgccgcctccctccgctgccggcctgctcagcctccctccgccggtcctttcccacggtccacacgcgatcaaaagcgcaaaagccaaccccgacgaaacgacgagacggatacgagtgatagactgatagctaacgctacccacagcagcaactataccagccagcggaccccgacgccgccccaagcccccagcaggctgcagcccctgcgacatagtgggggagcgggtcttcttgagcggcgtcgctctcacgtacggcgtcgggtactcgtcgcggcggcagggagctaggggcaggcatgcgctgatggaattcaggggccaggaggaggaggagcagcccgtctcggaggagatgggcgccagctccgcgccgtcgtccgcccccacccccgccccggggaaccaggaccacgccgccgaggcgaggtaccacgagtgcctgcggaaccacgcggcggcgctgggcggccacgtcgtcgacggctgcggggagttcatgcccggggacggcgacagtctcaagtgcgccgcatgcggctgccaccgcagcttccaccgcaaggacgacgcgcgccgccgccaccaccaactcatgctcccggcgaccgcgacgtcctctcgcgtcccgctgctcctgcctccgccccacccgcactacgcgccgccgccgttcccgtaccacggcacgcccagcggcggcggcggcggcaccgccaccgagtcgtccagcgaggagcgcggcccgccgtccggggccgccgccgtgcaggcgcagggccacgtccggcggaagcggttccggaccaagttcacgccggagcagaaggagcagatgctggcgttcgcggagcgcctcggctggcggttgcagaagcaggacgacgcgctggtgcagcacttctgcgaccaggtcggcgtgcgccgccaggtattcaaggtctggatgcacaacaacaagcacaccggcaggaggcagcagccgcacctgccgccgccgcaggggcagcaacagccccaacagcagccgaagtagccacggtgggagacaaggctcagcagtcagcagcaccatcacagccacgccaccatttgcttaatcccccgcctcatttttttatgggctccgagaggtgtgggattaaacaagggaagtgaaggagggctcctatcctctcttcccttccgtttttgggtttcaccttatccttcattttttgtagtcacttctttcaccattgtcttttgcctcaccattcttgtctgcacatctttgatttcttctgttcctagttcgggggatcaattggaaggaggaagaggcactgtgcatgcttcgtagctacattcctgctaccttgttgccatttgaccccccctcggacagcaagattaaccaatctaataagatctctctactttgctctgaaattcttccgtatcttcacttaatcactagagggtgtagctggtggtctctcctcccttctaatattgcaacatttccatttagttaagcttgaaacccagcataaactaatggccatataatggtatgataatcttgagttctcttctgccagttgctaattagagagtagcagccaacatctgtggctaggatattctagaggagaaaaggctggatggaatgcagtggagattggagaacaacgcttgcatgcacgccattagagagacgtactcggaggttgcatcaaatgctcgttgctttgtctttgcgcgtgcgtgtgtgtttgccattcaattggaggtgtacttgcctgctgcagtgccttaagatttagactgtacttggctgtagttgcatcccattactgccatgcatggaggagggagtgtcattttccagacctgattgattccattaatggaggcctggagctccatgtcagtctggtccgagacgggcggccggccggtcacgtactcacatggctgctgtcgcatgctttactcgcctctatcactctaccttccagaagctaaaggattttacaaggatttcgtttcatcaaatcgtgaggcccatgctgcaagagaggaggcccatgctgcaagagatgaggcggttgagaggcagataaggatgtaacggctgcgctccaagaaaattgcaatccatgaaagaggaagaaaaaaaaacggataatgagaaacgtggcatcacaggattttggttctctggtaccattcgctccagtttcgcgcacgagtccgcaaatctggtttctttttgtcctgttttattcgaaagctaatcgccaaatctggacagcagttttgccaaaccagttgaaaaggacatggagaacacatagtaccactaaacctcctacatccagatgtgatactggaatttttttttcttcgacaacataccctactgcggcggtactattagggaacaagttgtggcatagaaaagttactgctgtggggaaaagaaagtagagatatgtcttcttactgataataataggctgggcccctcgccctcggaaatttggataaagatgcatctgttatttactgtgttcttcaactattcagctcatttgttgggcttaacatcgatttgatgtgcagaagcaggtgatgatttctccctatcaaaggtcagtcagttttggtgtctggcaggcacggaactcagtgcccctggacttgtgcacagctgttgaactttagcccatcatggtgcttctgaatgatcgatcagtcccatcagtctctgttaagttttgtcttctcatctgcacttctgtcaggtcttaataataacccaggatgacgctgagagcgctgaaactgttgaaaggatcaggagctgtttgctgttcctccgtgcctacacacagtactgcgatgtttcagagctgtttggcgatcgctgcagtccctgtcccagcatttgtggcaaacggacgtacggccaaagagactgacaacgataattcagacctaatcaactattcagctgacacaatgacgcccaggaagtactgtttaactgtttgcctcgtttaggccctgtttgtgttaccgtgcagactacaagttgcagtactctgctacagtctgcaatgccaagtaagtgcactagtatttgtcgggtatagtaattatgtgtacctagattacacccttaaaacatatttaacccatagaccaccgtcgaagtatgttccatgaagacgaaggatcatatataagtcatgtttcgccttaggctccctcaggggtcatcatagatgaaaatctgggactatccacagagttaactgagtgaaagctttgctctcgcgtgggcattagcttgtgcaccttgaagctaccggtgacagtcattaatgctattgattgtatcataaaggactgtctctggcgcgcggtaatagtgaaaatgcacaccgaaactctatggacaaagtgtgctgccgcaggaatggatggtgcttgggtatcctcgatcaatttgaagattcagaacacaacggtacacttatccgaatcgcctagaccacgcacgttacgataggtaaacataggtttgggttattcaataggcgagggtgggcaccaagagcacaaaagacagtttgaagttcatggcacgtaggccaaagttcatagcaggccctggcacgccacgcatggtggccaaggacagcaaccacacagactaaacgcttagaccagagaaaaccagggagggggttatggttgtctctaacgcatgacaatcattctaggatagggggcaccatgccaatatctaaagcagccttgcatcacaggccgactgctttgaccagcttccggaggacggcaatataatggagatgggcttcttgttcttctcaagcagcttgtgttgttgcaccgttttctggacggcatgcatgggagcatggaagcagggcgtcccatagggccctccgggtggaggctttggctgtagcatgggagtagttgttgcaggattgagctaccaggcgagagctcctacaagtaggcaagtcgttttttttttttgcgcaggcgttttaaattttgggctggggtgggtcattgcatgtggttgtcgcagtcagcggggatgcgggagtggccgaagcattatgcaaccgacacacttgattctggaaataattagtagagaagcgtcctggtttggaaacttgcctcatctcaaactcttcatccgatttaaacgagtaactttctcggttctcacgccccaaaccgtagttcaattgttgtgatttgtgagcggaattcagataataatgctcaagcctaagatccaagatgtcctggcggcctcgttgtcacactatccggttggacgaggagtaggatgcctgcccggcaacaaatcgatccccgctcttccttgcttcgatccgagacggtgtctccaagacaccaagcgctgccccgatcggatcaccgggcgggcctcggcgacgacgggcgtggctacgccgggggcggctgcggaggcgtcgccggcccacccggaccccctgtgggtccgccactgggcgtcgcgtgggcggatcggaggttggtgccgtcgtgcgaggccacggctccgcgagcacaacaatccggaaaacacacggacttcggagtgcggtggcttggcagcgagcgagatggaacatggaagcacggagagcgcgagggaaactgcgagaggcaggcggtccgggaaccactgcggtgcgtgttgctgccgacgatgggctctgttctggtgaatgacaccgacgtgttagagtcgtgggccttttga

SEQ ID NO: 60396 - DNA, 4580 bp, Zea Mays
agaagctgtttatgcagcattaagcgttactgggacagttttccattttctggttcgtaaaggtgtctcccttctttgagagagaaaagcagagccttttctactcactcattattcggctcagcgtgaaatggtgtcaccaggtggtgctgatcatcgtttagaaaagaatccagccagctggaggatgagccttctatacttcctcaacactatcaaaatctggatcatcatcagcattttaaagaccataagttttctccaatatccttctctacagacacagaaagtccgcagtttgtgatgtcatataacaagactgctgagaggagacctgatgatctaattgagatgatgacctgcacagttaaaccttcggtggactttgtgattgattctcgcaattcattacatggtccagcaaccaatcatgtttcaagaattgattatggaacaatggccaatgatgatagtaataagaaaccaagccctgctaacacgagtgtgcagagtgctgagagtgattttgcagttgatcagaagcagcaaagtcaatcatggacacctatttctggaagtatatctgcaaacgaaaatcacaagaactctgatagtcattcaacacgtagtactgtaacgcctcctgattatgcatttcttcaggtatctgacagtgatacacagacacaatcaatcaaagtacaacaaccattgaagcaacaacctaaactgctcaacaagaaagagagtgcagctaaagaagacgtcaggattgtagacgacaattgctctccaacttctgcacatatcacttcaagtagcaacatgtctcacactgacaagaaagttgatgccaatccaacttctgcatcagcagctatgaaggaggcaatgaattttgctgaagctaggttaaaggctgcaaaagcattgttagagggaaaaggtgacagttttaaattgcggaagaagccaagtcatcttaaaagcacaaggtctacagaaatcaagtctcctatttctgtagaggccgatacttctgaacaaaaactatgggtgaaaaagtcatcggaagaagaaaagaaccctgacgattctttgtctgacaagcacaaaaagctgactgcagtcagattagatcattttgatgacaatggaaaaaaggtacttccattggagaagcctgagcatatggtgcaacactgcactgaatcctgtcaaacttccagtaaactacaaaaactaggcaactggaagtcaggtaatgacttttttgagctaacccgagatgatcagaaatgcaaaaatgatgaagccacagagggaggtgataaatgtgagcaaatgaatcctattactagtgtcatcaatgatcacaatgaaattgaattcaatgcagcaggctctgacttggacaggtatgaaaaactatgggaggttaatgatggcaggagtgtgggggtgaaacctgtaaatctgagagagaacaagacagctcccgtggacaaagatagtgtgtctgtgattttagaatcttctacagaaaataaggcacaccaaaagactcacaactcaattggtgagggacttgtaacactgaaaaatgctaaggaaagccatggtactgataagtgctttgagcttccttctatgagtggagcctccacaaagctggatgtcttcaaggatgtgtcaggttcatttccggaggctcgctcatcagtaaatgccagcgatcttggagaccatggtaatattagtccaaacttaagtccattagcaggaacatcacaagaggacacaaccagtaaactggtatcagaagtatcttgcgatggtgggatgcaacacacttctcgtagtaatgaaaagctacaggaatcctcagatgtatctgatgttgctatttcccagggaagtaacattaaatcattcattttagaagaacttaaagaatctgatgtatgtgatgctttcatgaggggacctaatggaaaagggcaggaagctgaaaattatggaagagaaaaattcagctttattgatggatcactcttgctgcgaccacacttccataacaaaggtgctaagatgaatgtaatctctgaggaagtacagaaagtcaaaaatgaggagaaacttggtccgtgtacacaccccgaagtaacaattgtggatctggatggtgattgtcctaaagatttgaatgatgttattctacaaaatgatgactttgcagacccagaagaatcaaacatgcctaatgtatttgaggtagctagcaagttgattaaaagagatctggatcaagaaatgcatgggtcattaggacatggtgaagaggagaatatggaagaaggaacagatgtacatctttgtgatattaatggcaaagaagtagatgaaaccttgttagaaaatagtgtgtgtacagatactgaagaaggatgtgctcattgtaaccaggaagaccagaattcatctgacagcaccaacagaggaaaaagtgatgtagataacatgtgttatacatcttgtgacgaggttttgtcttcagaaatgtatacccgcatgcagcactcaatgcaaaaagatggtactgctgcttttcagacatctgggggtgttcctggtcttgaagaaatcggggatgtttccaacagaggaggaagagaattatcaacagaaaggtctacatgtgaagatcatggcaacgcaatcataatggaagaaaaagacactacaacaaggatatcaaaggcagagcatgcatcatctcccttggagacgatgtgtggtgtaactaaatctgctgaagctcccacaacaagggagaacatgacaacagcagatagtgcatgtgaaaaggacaaagggtcttctcaaagagtacaggaggaaaacgaaagtgaaaggagattggagaaagaaagagaagttgaagagaaggaaagaaggaaattggagaaagaaagagaacttgccgaagagaaggaaagaaggaaatttgagaaagaaagagaacttgccgaagagaaggaaagaagaaaaatggagaaagaaaaagaacatgccgaagagaaggaaagaagtaaattggagaaagaaaaagaacttgctgaagagaaggaaagacataaattgaagaaagagagagaacttgctgaagagaaggaaagaagaagattagaagaggcggaaagggagagggagcgtaaaaaggatagacttgctgttgaaagagcgacaagagaagcacatgagagagcatttgccgaagctcgtgaaaaggcagaaaaaatggctttggaaagaattaatgctgcacggcagcgggcatctgcagaggcccgagagaaagaagatagagcaagtgtcgaaccagctgctgaaagggctactagagaagctaggataaaagcagaacgtgcggcagtcgagcgagcaactgctgaagctcgggagcgggcaatagaaaaggcaaaggctgagaaggctcttgcagaggcaagagagcggagggaacgatacaaatcctctttcaaggagagttttaagtccaccaatcaggatattcgacaggagtcacagtttcatagggcaacttctagtaatttcatccgaaacccagattccagcaacagagcaatggttgaggttgagtccgctttaagacataaagcaagattagagaggcatcaacgcacagctgagcgtgtgacaaaagctcttgccgagaagaacacgcgggacctgctggctcaaagagagcaagcagagaaacataggctgtctgaattcctggatcctgagatcaagagatggtcaaatggaaaggaaggaaatctgagggccctgctatccacattgcaatatattcttggtgccgatagtggctggcaaccggtgccactaacagatctcattacagcggttgctgtgaagaaagcttacaggaaggcaaccctatgtgtccatccagataaactacagcagaggggcgctacgatcagacagaaatacatatgtgagaaggtttttgatcttcttaaggatgcttggaacaaattcacttcggaggagcgctagggtggcgggggtgctagagcggccgtttattttgaggcaggcgattcgtatattttctatagcgacgtcgtcagtttcttgattcaaaactgattgtaaatatgcagttgtagccctagatatccgtgtcagaaacacagcgcagatgatgctggttagtaccttatctcagaatcagttcagcaaaaagagctccattgctcgtaagtttccaagcccgcgcggtgggtcgaaaactgcccaatgcattggtcagatggatcctttacggtagagtttcaggtagttagagaatagggatgactgacacgattggtcggtcggacggaaacagccggctcttctagctccggaaacctgtcgtaggacttgcccccgtccaaaaaagagagataaaattctagttccatctaaacaaagtgttctagaatttaatcaaatctataaaaatgatttatctcaatgttacattattgtaactaaaaaacggc

SEQ ID NO: 60397 - DNA, 4553 bp, Zea Mays
attcgctgtttgcgggcttttgtttattttttcatgtgaatatatattgttcgaattaagatttatgtgtaatgttgtaatcacatcgtggagatcctcatacggcggacattacaaccactgtctatttccatggatttaaaaaagttgagcattgaagaagagttggatgacttgataacaagtattcaacatttgccgtggacgaaattcataggattgatcatcgtttagaaaagaatccagccagctggaggatgagccttctatacttcctcaacactatcaaaatctggatcatcatcagcattttaaagaccataagttttctccaatatccttctctacagacacagaaagtccgcagtttgtgatgtcatataacaagactgctgagaggagacctgatgatctaattgagatgatgacctgcacagttaaaccttcggtggactttgtgattgattctcgcaattcattacatggtccagcaaccaatcatgtttcaagaattgattatggaacaatggccaatgatgatagtaataagaaaccaagccctgctaacacgagtgtgcagagtgctgagagtgattttgcagttgatcagaagcagcaaagtcaatcatggacacctatttctggaagtatatctgcaaacgaaaatcacaagaactctgatagtcattcaacacgtagtactgtaacgcctcctgattatgcatttcttcaggtatctgacagtgatacacagacacaatcaatcaaagtacaacaaccattgaagcaacaacctaaactgctcaacaagaaagagagtgcagctaaagaagacgtcaggattgtagacgacaattgctctccaacttctgcacatatcacttcaagtagcaacatgtctcacactgacaagaaagttgatgccaatccaacttctgcatcagcagctatgaaggaggcaatgaattttgctgaagctaggttaaaggctgcaaaagcattgttagagggaaaaggtgacagttttaaattgcggaagaagccaagtcatcttaaaagcacaaggtctacagaaatcaagtctcctatttctgtagaggccgatacttctgaacaaaaactatgggtgaaaaagtcatcggaagaagaaaagaaccctgacgattctttgtctgacaagcacaaaaagctgactgcagtcagattagatcattttgatgacaatggaaaaaaggtacttccattggagaagcctgagcatatggtgcaacactgcactgaatcctgtcaaacttccagtaaactacaaaaactaggcaactggaagtcaggtaatgacttttttgagctaacccgagatgatcagaaatgcaaaaatgatgaagccacagagggaggtgataaatgtgagcaaatgaatcctattactagtgtcatcaatgatcacaatgaaattgaattcaatgcagcaggctctgacttggacaggtatgaaaaactatgggaggttaatgatggcaggagtgtgggggtgaaacctgtaaatctgagagagaacaagacagctcccgtggacaaagatagtgtgtctgtgattttagaatcttctacagaaaataaggcacaccaaaagactcacaactcaattggtgagggacttgtaacactgaaaaatgctaaggaaagccatggtactgataagtgctttgagcttccttctatgagtggagcctccacaaagctggatgtcttcaaggatgtgtcaggttcatttccggaggctcgctcatcagtaaatgccagcgatcttggagaccatggtaatattagtccaaacttaagtccattagcaggaacatcacaagaggacacaaccagtaaactggtatcagaagtatcttgcgatggtgggatgcaacacacttctcgtagtaatgaaaagctacaggaatcctcagatgtatctgatgttgctatttcccagggaagtaacattaaatcattcattttagaagaacttaaagaatctgatgtatgtgatgctttcatgaggggacctaatggaaaagggcaggaagctgaaaattatggaagagaaaaattcagctttattgatggatcactcttgctgcgaccacacttccataacaaaggtgctaagatgaatgtaatctctgaggaagtacagaaagtcaaaaatgaggagaaacttggtccgtgtacacaccccgaagtaacaattgtggatctggatggtgattgtcctaaagatttgaatgatgttattctacaaaatgatgactttgcagacccagaagaatcaaacatgcctaatgtatttgaggtagctagcaagttgattaaaagagatctggatcaagaaatgcatgggtcattaggacatggtgaagaggagaatatggaagaaggaacagatgtacatctttgtgatattaatggcaaagaagtagatgaaaccttgttagaaaatagtgtgtgtacagatactgaagaaggatgtgctcattgtaaccaggaagaccagaattcatctgacagcaccaacagaggaaaaagtgatgtagataacatgtgttatacatcttgtgacgagaaatcggggatgtttccaacagaggaggaagagaattatcaacagaaaggtctacatgtgaagatcatggcaacgcaatcataatggaagaaaaagacactacaacaaggatatcaaaggcagagcatgcatcatctcccttggagacgatgtgtggtgtaactaaatctgctgaagctcccacaacaagggagaacatgacaacagcagatagtgcatgtgaaaaggacaaagggtcttctcaaagagtacaggaggaaaacgaaagtgaaaggagattggagaaagaaagagaagttgaagagaaggaaagaaggaaattggagaaagaaagagaacttgccgaagagaaggaaagaaggaaatttgagaaagaaagagaacttgccgaagagaaggaaagaagaaaaatggagaaagaaaaagaacatgccgaagagaaggaaagaagtaaattggagaaagaaaaagaacttgctgaagagaaggaaagacataaattgaagaaagagagagaacttgctgaagagaaggaaagaagaagattagaagaggcggaaagggagagggagcgtaaaaaggatagacttgctgttgaaagagcgacaagagaagcacatgagagagcatttgccgaagctcgtgaaaaggcagaaaaaatggctttggaaagaattaatgctgcacggcagcgggcatctgcagaggcccgagagaaagaagatagagcaagtgtcgaaccagctgctgaaagggctactagagaagctaggataaaagcagaacgtgcggcagtcgagcgagcaactgctgaagctcgggagcgggcaatagaaaaggcaaaggctgagaaggctcttgcagaggcaagagagcggagggaacgatacaaatcctctttcaaggagagttttaagtccaccaatcaggatattcgacaggagtcacagtttcatagggcaacttctagtaatttcatccgaaacccagattccagcaacagagcaatggttgaggttgagtccgctttaagacataaagcaagattagagaggcatcaacgcacagctgagcgtgtgacaaaagctcttgccgagaagaacacgcgggacctgctggctcaaagagagcaagcagagaaacataggctgtctgaattcctggatcctgagatcaagagatggtcaaatggaaaggaaggaaatctgagggccctgctatccacattgcaatatattcttggtgccgatagtggctggcaaccggtgccactaacagatctcattacagcggttgctgtgaagaaagcttacaggaaggcaaccctatgtgtccatccagataaactacagcagaggggcgctacgatcagacagaaatacatatgtgagaaggtttttgatcttcttaaggatgcttggaacaaattcacttcggaggagcgctagggtggcgggggtgctagagcggccgtttattttgaggcaggcgattcgtatattttctatagcgacgtcgtcagtttcttgattcaaaactgattgtaaatatgcagttgtagccctagatatccgtgtcagaaacacagcgcagatgatgctggttagtaccttatctcagaatcagttcagcaaaaagagctccattgctcgtaagtttccaagcccgcgcggtgggtcgaaaactgcccaatgcattggtcagatggatcctttacggtagagtttcaggtagttagagaatagggatgactgacacgattggtcggtcggacggaaacagccggctcttctagctccggaaacctgtcgtaggacttgcccccgtccaaaaaagagagataaaattctagttccatctaaacaaagtgttctagaatttaatcaaatctataaaaatgatttatctcaatgttacattattgtaactaaaaaacggc

SEQ ID NO: 60398 - DNA, 4442 bp, Zea Mays
caacaatcggaacatgtggatctgaagaggacgtggtagttgggtaaaccagacagatcatcgtttagaaaagaatccagccagctggaggatgagccttctatacttcctcaacactatcaaaatctggatcatcatcagcattttaaagaccataagttttctccaatatccttctctacagacacagaaagtccgcagtttgtgatgtcatataacaagactgctgagaggagacctgatgatctaattgagatgatgacctgcacagttaaaccttcggtggactttgtgattgattctcgcaattcattacatggtccagcaaccaatcatgtttcaagaattgattatggaacaatggccaatgatgatagtaataagaaaccaagccctgctaacacgagtgtgcagagtgctgagagtgattttgcagttgatcagaagcagcaaagtcaatcatggacacctatttctggaagtatatctgcaaacgaaaatcacaagaactctgatagtcattcaacacgtagtactgtaacgcctcctgattatgcatttcttcaggtatctgacagtgatacacagacacaatcaatcaaagtacaacaaccattgaagcaacaacctaaactgctcaacaagaaagagagtgcagctaaagaagacgtcaggattgtagacgacaattgctctccaacttctgcacatatcacttcaagtagcaacatgtctcacactgacaagaaagttgatgccaatccaacttctgcatcagcagctatgaaggaggcaatgaattttgctgaagctaggttaaaggctgcaaaagcattgttagagggaaaaggtgacagttttaaattgcggaagaagccaagtcatcttaaaagcacaaggtctacagaaatcaagtctcctatttctgtagaggccgatacttctgaacaaaaactatgggtgaaaaagtcatcggaagaagaaaagaaccctgacgattctttgtctgacaagcacaaaaagctgactgcagtcagattagatcattttgatgacaatggaaaaaaggtacttccattggagaagcctgagcatatggtgcaacactgcactgaatcctgtcaaacttccagtaaactacaaaaactaggcaactggaagtcaggtaatgacttttttgagctaacccgagatgatcagaaatgcaaaaatgatgaagccacagagggaggtgataaatgtgagcaaatgaatcctattactagtgtcatcaatgatcacaatgaaattgaattcaatgcagcaggctctgacttggacaggtatgaaaaactatgggaggttaatgatggcaggagtgtgggggtgaaacctgtaaatctgagagagaacaagacagctcccgtggacaaagatagtgtgtctgtgattttagaatcttctacagaaaataaggcacaccaaaagactcacaactcaattggtgagggacttgtaacactgaaaaatgctaaggaaagccatggtactgataagtgctttgagcttccttctatgagtggagcctccacaaagctggatgtcttcaaggatgtgtcaggttcatttccggaggctcgctcatcagtaaatgccagcgatcttggagaccatggtaatattagtccaaacttaagtccattagcaggaacatcacaagaggacacaaccagtaaactggtatcagaagtatcttgcgatggtgggatgcaacacacttctcgtagtaatgaaaagctacaggaatcctcagatgtatctgatgttgctatttcccagggaagtaacattaaatcattcattttagaagaacttaaagaatctgatgtatgtgatgctttcatgaggggacctaatggaaaagggcaggaagctgaaaattatggaagagaaaaattcagctttattgatggatcactcttgctgcgaccacacttccataacaaaggtgctaagatgaatgtaatctctgaggaagtacagaaagtcaaaaatgaggagaaacttggtccgtgtacacaccccgaagtaacaattgtggatctggatggtgattgtcctaaagatttgaatgatgttattctacaaaatgatgactttgcagacccagaagaatcaaacatgcctaatgtatttgaggtagctagcaagttgattaaaagagatctggatcaagaaatgcatgggtcattaggacatggtgaagaggagaatatggaagaaggaacagatgtacatctttgtgatattaatggcaaagaagtagatgaaaccttgttagaaaatagtgtgtgtacagatactgaagaaggatgtgctcattgtaaccaggaagaccagaattcatctgacagcaccaacagaggaaaaagtgatgtagataacatgtgttatacatcttgtgacgaggttaggtctgaatcattttcaggcgatgaagttgttatcaaaactacaattgataaaatcggggatgtttccaacagaggaggaagagaattatcaacagaaaggtctacatgtgaagatcatggcaacgcaatcataatggaagaaaaagacactacaacaaggatatcaaaggcagagcatgcatcatctcccttggagacgatgtgtggtgtaactaaatctgctgaagctcccacaacaagggagaacatgacaacagcagatagtgcatgtgaaaaggacaaagggtcttctcaaagagtacaggaggaaaacgaaagtgaaaggagattggagaaagaaagagaagttgaagagaaggaaagaaggaaattggagaaagaaagagaacttgccgaagagaaggaaagaaggaaatttgagaaagaaagagaacttgccgaagagaaggaaagaagaaaaatggagaaagaaaaagaacatgccgaagagaaggaaagaagtaaattggagaaagaaaaagaacttgctgaagagaaggaaagacataaattgaagaaagagagagaacttgctgaagagaaggaaagaagaagattagaagaggcggaaagggagagggagcgtaaaaaggatagacttgctgttgaaagagcgacaagagaagcacatgagagagcatttgccgaagctcgtgaaaaggcagaaaaaatggctttggaaagaattaatgctgcacggcagcgggcatctgcagaggcccgagagaaagaagatagagcaagtgtcgaaccagctgctgaaagggctactagagaagctaggataaaagcagaacgtgcggcagtcgagcgagcaactgctgaagctcgggagcgggcaatagaaaaggcaaaggctgagaaggctcttgcagaggcaagagagcggagggaacgatacaaatcctctttcaaggagagttttaagtccaccaatcaggatattcgacaggagtcacagtttcatagggcaacttctagtaatttcatccgaaacccagattccagcaacagagcaatggttgaggttgagtccgctttaagacataaagcaagattagagaggcatcaacgcacagctgagcgtgtgacaaaagctcttgccgagaagaacacgcgggacctgctggctcaaagagagcaagcagagaaacataggctgtctgaattcctggatcctgagatcaagagatggtcaaatggaaaggaaggaaatctgagggccctgctatccacattgcaatatattcttggtgccgatagtggctggcaaccggtgccactaacagatctcattacagcggttgctgtgaagaaagcttacaggaaggcaaccctatgtgtccatccagataaactacagcagaggggcgctacgatcagacagaaatacatatgtgagaaggtttttgatcttcttaaggatgcttggaacaaattcacttcggaggagcgctagggtggcgggggtgctagagcggccgtttattttgaggcaggcgattcgtatattttctatagcgacgtcgtcagtttcttgattcaaaactgattgtaaatatgcagttgtagccctagatatccgtgtcagaaacacagcgcagatgatgctggttagtaccttatctcagaatcagttcagcaaaaagagctccattgctcgtaagtttccaagcccgcgcggtgggtcgaaaactgcccaatgcattggtcagatggatcctttacggtagagtttcaggtagttagagaatagggatgactgacacgattggtcggtcggacggaaacagccggctcttctagctccggaaacctgtcgtaggacttgcccccgtccaaaaaagagagataaaattctagttccatctaaacaaagtgttctagaatttaatcaaatctataaaaatgatttatctcaatgttacattattgtaactaaaaaacggc

SEQ ID NO: 60399 - DNA, 1188 bp, Zea Mays
tggaaaaattcatgcaatgtgtggagaccttttatgatggtaatgatgaaaaggaatatagggctgttaatgaggacttggataagttccaaaagagacaaggatccttctcaaagaagatggcaaggagctgtgaacgctttgagttccaaccggcgtcttggtggaggctttatggaggtggagcaccagatttgcaatacatggctattagaatcctctcactgacatctagctcttctggatgtgaaaggaattggagcacctttgaacaggtcagtttcatcatacaaagagaaggaataggcttacaacagagcgtctaaactctctagtattcatccaattcaataataaattgctgtccaagaaggagaagattgccagaaagagtaattatgaagtgctcctaagtagtgatgcttctgaagctcaagggtttttctttgagggaggagatgatcatgcattggctgtctttagggatgaggaagatgaaggagtaatgccggggacagggataccatggagtgtccttggagaagcaatgggaactaatgaacaacttcaacctcgcaggagtgcaagagtggctagagagttgtatgatgaagaagagtgggaatctgaaactgaagatcctaatcatctagaagatgacattgcctatgaggatgatgaggagtgaggagattgcatgatggcagcatgctgccaagttatctaaatattaatatctagttatttacttatccaaatgtgtgtggactgtggaccataaaaccattaatgtgtgttgtattgttatttaatttgtggaccattaaggcatgtgatgaactgtgagtgttttctatatattttcttgtgatcctttgacttgtgaattgtgatgttgccctgttgtttggaagcttggctgtgcatgtacaatattgagctgcccctcatagatgagtttctactctttccaaagtatctgattgtagagtttttcagattattaacttgtctctctttgatgatcagctgctgttggatgcaacttgcaagaagccaaggaggaaagcaacttatgtcaaaaataaatatgcagaacagcaagaggtatgttcactagtattactacttagttgtgttattattacttagtacttactactgatcttgctctcggcagcacaaaaa

SEQ ID NO: 60400 - DNA, 1661 bp, Zea Mays
ggatttgggagaggaatggtgggagatagcgccgtaccccgtggtcagccgccagtgtttcgcactttgctattcagcttcgttcttcaccggttcaccctagccgccaccccaacccccagcgacagggaccttcgccgccaggccgcccccaatccctagcgactgcgagcaccgtcgccaggcgccgtgcagcgagcgtcgccgcctggcgaagtcgcgcgactcgtgccctgcagcgagcgccgctgtcccgcacccaccgtcgaacggctgccgatgcccaacgccctgcagcgagttgcgccgtcgtccgcttcctctcgctggtaacctcgtgtttcgatttggacagattgctcgtgacttggtgttgcgccgccgaccgagcctccttcccctaagtccctaaccgcctaccctagtccaccacctgccgcagctctcgcctccgtcaagatccgaacccctcgcacgcggcacgaccaaatcctagacacctgatcccaatgcgcagggccctcggcagagagacgttactgcgccggcaccgtggatcggcactgctgtggctagctgtaacggcactggtcacaggcaccatctgcctctggtcgtccttctccgttggcctcctcagcacctacagggtccaggatgttgttgcaaatgagttgtggagaaccgtagattcaaatggttggagagcatcttctgcaccacgcatctgttggcctcccccaccagctgaatctgagagcaatgggtacttgcgtgtctggtgcaacggcggcttgacccaacaacgcagtgcaattacttctgccttgattttgtagatatgtaatgctgttgtcgtagcacgaatcatgaatgctacactagtgctgccagagttagacacaaattcattttggcacgatgagagtggttttgtagatatatatgatgttccccacttcatcaacacattgaaatatgatgttcgaattgtcatgagcattccaaaaatcactgcacaaggaaagaccaagaagctcaaagcatataagattttacctcctagagatgcacccgttacttggtacagaacaactgctttggagagactaaggaagtatggtgcaatatatttaactccattttcacaccgtttggcagaaaaaattgatgatccagagttccagagattgagatgcagggtgaattatcacgcactacgatttaagccaagtatcatgaaaacaagtagtgatatagcgaataagctccattcagaaggccatttcatgtcaattcatcttcggtttgagctggatgtgcttgcatatgctgggtgcttcgacatattcacacctgaagaacaggaaatcctgttgaggcatcggaacaaatattttccattgctgttgaggtattggggcaaatattttccaggaaacacacctgactacagggaaagaaggctcattggaaagtgccctttaactccagaagagttaattgctgtggatgggggtacaaatttggctcagtacctagtcagattctggctcaagggtattgccaagcttggccctgcatctcagagaggcgatcgtaagtgcttgatctcccagcaccgtcaacttcctacgacaacagaattagcaccaatttag

SEQ ID NO: 60401 - DNA, 2962 bp, Zea Mays
ggatttgggagaggaatggtgggagatagcgccgtaccccgtggtcagccgccagtgtttcgcactttgctattcagcttcgttcttcaccggttcaccctagccgccaccccaacccccagcgacagggaccttcgccgccaggccgcccccaatccctagcgactgcgagcaccgtcgccaggcgccgtgcagcgagcgtcgccgcctggcgaagtcgcgcgactcgtgccctgcagcgagcgccgctgtcccgcacccaccgtcgaacggctgccgatgcccaacgccctgcagcgagttgcgccgtcgtccgcttcctctcgctggtaacctcgtgtttcgatttggacagattgctcgtgacttggtgttgcgccgccgaccgagcctccttcccctaagtccctaaccggattgtggaagtgtgaactgtgccttactgaaatcgagatgccatttgagcaagttttcaactattttgttggattggcgaggcctaccctagtccaccacctgccgcagctctcgcctccgtcaagatccgaacccctcgcacgcggcacgaccaaatcctagacacctgatcccaatgcgcagggccctcggcagagagacgttactgcgccggcaccgtggatcggcactgctgtggctagctgtaacggcactggtcacaggcaccatctgcctctggtcgtccttctccgttggcctcctcagcacctacagggtccaggatgttgttgcaaatgagttgtggagaaccgtagattcaaatggttggagagcatcttctgcaccacgcatctgttggcctcccccaccagctgaatctgagagcaatgggtacttgcgtgtctggtgcaacggcggcttgacccaacaacgcagtgcaatatgtaatgctgttgtcgtagcacgaatcatgaatgctacactagtgctgccagagttagacacaaattcattttggcacgatgagagtggttttgtagatatatatgatgttccccacttcatcaacacattgaaatatgatgttcgaattgtcatgagcattccaaaaatcactgcacaaggaaagaccaagaagctcaaagcatataagattttacctcctagagatgcacccgttacttggtacagaacaactgctttggagagactaaggaagtatggtgcaatatatttaactccattttcacaccgtttggcagaaaaaattgatgatccagagttccagagattgagatgcagggtgaattatcacgcactacgatttaagccaagtatcatgaaaacaagtagtgatatagcgaataagctccattcagaaggccatttcatgtcaattcatcttcggtttgagctggatgtgcttgcatatgctgggtgcttcgacatattcacacctgaagaacaggaaatcctgttgaggcatcggaacaaatattttccattgctgttgaggtattggggcaaatattttccaggaaacacacctgactacagggaaagaaggctcattggaaagtgccctttaactccagaagaggtaggtcttattctacgtgctacgggatttgataactcaacatggatttaccttgctcctggcaagctctttggtgggaaacacttcatgaagccattcaaggctatgtttccacgtcttaaaaaccatagtatgatcagaagtggaaagctggaagaaaatatccgagggctagcagggtcagcagttgattacatggtctgtctcctgtcggacatttttatatatgatggtccgagcaacttcgcagacaatctcatgggtcatcgtctatactatggtttccgaaccacgatcacaccaaacaagaaggcccttgctcggatattcatggacagggaggaagggcacacatctgcatttgaggagagggtcaggcaggtcatgctcacccattttggcgccccccacaagcgcatccatccagagtctttctacacaaacccatggccagagtgcttctgccagacgaaagctaggaatcatgctgaccggtgcccacacaacagtgtaaatgatgtccttgaaagttggttccataataaagaagatgtagaagtggaagctactaatcaaactgactccaccagctaaaccgagagttggctggtggaactgagttatcaaaggtttattgattgagaacagattgtttgtcacagacctgcgaatgacatcattggaggaaggattgatggctccagatctctgtaggcgattatgttcgactcaagatttagttgttgagattcttagtctgggagggtcagaaccagattttggataggtttacattgtcatgtagagttctgtggaagaaaaatcatacgaacgtcatgaactatgtggctactacaattggagatctttaccccatatgctatagctgagtgtttggtggcttcagttctgttggagttatttgctgttcctcactatacatatctggttgaattcatgcgttcctggtcctggaactggaacttccccagttttgatttttgcaattcaccgtaatgctaaaaagtcgactatctccaggctccctatcccactccctatttcaaagttctctctgcaacaatacatctatagtgcaaaacagtgttatacacgcctgcatgcacgacgttgctggagttggcctaattccgggttgctggagttggcctaattccgggctccttcgaggtccatggcagcatgtaactgtattgatttgttctccttgtttgtagcctcacacttggttgaatatttcgaaaaatctagaattccaatattttttcttatttttattttgtttttttagtttctttagaaagagataacagtcctttgtacttgtatatatgtacacaacacatattaatgcaaaccatgtattgtgtcagtcgtttgaac

SEQ ID NO: 60402 - DNA, 2282 bp, Zea Mays
cagagtattactgatgggcttacctgcagactgcagatgttgttgcaaatgagttgtggagaaccgtagattcaaatggttggagagcatcttctgcaccacgcatctgttggcctcccccaccagctgaatctgagagcaatgggtacttgcgtgtctggtgcaacggcggcttgacccaacaacgcagtgcaattacttctgccttgattttgtagatatgtaatgctgttgtcgtagcacgaatcatgaatgctacactagtgctgccagagttagacacaaattcattttggcacgatgagagtggttttgtagatatatatgatgttccccacttcatcaacacattgaaatatgatgttcgaattgtcatgagcattccaaaaatcactgcacaaggaaagaccaagaagctcaaagcatataagattttacctcctagagatgcacccgttacttggtacagaacaactgctttggagagactaaggaagtatggtgcaatatatttaactccattttcacaccgtttggcagaaaaaattgatgatccagagttccagagattgagatgcagggtgaattatcacgcactacgatttaagccaagtatcatgaaaacaagtagtgatatagcgaataagctccattcagaaggccatttcatgtcaattcatcttcggtttgagctggatgtgcttgcatatgctgggtgcttcgacatattcacacctgaagaacaggaaatcctgttgaggcatcggaacaaatattttccattgctgttgaggtattggggcaaatattttccaggaaacacacctgactacagggaaagaaggctcattggaaagtgccctttaactccagaagaggtaggtcttattctacgtgctacgggatttgataactcaacatggatttaccttgctcctggcaagctctttggtgggaaacacttcatgaagccattcaaggctatgtttccacgtcttaaaaaccatagtatgatcagaagtggaaagctggaagaaaatatccgagggctagcagggtcagcagttgattacatggtctgtctcctgtcggacatttttatatatgatggtccgagcaacttcgcagacaatctcatgggtcatcgtctatactatggtttccgaaccacgatcacaccaaacaagaaggcccttgctcggatattcatggacagggaggaagggcacacatctgcatttgaggagagggtcaggcaggtcatgctcacccattttggcgccccccacaagcgcatccatccagagtctttctacacaaacccatggccagagtgcttctgccagacgaaagctaggaatcatgctgaccggtgcccacacaacagtgtaaatgatgtccttgaaagttggttccataataaagaagatgtagaagtggaagctactaatcaaactgactccaccagctaaaccgagagttggctggtggaactgagttatcaaaggtttattgattgagaacagattgtttgtcacagacctgcgaatgacatcattggaggaaggattgatggctccagatctctgtaggcgattatgttcgactcaagatttagttgttgagattcttagtctgggagggtcagaaccagattttggataggtttacattgtcatgtagagttctgtggaagaaaaatcatacgaacgtcatgaactatgtggctactacaattggagatctttaccccatatgctatagctgagtgtttggtggcttcagttctgttggagttatttgctgttcctcactatacatatctggttgaattcatgcgttcctggtcctggaactggaacttccccagttttgatttttgcaattcaccgtaatgctaaaaagtcgactatctccaggctccctatcccactccctatttcaaagttctctctgcaacaatacatctatagtgcaaaacagtgttatacacgcctgcatgcacgacgttgctggagttggcctaattccgggttgctggagttggcctaattccgggctccttcgaggtccatggcagcatgtaactgtattgatttgttctccttgtttgtagcctcacacttggttgaatatttcgaaaaatctagaattccaatattttttcttatttttattttgtttttttagtttctttagaaagagataacagtcctttgtacttgtatatatgtacacaacacatattaatgcaaaccatgtattgtgtcagtcgtttgaac

SEQ ID NO: 60403 - DNA, 2250 bp, Zea Mays
tactgatgggcttacctgcagactgcagatgttgttgcaaatgagttgtggagaaccgtagattcaaatggttggagagcatcttctgcaccacgcatctgttggcctcccccaccagctgaatctgagagcaatgggtacttgcgtgtctggtgcaacggcggcttgacccaacaacgcagtgcaatatgtaatgctgttgtcgtagcacgaatcatgaatgctacactagtgctgccagagttagacacaaattcattttggcacgatgagagtggttttgtagatatatatgatgttccccacttcatcaacacattgaaatatgatgttcgaattgtcatgagcattccaaaaatcactgcacaaggaaagaccaagaagctcaaagcatataagattttacctcctagagatgcacccgttacttggtacagaacaactgctttggagagactaaggaagtatggtgcaatatatttaactccattttcacaccgtttggcagaaaaaattgatgatccagagttccagagattgagatgcagggtgaattatcacgcactacgatttaagccaagtatcatgaaaacaagtagtgatatagcgaataagctccattcagaaggccatttcatgtcaattcatcttcggtttgagctggatgtgcttgcatatgctgggtgcttcgacatattcacacctgaagaacaggaaatcctgttgaggcatcggaacaaatattttccattgctgttgaggtattggggcaaatattttccaggaaacacacctgactacagggaaagaaggctcattggaaagtgccctttaactccagaagaggtaggtcttattctacgtgctacgggatttgataactcaacatggatttaccttgctcctggcaagctctttggtgggaaacacttcatgaagccattcaaggctatgtttccacgtcttaaaaaccatagtatgatcagaagtggaaagctggaagaaaatatccgagggctagcagggtcagcagttgattacatggtctgtctcctgtcggacatttttatatatgatggtccgagcaacttcgcagacaatctcatgggtcatcgtctatactatggtttccgaaccacgatcacaccaaacaagaaggcccttgctcggatattcatggacagggaggaagggcacacatctgcatttgaggagagggtcaggcaggtcatgctcacccattttggcgccccccacaagcgcatccatccagagtctttctacacaaacccatggccagagtgcttctgccagacgaaagctaggaatcatgctgaccggtgcccacacaacagtgtaaatgatgtccttgaaagttggttccataataaagaagatgtagaagtggaagctactaatcaaactgactccaccagctaaaccgagagttggctggtggaactgagttatcaaaggtttattgattgagaacagattgtttgtcacagacctgcgaatgacatcattggaggaaggattgatggctccagatctctgtaggcgattatgttcgactcaagatttagttgttgagattcttagtctgggagggtcagaaccagattttggataggtttacattgtcatgtagagttctgtggaagaaaaatcatacgaacgtcatgaactatgtggctactacaattggagatctttaccccatatgctatagctgagtgtttggtggcttcagttctgttggagttatttgctgttcctcactatacatatctggttgaattcatgcgttcctggtcctggaactggaacttccccagttttgatttttgcaattcaccgtaatgctaaaaagtcgactatctccaggctccctatcccactccctatttcaaagttctctctgcaacaatacatctatagtgcaaaacagtgttatacacgcctgcatgcacgacgttgctggagttggcctaattccgggttgctggagttggcctaattccgggctccttcgaggtccatggcagcatgtaactgtattgatttgttctccttgtttgtagcctcacacttggttgaatatttcgaaaaatctagaattccaatattttttcttatttttattttgtttttttagtttctttagaaagagataacagtcctttgtacttgtatatatgtacacaacacatattaatgcaaaccatgtattgtgtcagtcgtttgaac

SEQ ID NO: 60404 - DNA, 2030 bp, Zea Mays
acctcaatggcagcgccgcacatcactggtgtggtggcgctcctcaaggcagcccacccggactggtctccggctgccataaagtcggccatgctgaccacggcggaccggctggacaacggcggccagcccattctggacgagcagcacgccgaagcgacatccttcgccatgggcgccggccacgtcaacgtctccagggccaccgacccggccggggctggtgtatgatcttgacgccagggactatgcaagctacatctgcggcctcctgggggagaaggcactcaagaccatcactagcccaagctcgacctgctcggaggtggggagcatcccagaatcgtggctcaactatcctaccataacggtgccactcaaggatacgccggtcacggtaccccggacccttacgaacgtcggcccggcgaagacctacggtgcgaacgtgcaaggcccatcctcgatggacatctgggtttccccggactacctggtgttctctgaacccggggagaagaagacgttcaacgtgacggtgacggttgttggaactcactagcgctcaagactagaactcacaccagaaagaaaagtagctacggagacaagcaaatatggcgccgaacgccagacgcacagacgtcgtttgtttttctattgctttgccgtcattttctctattagcagtacatggagtatttatagcttgaggacgtgaagcaacggactgcacgcagccactactcctgctcacgatccgcaccactcggccaacgcattggacgcggcaaacgcgcacgtcctgaccaagccaacaacggatcacggcatctcagcatgcagcttcacgcgtcgcacgaaccaagctgctgactgtgattaccgcacaacgcacgccttcatacacgtgcatgctaacaaacttgcactcgcgccgtgcacgcacacgaacgcgacacacgctaaccacggcaacatgcagacacacgcacacacatcgacctgaccagcgcacacacacccggtgtcgagtttattcctaacaatctccccctaaacacggcacggctttctgcactcacaggagcgtcgcctcctcttcggcattggcaaatagtgcctcttccttcttcggcttggggcagtcccgtgcaaagtggccgcggttgccacagttgaagcatttgccgatcgtcgacttcttcttttttcgagctttccactcggcctccgtgaggaggagctgatcgtcgcgccgttcaccaccggcatgagtacgccgccgagaacgctcatcgaacgccttgagacgtccgagcgcctcctcgaacggcatcgtctcgacgtcgcagaactgctcgatgcccgcgacgacggggaagagccgatctggaacggtgtcgaggagcttcttcaccatggcagcgtcgtcgagcgtcgcgccaagcccggcgtaacgcgccgccataccgctgattttgcctgcgtagtcgtccaatgcctcctcgtcctccatgtacagcttgtcgaactcccccttgagcgtggcgaggcgtgccgtcttgacccgatccgcaccgacgaaacgagtcttgaggctcgcccacacctccgctgctgttttcttggtggagacctgcatcaagatgtcatcgggcagagcttggagaagctgtgcccgcgccgtcttgttcttcaccgcattcacctcgccattatctggtggagacacggcctcccagagaccttgcgcgtcgaggatcgactccaccttgatcgcccacgccgtgtagctcgccggcgacagcaccgggtatgacatggagaccgaactccccccggcgccgtgcggaaccatcgccatggactctgactcgaggtagtagcgcaggatcttgggcataaaatggctctgataccaaatgttggaactcactagcgctcaagactagaactcacaccagaaagaaaagtagctacggagacaagcaaatatggcgccgaacgccagacgcacagacgtcgtt

SEQ ID NO: 60405 - DNA, 2377 bp, Zea Mays
acactcgtggttgtttaccgtgcgccgggctcctcccccacatgggcaagcgcaggcgcggcacggggagcagggcacacgcggcgtagtagcgccaagcgaggccgcggccacgccttctccaccgttcgtccgtccattcccattctcatttccatttgcctcgctcgccttcctcctccccactccactccattccaacgcaacggcctcgccccgctttataggccgccgcccgcgccacatcgccaccgtctcgcaccgtcgcggccacccattctctctcgtccatcgcatcgctccggctcccagcgcaatcgatccatccgtccctagctatgcagttcagcagcgtgcttcccctagagggaaaagcgtgtatgagcccagtgaggagaggcagtggaggttatgggagtgagaggatgaggatcaactgctgcagcatcaggcgcaacaaggcactgaggaggatgtgtttcagtgcaaggggtgctgtgagcagcacgcagtgtgtgctcacatcagatgctggcccagacactcttgtcgtccgaacatcctttcggaggaattatgctgatcctaatgaagtcgctgccgtcattttgggtggtggtaccgggactcagcttttccctctcacaagcacaagggccacccctgctgttcctattggaggatgttacaggcttattgatatccccatgagcaactgtttcaacagtggcataaacaagatatttgttatgactcagttcaactcagcttctcttaaccgtcacattcatcgtacctatcttggtggggggatcaacttcactgatggatctgttgaggtgctggctgcaacacaaatgcctggggaggctgctggttggttccagggcacagcagacgccgttagaaaatttatctgggtacttgaggattattacaagcataaagctatagaacacattttgattttgtcaggagatcaactctatcgtatggattacatggagcttgtgcagaaacatgtcgatgacaatgcagacataactttatcatgcgctcctgttggagagagtcgagcatctgactatggattagttaagttcgatagttcaggccgtgtaattcagttctctgagaaaccaaagggtgctgccttggaagaaatgaaagtggataccagcttcctcaatttcgccattgattccccagctgaatatccctatatcgcttcaatgggagtttacgtttttaagagagatgttttgttagaccttctaaagtcacggtatgctgaactgcatgactttggttctgaaattctgcccaaggctttgcatgagcacaatgtacaggcatatgttttcactgactactgggaggacattggaacaatcagatctttctttgatgcaaacatggccctctgcgagcagcctccaaagttcgagttttacgatccgaaaacaccattcttcacttcccctcggtacttgccaccaacgaagtcggataagtgcaggattaaagacgcgatcatttcacacggctgcttcttgcgtgagtgtgccatcgagcactctattgttggtgttcgctcacgcctaaactctggatgcgagctcaagaataccatgatgatgggtgcggatttgtatgagaccgaagacgagatctcaaggctactggcagagggcaaggtgcccattggcgtaggggagaacacgaagataagcaactgcatcatcgacatgaatgccagggttggaaggaacgtctccataacaaacaaagagggcgtccaagaagccgaccggccggacgaaggatactacatccggtctgggatcgtggtagtcctgaagaacgcaaccatcaaggacggcaccgtcatatagagactaactttggccttacgcatggcgtgcaaggttacaggttagtcatcgtcttgagagttgagacttagtttgaggcgcgcgcccgaccttgacttgagccgtcggagggacaagaacatgaggaagaagggctggtggtgccggatgttgccatggacgacgagaaatggtttggtgcggtcgcatcggttccagtagctagctcttccgatgttattaatatatgtatctagtggagtagtgcgaacagtgcaataagctgggcgagcaaagccgcggcaactcttggcttggggattgttggtgcatcttgtaaataataaactcggacgcagcaaatgaaacatgcccctcatcttcttccatatcttcgcaccgtatgccttgccctgtctttatatgagacgatggtgtaggcatgatgacacgtctggttggttgccagcgctgccaggttgtccgaggccagccatgatgag

SEQ ID NO: 60406 - DNA, 2453 bp, Zea Mays
acactcgtggttgtttaccgtgcgccgggctcctcccccacatgggcaagcgcaggcgcggcacggggagcagggcacacgcggcgtagtagcgccaagcgaggccgcggccacgccttctccaccgttcgtccgtccattcccattctcatttccatttgcctcgctcgccttcctcctccccactccactccattccaacgcaacggcctcgccccgctttataggccgccgcccgcgccacatcgccaccgtctcgcaccgtcgcggccacccattctctctcgtccatcgcatcgctccggctcccagcgcaatcgatccatccgtccctagtaaggattccgcaaaagtatggctcccttttcccttgattgatgcggggatttgtcaggaactaggtgtgcttcagctatgcagttcagcagcgtgcttcccctagagggaaaagcgtgtatgagcccagtgaggagaggcagtggaggttatgggagtgagaggatgaggatcaactgctgcagcatcaggcgcaacaaggcactgaggaggatgtgtttcagtgcaaggggtgctgtgagcagcacgcagtgtgtgctcacatcagatgctggcccagacactcttgtcgtccgaacatcctttcggaggaattatgctgatcctaatgaagtcgctgccgtcattttgggtggtggtaccgggactcagcttttccctctcacaagcacaagggccacccctgctgttcctattggaggatgttacaggcttattgatatccccatgagcaactgtttcaacagtggcataaacaagatatttgttatgactcagttcaactcagcttctcttaaccgtcacattcatcgtacctatcttggtggggggatcaacttcactgatggatctgttgaggtgctggctgcaacacaaatgcctggggaggctgctggttggttccagggcacagcagacgccgttagaaaatttatctgggtacttgaggattattacaagcataaagctatagaacacattttgattttgtcaggagatcaactctatcgtatggattacatggagcttgtgcagaaacatgtcgatgacaatgcagacataactttatcatgcgctcctgttggagagagtcgagcatctgactatggattagttaagttcgatagttcaggccgtgtaattcagttctctgagaaaccaaagggtgctgccttggaagaaatgaaagtggataccagcttcctcaatttcgccattgattccccagctgaatatccctatatcgcttcaatgggagtttacgtttttaagagagatgttttgttagaccttctaaagtcacggtatgctgaactgcatgactttggttctgaaattctgcccaaggctttgcatgagcacaatgtacaggcatatgttttcactgactactgggaggacattggaacaatcagatctttctttgatgcaaacatggccctctgcgagcagcctccaaagttcgagttttacgatccgaaaacaccattcttcacttcccctcggtacttgccaccaacgaagtcggataagtgcaggattaaagacgcgatcatttcacacggctgcttcttgcgtgagtgtgccatcgagcactctattgttggtgttcgctcacgcctaaactctggatgcgagctcaagaataccatgatgatgggtgcggatttgtatgagaccgaagacgagatctcaaggctactggcagagggcaaggtgcccattggcgtaggggagaacacgaagataagcaactgcatcatcgacatgaatgccagggttggaaggaacgtctccataacaaacaaagagggcgtccaagaagccgaccggccggacgaaggatactacatccggtctgggatcgtggtagtcctgaagaacgcaaccatcaaggacggcaccgtcatatagagactaactttggccttacgcatggcgtgcaaggttacaggttagtcatcgtcttgagagttgagacttagtttgaggcgcgcgcccgaccttgacttgagccgtcggagggacaagaacatgaggaagaagggctggtggtgccggatgttgccatggacgacgagaaatggtttggtgcggtcgcatcggttccagtagctagctcttccgatgttattaatatatgtatctagtggagtagtgcgaacagtgcaataagctgggcgagcaaagccgcggcaactcttggcttggggattgttggtgcatcttgtaaataataaactcggacgcagcaaatgaaacatgcccctcatcttcttccatatcttcgcaccgtatgccttgccctgtctttatatgagacgatggtgtaggcatgatgacacgtctggttggttgccagcgctgccaggttgtccgaggccagccatgatgag

SEQ ID NO: 60407 - DNA, 2290 bp, Zea Mays
acactcgtggttgtttaccgtgcgccgggctcctcccccacatgggcaagcgcaggcgcggcacggggagcagggcacacgcggcgtagtagcgccaagcgaggccgcggccacgccttctccaccgttcgtccgtccattcccattctcatttccatttgcctcgctcgccttcctcctccccactccactccattccaacgcaacggcctcgccccgctttataggccgccgcccgcgccacatcgccaccgtctcgcaccgtcgcggccacccattctctctcgtccatcgcatcgctccggctcccagcgcaatcgatccatccgtccctaggtgtgcttcagctatgcagttcagcagcgtgcttcccctagagggaaaagcgtgtatgagcccagtgaggagaggcagtggaggttatgggagtgagaggatgaggatcaactgctgcagcatcaggcgcaacaaggcactgaggaggatgtgtttcagtgcaaggggtgctgtgagcagcacgcagtgtgtgctcacatcagatgctggcccagacactcttgtcgtccgaacatcctttcggaggaattatgctgatcctaatgaagtcgctgccgtcattttgggtggtggtaccgggactcagcttttccctctcacaagcacaagggccacccctgctgttcctattggaggatgttacaggcttattgatatccccatgagcaactgtttcaacagtggcataaacaagatatttgttatgactcagttcaactcagcttctcttaaccgtcacattcatcgtacctatcttggtggggggatcaacttcactgatggatctgttgaggtgctggctgcaacacaaatgcctggggaggctgctggttggttccagggcacagcagacgccgttagaaaatttatctgggtacttgaggattattacaagcataaagctatagaacacattttgattttgtcaggagatcaactctatcgtatggattacatggagcttgtgcagaaacatgtcgatgacaatgcagacataactttatcatgcgctcctgttggagagagtcgagcatctgactatggattagttaagttcgatagttcaggccgtgtaattcagttctctgagaaaccaaagggtgctgccttggaagaaatgaaagtggataccagcttcctcaatttcgccattgattccccagctgaatatccctatatcgcttcaatgggagtttacgtttttaagagagatgttttgttagaccttctaaagtcacggtatgctgaactgcatgactttggttctgaaattctgcccaaggctttgcatgagcacaatgtacaggcatatgttttcactgactactgggaggacattggaacaatcagatctttctttgatgcaaacatggccctctgcgagcagcctccaaagttcgagttttacgatccgaaaacaccattcttcacttcccctcggtacttgccaccaacgaagtcggataagtgcaggattaaagacgcgatcatttcacacggctgcttcttgcgtgagtgtgccatcgagcactctattgttggtgttcgctcacgcctaaactctggatgcgagctcaagaataccatgatgatgggtgcggatttgtatgagaccgaagacgagatctcaaggctactggcagagggcaaggtgcccattggcgtaggggagaacacgaagataagcaactgcatcatcgacatgaatgccagggttggaaggaacgtctccataacaaacaaagagggcgtccaagaagccgaccggccggacgaaggatactacatccggttagtcatcgtcttgagagttgagacttagtttgaggcgcgcgcccgaccttgacttgagccgtcggagggacaagaacatgaggaagaagggctggtggtgccggatgttgccatggacgacgagaaatggtttggtgcggtcgcatcggttccagtagctagctcttccgatgttattaatatatgtatctagtggagtagtgcgaacagtgcaataagctgggcgagcaaagccgcggcaactcttggcttggggattgttggtgcatcttgtaaataataaactcggacgcagcaaatgaaacatgcccctcatcttcttccatatcttcgcaccgtatgccttgccctgtctttatatgagacgatggtgtaggcatgatgacacgtctggttggttgccagcgctgccaggttgtccgaggccagccatgatgag

SEQ ID NO: 60408 - DNA, 2300 bp, Zea Mays
acactcgtggttgtttaccgtgcgccgggctcctcccccacatgggcaagcgcaggcgcggcacggggagcagggcacacgcggcgtagtagcgccaagcgaggccgcggccacgccttctccaccgttcgtccgtccattcccattctcatttccatttgcctcgctcgccttcctcctccccactccactccattccaacgcaacggcctcgccccgctttataggccgccgcccgcgccacatcgccaccgtctcgcaccgtcgcggccacccattctctctcgtccatcgcatcgctccggctcccagcgcaatcgatccatccgtccctaggtgtgcttcagctatgcagttcagcagcgtgcttcccctagagggaaaagcgtgtatgagcccagtgaggagaggcagtggaggttatgggagtgagaggatgaggatcaactgctgcagcatcaggcgcaacaaggcactgaggaggatgtgtttcagtgcaaggggtgctgtgagcagcacgcagtgtgtgctcacatcagatgctggcccagacactcttgtcgtccgaacatcctttcggaggaattatgctgatcctaatgaagtcgctgccgtcattttgggtggtggtaccgggactcagcttttccctctcacaagcacaagggccacccctgctgttcctattggaggatgttacaggcttattgatatccccatgagcaactgtttcaacagtggcataaacaagatatttgttatgactcagttcaactcagcttctcttaaccgtcacattcatcgtacctatcttggtggggggatcaacttcactgatggatctgttgaggtgctggctgcaacacaaatgcctggggaggctgctggttggttccagggcacagcagacgccgttagaaaatttatctgggtacttgaggattattacaagcataaagctatagaacacattttgattttgtcaggagatcaactctatcgtatggattacatggagcttgtgcagaaacatgtcgatgacaatgcagacataactttatcatgcgctcctgttggagagagtcgagcatctgactatggattagttaagttcgatagttcaggccgtgtaattcagttctctgagaaaccaaagggtgctgccttggaagaaatgaaagtggataccagcttcctcaatttcgccattgattccccagctgaatatccctatatcgcttcaatgggagtttacgtttttaagagagatgttttgttagaccttctaaagtcacggtatgctgaactgcatgactttggttctgaaattctgcccaaggctttgcatgagcacaatgtacaggcatatgttttcactgactactgggaggacattggaacaatcagatctttctttgatgcaaacatggccctctgcgagcagcctccaaagttcgagttttacgatccgaaaacaccattcttcacttcccctcggtacttgccaccaacgaagtcggataagtgcaggattaaagacgcgatcatttcacacggctgcttcttgcgtgagtgtgccatcgagcactctattgttggtgttcgctcacgcctaaactctggatgcgagctcaagaataccatgatgatgggtgcggatttgtatgagaccgaagacgagatctcaaggctactggcagagggcaaggtgcccattggcgtaggggagaacacgaagataagcaactgcatcatcgacatgaatgccagggttggaaggaacgtctccataacaaacaaagagggcgtccaagaagccgaccggccggacgaaggatactacatccggtctgggatcgttagtcatcgtcttgagagttgagacttagtttgaggcgcgcgcccgaccttgacttgagccgtcggagggacaagaacatgaggaagaagggctggtggtgccggatgttgccatggacgacgagaaatggtttggtgcggtcgcatcggttccagtagctagctcttccgatgttattaatatatgtatctagtggagtagtgcgaacagtgcaataagctgggcgagcaaagccgcggcaactcttggcttggggattgttggtgcatcttgtaaataataaactcggacgcagcaaatgaaacatgcccctcatcttcttccatatcttcgcaccgtatgccttgccctgtctttatatgagacgatggtgtaggcatgatgacacgtctggttggttgccagcgctgccaggttgtccgaggccagccatgatgag

SEQ ID NO: 60409 - DNA, 2597 bp, Zea Mays
acactcgtggttgtttaccgtgcgccgggctcctcccccacatgggcaagcgcaggcgcggcacggggagcagggcacacgcggcgtagtagcgccaagcgaggccgcggccacgccttctccaccgttcgtccgtccattcccattctcatttccatttgcctcgctcgccttcctcctccccactccactccattccaacgcaacggcctcgccccgctttataggccgccgcccgcgccacatcgccaccgtctcgcaccgtcgcggccacccattctctctcgtccatcgcatcgctccggctcccagcgcaatcgatccatccgtccctagtccgttattccgcgagtacgttgatgatccctccttacggcagtaaggattccgcaaaagtatggctcccttttcccttgattgatgcggggatttgtcaggaactaggcaagaaaatcagtttttttatatagtcttgccctgcatcttgattcagtacatagtgaaatagatttccaggactgcctggtggttaatggttgtgatcgtgcaggtgtgcttcagctatgcagttcagcagcgtgcttcccctagagggaaaagcgtgtatgagcccagtgaggagaggcagtggaggttatgggagtgagaggatgaggatcaactgctgcagcatcaggcgcaacaaggcactgaggaggatgtgtttcagtgcaaggggtgctgtgagcagcacgcagtgtgtgctcacatcagatgctggcccagacactcttgtcgtccgaacatcctttcggaggaattatgctgatcctaatgaagtcgctgccgtcattttgggtggtggtaccgggactcagcttttccctctcacaagcacaagggccacccctgctgttcctattggaggatgttacaggcttattgatatccccatgagcaactgtttcaacagtggcataaacaagatatttgttatgactcagttcaactcagcttctcttaaccgtcacattcatcgtacctatcttggtggggggatcaacttcactgatggatctgttgaggtgctggctgcaacacaaatgcctggggaggctgctggttggttccagggcacagcagacgccgttagaaaatttatctgggtacttgaggattattacaagcataaagctatagaacacattttgattttgtcaggagatcaactctatcgtatggattacatggagcttgtgcagaaacatgtcgatgacaatgcagacataactttatcatgcgctcctgttggagagagcatctgactatggattagttaagttcgatagttcaggccgtgtaattcagttctctgagaaaccaaagggtgctgccttggaagaaatgaaagtggataccagcttcctcaatttcgccattgattccccagctgaatatccctatatcgcttcaatgggagtttacgtttttaagagagatgttttgttagaccttctaaagtcacggtatgctgaactgcatgactttggttctgaaattctgcccaaggctttgcatgagcacaatgtacaggcatatgttttcactgactactgggaggacattggaacaatcagatctttctttgatgcaaacatggccctctgcgagcagcctccaaagttcgagttttacgatccgaaaacaccattcttcacttcccctcggtacttgccaccaacgaagtcggataagtgcaggattaaagacgcgatcatttcacacggctgcttcttgcgtgagtgtgccatcgagcactctattgttggtgttcgctcacgcctaaactctggatgcgagctcaagaataccatgatgatgggtgcggatttgtatgagaccgaagacgagatctcaaggctactggcagagggcaaggtgcccattggcgtaggggagaacacgaagataagcaactgcatcatcgacatgaatgccagggttggaaggaacgtctccataacaaacaaagagggcgtccaagaagccgaccggccggacgaaggatactacatccggtctgggatcgtggtagtcctgaagaacgcaaccatcaaggacggcaccgtcatatagagactaactttggccttacgcatggcgtgcaaggttacaggttagtcatcgtcttgagagttgagacttagtttgaggcgcgcgcccgaccttgacttgagccgtcggagggacaagaacatgaggaagaagggctggtggtgccggatgttgccatggacgacgagaaatggtttggtgcggtcgcatcggttccagtagctagctcttccgatgttattaatatatgtatctagtggagtagtgcgaacagtgcaataagctgggcgagcaaagccgcggcaactcttggcttggggattgttggtgcatcttgtaaataataaactcggacgcagcaaatgaaacatgcccctcatcttcttccatatcttcgcaccgtatgccttgccctgtctttatatgagacgatggtgtaggcatgatgacacgtctggttggttgccagcgctgccaggttgtccgaggccagccatgatgag

SEQ ID NO: 60410 - DNA, 2496 bp, Zea Mays
acactcgtggttgtttaccgtgcgccgggctcctcccccacatgggcaagcgcaggcgcggcacggggagcagggcacacgcggcgtagtagcgccaagcgaggccgcggccacgccttctccaccgttcgtccgtccattcccattctcatttccatttgcctcgctcgccttcctcctccccactccactccattccaacgcaacggcctcgccccgctttataggccgccgcccgcgccacatcgccaccgtctcgcaccgtcgcggccacccattctctctcgtccatcgcatcgctccggctcccagcgcaatcgatccatccgtccctagtccgttattccgcgagtacgttgatgatccctccttacggcagtaaggattccgcaaaagtatggctcccttttcccttgattgatgcggggatttgtcaggaactaggtgtgcttcagctatgcagttcagcagcgtgcttcccctagagggaaaagcgtgtatgagcccagtgaggagaggcagtggaggttatgggagtgagaggatgaggatcaactgctgcagcatcaggcgcaacaaggcactgaggaggatgtgtttcagtgcaaggggtgctgtgagcagcacgcagtgtgtgctcacatcagatgctggcccagacactcttgtcgtccgaacatcctttcggaggaattatgctgatcctaatgaagtcgctgccgtcattttgggtggtggtaccgggactcagcttttccctctcacaagcacaagggccacccctgctgttcctattggaggatgttacaggcttattgatatccccatgagcaactgtttcaacagtggcataaacaagatatttgttatgactcagttcaactcagcttctcttaaccgtcacattcatcgtacctatcttggtggggggatcaacttcactgatggatctgttgaggtgctggctgcaacacaaatgcctggggaggctgctggttggttccagggcacagcagacgccgttagaaaatttatctgggtacttgaggattattacaagcataaagctatagaacacattttgattttgtcaggagatcaactctatcgtatggattacatggagcttgtgcagaaacatgtcgatgacaatgcagacataactttatcatgcgctcctgttggagagagtcgagcatctgactatggattagttaagttcgatagttcaggccgtgtaattcagttctctgagaaaccaaagggtgctgccttggaagaaatgaaagtggataccagcttcctcaatttcgccattgattccccagctgaatatccctatatcgcttcaatgggagtttacgtttttaagagagatgttttgttagaccttctaaagtcacggtatgctgaactgcatgactttggttctgaaattctgcccaaggctttgcatgagcacaatgtacaggcatatgttttcactgactactgggaggacattggaacaatcagatctttctttgatgcaaacatggccctctgcgagcagcctccaaagttcgagttttacgatccgaaaacaccattcttcacttcccctcggtacttgccaccaacgaagtcggataagtgcaggattaaagacgcgatcatttcacacggctgcttcttgcgtgagtgtgccatcgagcactctattgttggtgttcgctcacgcctaaactctggatgcgagctcaagaataccatgatgatgggtgcggatttgtatgagaccgaagacgagatctcaaggctactggcagagggcaaggtgcccattggcgtaggggagaacacgaagataagcaactgcatcatcgacatgaatgccagggttggaaggaacgtctccataacaaacaaagagggcgtccaagaagccgaccggccggacgaaggatactacatccggtctgggatcgtggtagtcctgaagaacgcaaccatcaaggacggcaccgtcatatagagactaactttggccttacgcatggcgtgcaaggttacaggttagtcatcgtcttgagagttgagacttagtttgaggcgcgcgcccgaccttgacttgagccgtcggagggacaagaacatgaggaagaagggctggtggtgccggatgttgccatggacgacgagaaatggtttggtgcggtcgcatcggttccagtagctagctcttccgatgttattaatatatgtatctagtggagtagtgcgaacagtgcaataagctgggcgagcaaagccgcggcaactcttggcttggggattgttggtgcatcttgtaaataataaactcggacgcagcaaatgaaacatgcccctcatcttcttccatatcttcgcaccgtatgccttgccctgtctttatatgagacgatggtgtaggcatgatgacacgtctggttggttgccagcgctgccaggttgtccgaggccagccatgatgag

SEQ ID NO: 60411 - DNA, 2135 bp, Zea Mays
gccttttccccccctcctcgcgtcgagtggctccacgcttccacttgattccgagcactttctgcaatctcctcccatttctggtgtgcttcagctatgcagttcagcagcgtgcttcccctagagggaaaagcgtgtatgagcccagtgaggagaggcagtggaggttatgggagtgagaggatgaggatcaactgctgcagcatcaggcgcaacaaggcactgaggaggatgtgtttcagtgcaaggggtgctgtgagcagcacgcagtgtgtgctcacatcagatgctggcccagacactcttgtcgtccgaacatcctttcggaggaattatgctgatcctaatgaagtcgctgccgtcattttgggtggtggtaccgggactcagcttttccctctcacaagcacaagggccacccctgctgttcctattggaggatgttacaggcttattgatatccccatgagcaactgtttcaacagtggcataaacaagatatttgttatgactcagttcaactcagcttctcttaaccgtcacattcatcgtacctatcttggtggggggatcaacttcactgatggatctgttgaggtgctggctgcaacacaaatgcctggggaggctgctggttggttccagggcacagcagacgccgttagaaaatttatctgggtacttgaggattattacaagcataaagctatagaacacattttgattttgtcaggagatcaactctatcgtatggattacatggagcttgtgcagaaacatgtcgatgacaatgcagacataactttatcatgcgctcctgttggagagagtcgagcatctgactatggattagttaagttcgatagttcaggccgtgtaattcagttctctgagaaaccaaagggtgctgccttggaagaaatgaaagtggataccagcttcctcaatttcgccattgattccccagctgaatatccctatatcgcttcaatgggagtttacgtttttaagagagatgttttgttagaccttctaaagtcacggtatgctgaactgcatgactttggttctgaaattctgcccaaggctttgcatgagcacaatgtacaggcatatgttttcactgactactgggaggacattggaacaatcagatctttctttgatgcaaacatggccctctgcgagcagcctccaaagttcgagttttacgatccgaaaacaccattcttcacttcccctcggtacttgccaccaacgaagtcggataagtgcaggattaaagacgcgatcatttcacacggctgcttcttgcgtgagtgtgccatcgagcactctattgttggtgttcgctcacgcctaaactctggatgcgagctcaagaataccatgatgatgggtgcggatttgtatgagaccgaagacgagatctcaaggctactggcagagggcaaggtgcccattggcgtaggggagaacacgaagataagcaactgcatcatcgacatgaatgccagggttggaaggaacgtctccataacaaacaaagagggcgtccaagaagccgaccggccggacgaaggatactacatccggtctgggatcgtggtagtcctgaagaacgcaaccatcaaggacggcaccgtcatatagagactaactttggccttacgcatggcgtgcaaggttacaggttagtcatcgtcttgagagttgagacttagtttgaggcgcgcgcccgaccttgacttgagccgtcggagggacaagaacatgaggaagaagggctggtggtgccggatgttgccatggacgacgagaaatggtttggtgcggtcgcatcggttccagtagctagctcttccgatgttattaatatatgtatctagtggagtagtgcgaacagtgcaataagctgggcgagcaaagccgcggcaactcttggcttggggattgttggtgcatcttgtaaataataaactcggacgcagcaaatgaaacatgcccctcatcttcttccatatcttcgcaccgtatgccttgccctgtctttatatgagacgatggtgtaggcatgatgacacgtctggttggttgccagcgctgccaggttgtccgaggccagccatgatgag

SEQ ID NO: 60412 - DNA, 2134 bp, Zea Mays
tgtacaaggaagaaaagatccaacccaactgggactgagctgttgtgattcacatgtctaactcccgaaaagaaggcagaaggtgtgcttcagctatgcagttcagcagcgtgcttcccctagagggaaaagcgtgtatgagcccagtgaggagaggcagtggaggttatgggagtgagaggatgaggatcaactgctgcagcatcaggcgcaacaaggcactgaggaggatgtgtttcagtgcaaggggtgctgtgagcagcacgcagtgtgtgctcacatcagatgctggcccagacactcttgtcgtccgaacatcctttcggaggaattatgctgatcctaatgaagtcgctgccgtcattttgggtggtggtaccgggactcagcttttccctctcacaagcacaagggccacccctgctgttcctattggaggatgttacaggcttattgatatccccatgagcaactgtttcaacagtggcataaacaagatatttgttatgactcagttcaactcagcttctcttaaccgtcacattcatcgtacctatcttggtggggggatcaacttcactgatggatctgttgaggtgctggctgcaacacaaatgcctggggaggctgctggttggttccagggcacagcagacgccgttagaaaatttatctgggtacttgaggattattacaagcataaagctatagaacacattttgattttgtcaggagatcaactctatcgtatggattacatggagcttgtgcagaaacatgtcgatgacaatgcagacataactttatcatgcgctcctgttggagagagtcgagcatctgactatggattagttaagttcgatagttcaggccgtgtaattcagttctctgagaaaccaaagggtgctgccttggaagaaatgaaagtggataccagcttcctcaatttcgccattgattccccagctgaatatccctatatcgcttcaatgggagtttacgtttttaagagagatgttttgttagaccttctaaagtcacggtatgctgaactgcatgactttggttctgaaattctgcccaaggctttgcatgagcacaatgtacaggcatatgttttcactgactactgggaggacattggaacaatcagatctttctttgatgcaaacatggccctctgcgagcagcctccaaagttcgagttttacgatccgaaaacaccattcttcacttcccctcggtacttgccaccaacgaagtcggataagtgcaggattaaagacgcgatcatttcacacggctgcttcttgcgtgagtgtgccatcgagcactctattgttggtgttcgctcacgcctaaactctggatgcgagctcaagaataccatgatgatgggtgcggatttgtatgagaccgaagacgagatctcaaggctactggcagagggcaaggtgcccattggcgtaggggagaacacgaagataagcaactgcatcatcgacatgaatgccagggttggaaggaacgtctccataacaaacaaagagggcgtccaagaagccgaccggccggacgaaggatactacatccggtctgggatcgtggtagtcctgaagaacgcaaccatcaaggacggcaccgtcatatagagactaactttggccttacgcatggcgtgcaaggttacaggttagtcatcgtcttgagagttgagacttagtttgaggcgcgcgcccgaccttgacttgagccgtcggagggacaagaacatgaggaagaagggctggtggtgccggatgttgccatggacgacgagaaatggtttggtgcggtcgcatcggttccagtagctagctcttccgatgttattaatatatgtatctagtggagtagtgcgaacagtgcaataagctgggcgagcaaagccgcggcaactcttggcttggggattgttggtgcatcttgtaaataataaactcggacgcagcaaatgaaacatgcccctcatcttcttccatatcttcgcaccgtatgccttgccctgtctttatatgagacgatggtgtaggcatgatgacacgtctggttggttgccagcgctgccaggttgtccgaggccagccatgatgag

SEQ ID NO: 60413 - DNA, 1309 bp, Zea Mays
tcagtcgagcatctgactatggattagttaagttcgatagttcaggccgtgtaattcagttctctgagaaaccaaagggtgctgccttggaagaaatgaaagtggataccagcttcctcaatttcgccattgattccccagctgaatatccctatatcgcttcaatgggagtttacgtttttaagagagatgttttgttagaccttctaaagtcacggtatgctgaactgcatgactttggttctgaaattctgcccaaggctttgcatgagcacaatgtacaggcatatgttttcactgactactgggaggacattggaacaatcagatctttctttgatgcaaacatggccctctgcgagcagcctccaaagttcgagttttacgatccgaaaacaccattcttcacttcccctcggtacttgccaccaacgaagtcggataagtgcaggattaaagacgcgatcatttcacacggctgcttcttgcgtgagtgtgccatcgagcactctattgttggtgttcgctcacgcctaaactctggatgcgagctcaagaataccatgatgatgggtgcggatttgtatgagaccgaagacgagatctcaaggctactggcagagggcaaggtgcccattggcgtaggggagaacacgaagataagcaactgcatcatcgacatgaatgccagggttggaaggaacgtctccataacaaacaaagagggcgtccaagaagccgaccggccggacgaaggatactacatccggtctgggatcgtggtagtcctgaagaacgcaaccatcaaggacggcaccgtcatatagagactaactttggccttacgcatggcgtgcaaggttacaggttagtcatcgtcttgagagttgagacttagtttgaggcgcgcgcccgaccttgacttgagccgtcggagggacaagaacatgaggaagaagggctggtggtgccggatgttgccatggacgacgagaaatggtttggtgcggtcgcatcggttccagtagctagctcttccgatgttattaatatatgtatctagtggagtagtgcgaacagtgcaataagctgggcgagcaaagccgcggcaactcttggcttggggattgttggtgcatcttgtaaataataaactcggacgcagcaaatgaaacatgcccctcatcttcttccatatcttcgcaccgtatgccttgccctgtctttatatgagacgatggtgtaggcatgatgacacgtctggttggttgccagcgctgccaggttgtccgaggccagccatgatgag

SEQ ID NO: 60414 - DNA, 2474 bp, Zea Mays
cgagattacgagacaagagacaagtagacaacccagctctccagcggtccagcggtccagcctctcctagccgaggccaaaacccccataccaacacacacttcgcttctcgctgcctccgcggcggcgcgccgctccgctccgagccctcttcctcctcctcctctgcccgttcggtcgagaatgttctactcgcatcagcttctcgcgcggaaggcgccgctcggccagatatggatggcggcgacgctccactcgaagatcaaccgcaaacggctcgacaagctcgacatcatcaaaatctgtgaggaaattttgaacccctcggtgcccatggctctgaggctctctggaatcctcatgggtggcgtggtgatcgtgtacgagaggaaggtgaagcttctctacactgatgtctctcggcttctgactgagatcaacgaggcatggcggatcaaaccggtcacagaccccaccgtcctccccaagggtaaaactcaagccaagtatgaagcagtaacactgccagagatcaatatggtggtggaacagcccatgtttttctcagagcctgatggtgccaagttccgacgaatgggattggaagatctggatgaacagtatgttcaagtcaatcttgatgatgatgacttctctcatgctgatgatcgtcatcaagcagtgaatataaccctggtcgataattttgagtctgggcttgcagaaactgatttattcaatcactttgagagatttgacatagcagatgatgagaccacagtcaatatcactcctgatgagtacccacaagttccaagtacgctgattccgtcaccacctaggcaggaagacattcctcaacaagaagaaccgtactacgctgccccctcccctgttcatggagaacctcaacaagggggaccagaggaccaagaggaacagaagatgaagcaaccaccgaaagcatcaaagcggaaagcacgttgggaagtcccacgagtaattatggacaataaccagatgatgatcccaggaaacatatatcagacatggctgaaggatgcatcaagccttgtctcaaaaaggcgtaaacttaacagcaattttaattttattcgatcaaccaagataagtgatctcatgcacatccccccggttgctctaatatctcatgacaacttgttctcagaattatgttatcctaagccacttatgcagctctggaaggactgcactgaggtcaagtccacaaaagcttcttcaggagggcagcgatcatcatcacaagaaccacaaccgaaaaactcaccacctcaggctgggggagagtatgagatggaaacaggtggtctgccgatggatttaacagatggcattgaaaaactcagggcaaacatgagtgcaaaatatgacagagcttacaatattcttcacagtgaccatagtgttactcctggaagtcctgggttaagtcgcaggtctgcttcaagctctggtggctctggatcggcgtttatacaattggatccagaagtacaattgccatcaggaagtggaaggtccaaaagggggcagcattcatctgcaagaagcttggggaatcttgatactgttgaggaagattttccactggagcaggaagtgagggacttcaagatgagaaggctttcagattatgtgccaactcctggttggttgcattctgtcctttgctatatataaacatgtgaaactgtctctggacgactggaacataaactgtttcaaccaacatagaagttaacaattttactccaactcctgacctactggaagaaactgaaccgactcaaaccccatatgagaggcgctccaatccaatggacaagatcacagaaacaatccagtcgcatctcaaacttcatttcgataccccaggtgtcccacaatctgaatccttaagtcatttagctcatggaatgaccaaagccagggcagcccgactattctatcaaatagctgttttggcaacttgtgattacatcaaggttactcagctggaacggaaaggagatgaactgtacggagacatcttgatctccagaggattaaagatgtgacttggtgatgttggaaacaattttgctgcggtggttcccggtgcacatctcgtgtttatattacagaatgcttacatattgcataggatgtcttgtagttaacacataatctatacatggtgatctggtgaaagaaagggagcgagatatgaggcagtagttttgtgttatgtggcaagcaaaattctaagctgttattttagaggtttcataatttaagtacgaacatgtgttatactattatgaaactaagttgtcctgaaagcacttactgaaagggagaaatttacatggtaccttgtcaacgatgaaacatacatcggaggacaacataaagatgcacactgtatcctgctcttcggctgcttcatgtta

SEQ ID NO: 60415 - DNA, 2480 bp, Zea Mays
cgagattacgagacaagagacaagtagacaacccagctctccagcggtccagcggtccagcctctcctagccgaggccaaaacccccataccaacacacacttcgcttctcgctgcctccgcggcggcgcgccgctccgctccgagccctcttcctcctcctcctctgcccgttcggtcgagaatgttctactcgcatcagcttctcgcgcggaaggcgccgctcggccagatatggatggcggcgacgctccactcgaagatcaaccgcaaacggctcgacaagctcgacatcatcaaaatctgtgaggaaattttgaacccctcggtgcccatggctctgaggctctctggaatcctcatgggtggcgtggtgatcgtgtacgagaggaaggtgaagcttctctacactgatgtctctcggcttctgactgagatcaacgaggcatggcggatcaaaccggtcacagaccccaccgtcctccccaagggtaaaactcaagccaagtatgaagcagtaacactgccagagatcaatatggtggtggaacagcccatgtttttctcagagcctgatggtgccaagttccgacgaatgggattggaagatctggatgaacagtatgttcaagtcaatcttgatgatgatgacttctctcatgctgatgatcgtcatcaagctaaagcagtgaatataaccctggtcgataattttgagtctgggcttgcagaaactgatttattcaatcactttgagagatttgacatagcagatgatgagaccacagtcaatatcactcctgatgagtacccacaagttccaagtacgctgattccgtcaccacctaggcaggaagacattcctcaacaagaagaaccgtactacgctgccccctcccctgttcatggagaacctcaacaagggggaccagaggaccaagaggaacagaagatgaagcaaccaccgaaagcatcaaagcggaaagcacgttgggaagtcccacgagtaattatggacaataaccagatgatgatcccaggaaacatatatcagacatggctgaaggatgcatcaagccttgtctcaaaaaggcgtaaacttaacagcaattttaattttattcgatcaaccaagataagtgatctcatgcacatccccccggttgctctaatatctcatgacaacttgttctcagaattatgttatcctaagccacttatgcagctctggaaggactgcactgaggtcaagtccacaaaagcttcttcaggagggcagcgatcatcatcacaagaaccacaaccgaaaaactcaccacctcaggctgggggagagtatgagatggaaacaggtggtctgccgatggatttaacagatggcattgaaaaactcagggcaaacatgagtgcaaaatatgacagagcttacaatattcttcacagtgaccatagtgttactcctggaagtcctgggttaagtcgcaggtctgcttcaagctctggtggctctggatcggcgtttatacaattggatccagaagtacaattgccatcaggaagtggaaggtccaaaagggggcagcattcatctgcaagaagcttggggaatcttgatactgttgaggaagattttccactggagcaggaagtgagggacttcaagatgagaaggctttcagattatgtgccaactcctggttggttgcattctgtcctttgctatatataaacatgtgaaactgtctctggacgactggaacataaactgtttcaaccaacatagaagttaacaattttactccaactcctgacctactggaagaaactgaaccgactcaaaccccatatgagaggcgctccaatccaatggacaagatcacagaaacaatccagtcgcatctcaaacttcatttcgataccccaggtgtcccacaatctgaatccttaagtcatttagctcatggaatgaccaaagccagggcagcccgactattctatcaaatagctgttttggcaacttgtgattacatcaaggttactcagctggaacggaaaggagatgaactgtacggagacatcttgatctccagaggattaaagatgtgacttggtgatgttggaaacaattttgctgcggtggttcccggtgcacatctcgtgtttatattacagaatgcttacatattgcataggatgtcttgtagttaacacataatctatacatggtgatctggtgaaagaaagggagcgagatatgaggcagtagttttgtgttatgtggcaagcaaaattctaagctgttattttagaggtttcataatttaagtacgaacatgtgttatactattatgaaactaagttgtcctgaaagcacttactgaaagggagaaatttacatggtaccttgtcaacgatgaaacatacatcggaggacaacataaagatgcacactgtatcctgctcttcggctgcttcatgtta

SEQ ID NO: 60416 - DNA, 2451 bp, Zea Mays
cgagattacgagacaagagacaagtagacaacccagctctccagcggtccagcggtccagcctctcctagccgaggccaaaacccccataccaacacacacttcgcttctcgctgcctccgcggcggcgcgccgctccgctccgagccctcttcctcctcctcctctgcccgttcggtcgagaatgttctactcgcatcagcttctcgcgcggaaggcgccgctcggccagatatggatggcggcgacgctccactcgaagatcaaccgcaaacggctcgacaagctcgacatcatcaaaatctgtgaggaaattttgaacccctcggtgcccatggctctgaggctctctggaatcctcatgggtggcgtggtgatcgtgtacgagaggaaggtgaagcttctctacactgatgtctctcggcttctgactgagatcaacgaggcatggcggatcaaaccggtcacagaccccaccgtcctccccaagggtaaaactcaagccaagtatgaagcagtaacactgccagagatcaatatggtggtggaacagcccatgtttttctcagagcctgatggtgccaagttccgacgaatgggattggaagatctggatgaacagtatgttcaagtcaatcttgatgatgatgacttctctcatgctgatgatcgtcatcaagctaaagcagtgaatataaccctggtcgataattttgagtctgggcttgcagaaactgatttattcaatcactttgagagatttgacatagcagatgatgagaccacagtcaatatcactcctgatgagtacccacaagttccaagtacgctgattccgtcaccacctaggcaggaagacattcctcaacaagaagaaccgtactacgctgccccctcccctgttcatggagaacctcaacaagggggaccagaggaccaagaggaacagaagatgaagcaaccaccgaaagcatcaaagcggaaagcacgttgggaagtcccacgagtaattatggacaataaccagatgatgatcccaggaaacatatatcagacatggctgaaggatgcatcaagccttgtctcaaaaaggcgtaaacttaacagcaattttaattttattcgatcaaccaagataagtgatctcatgcacatccccccggttgctctaatatctcatgacaacttgttctcagaattatgttatcctaagccacttatgcagctctggaaggactgcactgaggtcaagtccacaaaagcttcttcaggagggcagcgatcatcatcacaagaaccacaaccgaaaaactcaccacctcaggctgggggagagtatgagatggaaacaggtggtctgccgatggatttaacagatggcattgaaaaactcagggcaaacatgagtgcaaaatatgacagagcttacaatattcttcacagtgaccatagtgttactcctggaagtcctgggttaagtcgcaggtctgcttcaagctctggtggctctggatcggcgtttatacaattggatccagaagtacaattgccatcaggaagtggaaggtccaaaagggggcagcattcatctgcaagaagcttggggaatcttgatactgttgaggaagattttccactggagcaggaagtgagggacttcaagatgagaaggctttcagattatgtgccaactcctggttggttgcattctgtcctttgctatatataaacatgtgaaactgtctctggacgactggaacataaactgtttcaaccaacatagaagttaacaattttactccaactcctgacctactggaagaaactgaaccgactcaaaccccatatgagaggcgctccaatccaatggacaagatcacagaaacaatccagtcgtgtcccacaatctgaatccttaagtcatttagctcatggaatgaccaaagccagggcagcccgactattctatcaaatagctgttttggcaacttgtgattacatcaaggttactcagctggaacggaaaggagatgaactgtacggagacatcttgatctccagaggattaaagatgtgacttggtgatgttggaaacaattttgctgcggtggttcccggtgcacatctcgtgtttatattacagaatgcttacatattgcataggatgtcttgtagttaacacataatctatacatggtgatctggtgaaagaaagggagcgagatatgaggcagtagttttgtgttatgtggcaagcaaaattctaagctgttattttagaggtttcataatttaagtacgaacatgtgttatactattatgaaactaagttgtcctgaaagcacttactgaaagggagaaatttacatggtaccttgtcaacgatgaaacatacatcggaggacaacataaagatgcacactgtatcctgctcttcggctgcttcatgtta

SEQ ID NO: 60417 - DNA, 2542 bp, Zea Mays
cgagattacgagacaagagacaagtagacaacccagctctccagcggtccagcggtccagcctctcctagccgaggccaaaacccccataccaacacacacttcgcttctcgctgcctccgcggcggcgcgccgctccgctccgagccctcttcctcctcctcctctgcccgttcggtcgagaatgttctactcgcatcagcttctcgcgcggaaggcgccgctcggccagatatggcgcgtctgctcccttgatcgcacctcctatgcctctcgttgcgggctctaatcgcgctcgtttcccttccttgttccttgcaatgcgtttggttctatgccttatcctggcatcgacccacagtgatggccacgctcgcgccgatttggcggtcactaactgcgtttgcattgtggtttcaggatggcggcgacgctccactcgaagatcaaccgcaaacggctcgacaagctcgacatcatcaaaatctgtgaggaaattttgaacccctcggtgcccatggctctgaggctctctggaatcctcatgggtggcgtggtgatcgtgtacgagaggaaggtgaagcttctctacactgatgtctctcggcttctgactgagatcaacgaggcatggcggatcaaaccggtcacagaccccaccgtcctccccaagggtaaaactcaagccaagtatgaagcagtaacactgccagagatcaatatggtggtggaacagcccatgtttttctcagagcctgatggtgccaagttccgacgaatgggattggaagatctggatgaacagtatgttcaagtcaatcttgatgatgatgacttctctcatgctgatgatcgtcatcaagctaaagcagtgaatataaccctggtcgataattttgagtctgggcttgcagaaactgatttattcaatcactttgagagatttgacatagcagatgatgagaccacagtcaatatcactcctgatgagtacccacaagttccaagtacgctgattccgtcaccacctaggcaggaagacattcctcaacaagaagaaccgtactacgctgccccctcccctgttcatggagaacctcaacaagggggaccagaggaccaagaggaacagaagatgaagcaaccaccgaaagcatcaaagcggaaagcacgttgggaagtcccacgagtaattatggacaataaccagatgatgatcccaggaaacatatatcagacatggctgaaggatgcatcaagccttgtctcaaaaaggcgtaaacttaacagcaattttaattttattcgatcaaccaagataagtgatctcatgcacatccccccggttgctctaatatctcatgacaacttgttctcagaattatgttatcctaagccacttatgcagctctggaaggactgcactgaggtcaagtccacaaaagcttcttcagcgatcatcatcacaagaaccacaaccgaaaaactcaccacctcaggctgggggagagtatgagatggaaacaggtggtctgccgatggatttaacagatggcattgaaaaactcagggcaaacatgagtgcaaaatatgacagagcttacaatattcttcacagtgaccatagtgttactcctggaagtcctgggttaagtcgcaggtctgcttcaagctctggtggctctggatcggcgtttatacaattggatccagaagtacaattgccatcaggaagtggaaggtccaaaagggggcagcattcatctgcaagaagcttggggaatcttgatactgttgaggaagattttccactggagcaggaagtgagggacttcaagatgagaaggctttcagattatgtgccaactcctgacctactggaagaaactgaaccgactcaaaccccatatgagaggcgctccaatccaatggacaagatcacagaaacaatccagtcgcatctcaaacttcatttcgataccccaggtgtcccacaatctgaatccttaagtcatttagctcatggaatgaccaaagccagggcagcccgactattctatcaaatagctgttttggcaacttgtgattacatcaaggttactcagctggaacggaaaggagatgaactgtacggagacatcttgatctccagaggattaaagatgtgacttggtgatgttggaaacaattttgctgcggtggttcccggtgcacatctcgtgtttatattacagaatgcttacatattgcataggatgtcttgtagttaacacataatctatacatggtgatctggtgaaagaaagggagcgagatatgaggcagtagttttgtgttatgtggcaagcaaaattctaagctgttattttagaggtttcataatttaagtacgaacatgtgttatactattatgaaactaagttgtcctgaaagcacttactgaaagggagaaatttacatggtaccttgtcaacgatgaaacatacatcggaggacaacataaagatgcacactgtatcctgctcttcggctgcttcatgtta

SEQ ID NO: 60418 - DNA, 2180 bp, Zea Mays
cgagattacgagacaagagacaagtagacaacccagctctccagcggtccagcggtccagcctctcctagccgaggccaaaacccccataccaacacacacttcgcttctcgctgcctccgcggcggcgcgccgctccgctccgagccctcttcctcctcctcctctgcccgttcggtcgagaatgttctactcgcatcagcttctcgcgcggaaggcgccgctcggccagatatggcgcgtctgctcccttgatcgcacctcctatgcctctcgttgcgggctctaatcgcgctcgtttcccttccttgttccttgcaatgcgtttggttctatgccttatcctggcatcgacccacagtgatggccacgctcgcgccgatttggcggtcactaactgcgtttgcattgtggtttcaggatggcggcgacgctccactcgaagatcaaccgcaaacggctcgacaagctcgacatcatcaaaatctgtgaggaaattttgaacccctcggtgcccatggctctgaggctctctggaatcctcatgggtggcgtggtgatcgtgtacgagaggaaggtgaagcttctctacactgatgtctctcggcttctgactgagatcaacgaggcatggcggatcaaaccggtcacagaccccaccgtcctccccaagggtaaaactcaagccaagtatgaagcagtaacactgccagagatcaatatggtggtggaacagcccatgtttttctcagagcctgatggtgccaagttccgacgaatgggattggaagatctggatgaacagtatgttcaagtcaatcttgatgatgatgacttctctcatgctgatgatcgtcatcaagctaaagcagtgaatataaccctggtcgataattttgagtctgggcttgcagaaactgatttattcaatcactttgagagggggaccagaggaccaagaggaacagaagatgaagcaaccaccgaaagcatcaaagcggaaagcacgttgggaagtcccacgagtaattatggacaataaccagatgatgatcccaggaaacatatatcagacatggctgaaggatgcatcaagccttgtctcaaaaaggcgtaaacttaacagcaattttaattttattcgatcaaccaagataagtgatctcatgcacatccccccggttgctctaatatctcatgacaacttgttctcagaattatgttatcctaagccacttatgcagctctggaaggactgcactgaggtcaagtccacaaaagcttcttcaggagggcagcgatcatcatcacaagaaccacaaccgaaaaactcaccacctcaggctgggggagagtatgagatggaaacaggtggtctgccgatggatttaacagatggcattgaaaaactcagggcaaacatgagtgcaaaatatgacagagcttacaatattcttcacagtgaccatagtgttactcctggaagtcctgggttaagtcgcaggtctgcttcaagctctggtggctctggatcggcgtttatacaattggatccagaagtacaattgccatcaggaagtggaaggtccaaaagggggcagcattcatctgcaagaagcttggggaatcttgatactgttgaggaagattttccactggagcaggaagtgagggacttcaagatgagaaggctttcagattatgtgccaactcctggttggttgcattctgtcctttgctatatataaacatgtgaaactgtctctggacgactggaacataaactgtttcaaccaacatagaagttaacaattttactccaactcctgacctactggaagaaactgaaccgactcaaaccccatatgagaggcgctccaatccaatggacaagatcacagaaacaatccagtcgcatctcaaacttcatttcgataccccaggtgtcccacaatctgaatccttaagtcatttagctcatggaatgaccaaagccagggcagcccgactattctatcaaatagctgttttggcaacttgtgattacatcaaggttactcagctggaacggaaaggagatgaactgtacggagacatcttgatctccagaggattaaagatgtgacttggtgatgttggaaacaattttgctgcggggacgtccactcaccaggatacaag

SEQ ID NO: 60419 - DNA, 2186 bp, Zea Mays
cgagattacgagacaagagacaagtagacaacccagctctccagcggtccagcggtccagcctctcctagccgaggccaaaacccccataccaacacacacttcgcttctcgctgcctccgcggcggcgcgccgctccgctccgagccctcttcctcctcctcctctgcccgttcggtcgagaatgttctactcgcatcagcttctcgcgcggaaggcgccgctcggccagatatggatggcggcgacgctccactcgaagatcaaccgcaaacggctcgacaagctcgacatcatcaaaatctgtgaggaaattttgaacccctcggtgcccatggctctgaggctctctggaatcctcatgggtggcgtggtgatcgtgtacgagaggaaggtgaagcttctctacactgatgtctctcggcttctgactgagatcaacgaggcatggcggatcaaaccggtcacagaccccaccgtcctccccaagggtaaaactcaagccaagtatgaagcagtaacactgccagagatcaatatggtggtggaacagcccatgtttttctcagagcctgatggtgccaagttccgacgaatgggattggaagatctggatgaacagtatgttcaagtcaatcttgatgatgatgacttctctcatgctgatgatcgtcatcaagctaaagcagtgaatataaccctggtcgataattttgagtctgggcttgcagaaactgatttattcaatcactttgagagatttgacatagcagatgatgagaccacagtcaatatcactcctgatgagtacccacaagttccaagtacgctgattccgtcaccacctaggcaggaagacattcctcaacaagaagaaccgtactacgctgccccctcccctgttcatggagaacctcaacaagggggaccagaggaccaagaggaacagaagatgaagcaaccaccgaaagcatcaaagcggaaagcacgttgggaagtcccacgagtaattatggacaataaccagatgatgatcccaggaaacatatatcagacatggctgaaggatgcatcaagccttgtctcaaaaaggcgtaaacttaacagcaattttaattttattcgatcaaccaagataagtgatctcatgcacatccccccggttgctctaatatctcatgacaacttgttctcagaattatgttatcctaagccacttatgcagctctggaaggactgcactgaggtcaagtccacaaaagcttcttcaggtcacttcataatttgagggcagcgatcatcatcacaagaaccacaaccgaaaaactcaccacctcaggctgggggagagtatgagatggaaacaggtggtctgccgatggatttaacagatggcattgaaaaactcagggcaaacatgagtgcaaaatatgacagagcttacaatattcttcacagtgaccatagtgttactcctggaagtcctgggttaagtcgcaggtctgcttcaagctctggtggctctggatcggcgtttatacaattggatccagaagtacaattgccatcaggaagtggaaggtccaaaagggggcagcattcatctgcaagaagcttggggaatcttgatactgttgaggaagattttccactggagcaggaagtgagggacttcaagatgagaaggctttcagattatgtgccaactcctggttggttgcattctgtcctttgctatatataaacatgtgaaactgtctctggacgactggaacataaactgtttcaaccaacatagaagttaacaattttactccaactcctgacctactggaagaaactgaaccgactcaaaccccatatgagaggcgctccaatccaatggacaagatcacagaaacaatccagtcgcatctcaaacttcatttcgataccccaggtgtcccacaatctgaatccttaagtcatttagctcatggaatgaccaaagccagggcagcccgactattctatcaaatagctgttttggcaacttgtgattacatcaaggttactcagctggaacggaaaggagatgaactgtacggagacatcttgatctccagaggattaaagatgtgacttggtgatgttggaaacaattttgctgcggtggttcccggggacgtccactcaccaggatacaag

SEQ ID NO: 60420 - DNA, 802 bp, Zea Mays
ggaatgtagcaacagcccatcaaaacgggcctgactcctcaccacacacctagcccaaattgtccccgaggtccgcaccaccgaagccccgagaaaccctaggcactaggaccaggagggcgcgccgtgcagccatggcgaagaaccggaacaagaagaacagggccaagagcggcggcctcgccaccatggacacctctgagggcggccccgccacatccactgccgcagacgtcccacaaccaatggatacgtccgagggaaagcagccatcgtcaccaccgcggcgctcggttcgatcaacaagtaagctaaaaggaaggtgctggaagcaaggatcagagtgctagctgttggcgtaacatcacccagctgatggagagattttagtttgctagctagatgaatctttagactttgcatgtaatagaactaaaagatcacttcagaattcagaaaacatgtatgctattatttttatatgttcatcacacaaattgtgttccaaaacaatatatgttggaattcaaagtcaaagattgatctctttcttttagtaatcaaatttcatatattctgagctacatattattcaagttgtcctgcaatgtgcatcataatcagtttattatttgtttcattagcatatatttatatacatgatttttttaaacttcacatagggaataacatcagacaatctgtcggtatatagacttttagcgacacataagctgttggcacaagaatatgtcggcaaagatttgtccgacggcaaagatatgtctgtcggcaataacat

SEQ ID NO: 60421 - DNA, 2778 bp, Zea Mays
gagaccgggtgcagggagcaaaggcggaaggcagggcagggcgctattcgtctgtctttctcttttttcagctcagatacttttcatgaagtcagaagaaagcgggataggaaaaaggagactaaagttaatcacgaaacaaggcctcgacctttccagaaatatacataccgaggatataaggctgtttcagatcgaagtgggcgagaccctacaggcggtttcaaaggccctgtaaaaaaggaaccagagatgcaagctccactaaactcatcagccttggatgtcaagacaagtgacactacagaaatattttctgctactatcaatgttgcccagactgatgctaagaacaccacttctcagcctttatctaaagtgcagcatggttggggtggtattccaggtcgcccttccatggctgaaatagtgaagatgggcaggcctcaagctaaagttgggagcagatctgttgcaagtagcactgcgttgccaaccgttggtgattcagtcatttccaatacaccaaatcttgtgcctgaggaatataacagaactgtttttgcatcagaagcaggccatgtcgcagcagataaattgccaaacggtgctgttgaggtgcactctctacctaaagatgcttccgcatttgatatgttaccttcagctgagggaacagatgttgaagccccttccatgagtgctaatgcacaagggtcatcaacgccagatgccaatgaagatgacattgaaaaatatgcaaatttggaagagggcaatacagaaagcttgatatctcctggacaagtttctgcttctggtaaagatatacaatcagaatatactgaagttgtcagccatgtggatgaaggctcgatagagaaaacaaatgactttcagctcaatggccttccatttgagcacaaccaaaatctgaatggagacgtgtctacagcgacaacacaatttgatcatttgactctgcatgagggaccaaaattgtccgatgataatccggctgtaataattcctgatcatcttcaggtttcgaatgctgattgtgcgcatttgacgtttggtagttttgtgtctggaacacttgattcatccttgacaacaaaacctcttgaaagtcatggggatgctgcggcagttcctgatgatgattcaattgaccaatcagatggcaggatccatgacgatgaaggcaaggtgactttagctactgatgttaatgaatatgttacttctgcggcaaacagcaacgaggagaatcttgatattacatcagtacagcaatctgaagtcactagagctgatttcttggatgtcacaagcaatactgaatacaacctaacatcaactccagattatgcaacttcaagtgcaccgttgcaagattctgcttcacagagtttacaggaaaaccgacaattccagaacatctctcctttctcaagcttcatgcaaatgcaaaatggtctcctgccaccagcaattccaccattgcgtgaatttgatccagcattttcactattgctcacccatcctcctatgatgcatggtacaatgtcatcatccatgagcaatacaactgtttctacgcagccccaagagaatgccaatccagttggtttacccaaccctcaattgactcaatctcagcaaagcaccagcattgcttcagggcctccactccctcagcatcttcttcatccctatgctcaaccaacccttcctcttggctacgcaagcatgattggctatccatctcttccaccaagctatgcatatctcccgcctgccgcttttcagcaaccatacatgaacagtggcttgttccaccaggcagcagcggcagttcccacctcaagtgtgaaataccctctaccgcagtacaaaagcaacattgcccttgctagcttaccacagccaggctctttgctctcaagctacgttgggggctttggaactgcaagcaacatgcctggaaatttccctctgaatcaaagcacagcagcagcaacaacaactcttgggtttgatgggacggtcccttcacatttcaaagatggaaatcaatttatttctcttcagcagaatgagaaccctgcaatgtggatgcatggtgctagttcacgagggatgcccccacttgcagccagtaccatgtatggctatcaagggcagagtcatcaggccggccttcggcagggccaactaccttcacaatttggctctgcgcttgggcagtcacagccaggcctgggccctgaacaccgaaaccctagcgatagtaacctaagtggcgctgctcaggctaaccaaatgtggccaaatacctactgatccatcccccttgtcgacttctgtggaaggcggtcctgttgtgtgtgcaacgccggtgaggccatgcagtgcttgtgttctgatccaggcacgcggataccagctgtgcctgtgcgcatgagtcgctgtcgtgacattttgaggcacaagagacatatgttcgagcatgctctacctgtagggtttctaggatatggcaaaagaaaatgtagctcgatctatttattcaaattctgatagagaaaggacttcctcttttctattttattctcttttgtcattcacatatcatgtgacaaataaaaccgaaatatctaacagcagcgccattagttcccgaggaagtgaaactttacatcacaggtattgcgtgcctcttggcttcaattttatgattgaggtgattaattgatggatgagcatttccca

SEQ ID NO: 60422 - DNA, 3136 bp, Zea Mays
attagctgagctcgtacacggccggccctctctcggtgcgtgcgtttgcgtggctgtggcaatatacggtgcgtgtggggcggcggcgacgagggttttgctgctccgtacaccgcgtgcagcggcgacgcgaccgcagctggtcgccgccccggatcgaggagggggaggagccggcggaggcccctgtggtggctgcgggggcgggagcgggagcgccatgaggggcggtggccgtggcggcggcgggaggcagccttcctacgcggcgccggacggggcggatgcggcggcgatcccggtcgcctcaaggaagatggtgcagagcctcaaggggatcctggccgaccgctcggagggcgagatctacgccacgctctgcgactgcggaatggaccccgacatagccgtcgagaggctcatctcccaggatacttttcatgaagtcagaagaaagcgggataggaaaaaggagactaaagttaatcacgaaacaaggcctcgacctttccagaaatatacataccgaggatataaggctgtttcagatcgaagtgggcgagcagaccctacaggcggtttcaaaggccctgtaaaaaaggaaccagagatgcaagctccactaaactcatcagccttggatgtcaagacaagtgacactacagaaatattttctgctactatcaatgttgcccagactgatgctaagaacaccacttctcagcctttatctaaagtgcagcatggttggggtggtattccaggtcgcccttccatggctgaaatagtgaagatgggcaggcctcaagctaaagttgggagcagatctgttgcaagtagcactgcgttgccaaccgttggtgattcagtcatttccaatacaccaaatcttgtgcctgaggaatataacagaactgtttttgcatcagaagcaggccatgtcgcagcagataaattgccaaacggtgctgttgaggtgcactctctacctaaagatgcttccgcatttgatatgttaccttcagctgagggaacagatgttgaagccccttccatgagtgctaatgcacaagggtcatcaacgccagatgccaatgaagatgacattgaaaaatatgcaaatttggaagagggcaatacagaaagcttgatatctcctggacaagtttctgcttctggtaaagatatacaatcagaatatactgaagttgtcagccatgtggatgaaggctcgatagagaaaacaaatgactttcagctcaatggccttccatttgagcacaaccaaaatctgaatggagacgtgtctacagcgacaacacaatttgatcatttgactctgcatgagggaccaaaattgtccgatgataatccggctgtaataattcctgatcatcttcaggtttcgaatgctgattgtgcgcatttgacgtttggtagttttgtgtctggaacacttgattcatccttgacaacaaaacctcttgaaagtcatggggatgctgcggcagttcctgatgatgattcaattgaccaatcagatggcaggatccatgacgatgaaggcaaggtgactttagctactgatgttaatgaatatgttacttctgcggcaaacagcaacgaggagaatcttgatattacatcagtacagcaatctgaagtcactagagctgatttcttggatgtcacaagcaatactgaatacaacctaacatcaactccagattatgcaacttcaagtgcaccgttgcaagattctgcttcacagagtttacaggaaaaccgacaattccagaacatctctcctttctcaagcttcatgcaaatgcaaaatggtctcctgccaccagcaattccaccattgcgtgaatttgatccagcattttcactattgctcacccatcctcctatgatgcatggtacaatgtcatcatccatgagcaatacaactgtttctacgcagccccaagagaatgccaatccagttggtttacccaaccctcaattgactcaatctcagcaaagcaccagcattgcttcagggcctccactccctcagcatcttcttcatccctatgctcaaccaacccttcctcttggctacgcaagcatgattggctatccatctcttccaccaagctatgcatatctcccgcctgccgcttttcagcaaccatacatgaacagtggcttgttccaccaggcagcagcggcagttcccacctcaagtgtgaaataccctctaccgcagtacaaaagcaacattgcccttgctagcttaccacagccaggctctttgctctcaagctacgttgggggctttggaactgcaagcaacatgcctggaaatttccctctgaatcaaagcacagcagcagcaacaacaactcttgggtttgatgggacggtcccttcacatttcaaagatggaaatcaatttatttctcttcagcagaatgagaaccctgcaatgtggatgcatggtgctagttcacgagggatgcccccacttgcagccagtaccatgtatggctatcaagggcagagtcatcaggccggccttcggcagggccaactaccttcacaatttggctctgcgcttgggcagtcacagccaggcctgggccctgaacaccgaaaccctagcgatagtaacctaagtggcgctgctcaggctaaccaaatgtggccaaatacctactgatccatcccccttgtcgacttctgtggaaggcggtcctgttgtgtgtgcaacgccggtgaggccatgcagtgcttgtgttctgatccaggcacgcggataccagctgtgcctgtgcgcatgagtcgctgtcgtgacattttgaggcacaagagacatatgttcgagcatgctctacctgtagggtttctaggatatggcaaaagaaaatgtagctcgatctatttattcaaattctgatagagaaaggacttcctcttttctattttattctcttttgtcattcacatatcatgtgacaaataaaaccgaaatatctaacagcagcgccattagttcccgaggaagtgaaactttacatcacaggtattgcgtgcctcttggcttcaattttatgattgaggtgattaattgatggatgagcatttccca

SEQ ID NO: 60423 - DNA, 3176 bp, Zea Mays
attagctgagctcgtacacggccggccctctctcggtgcgtgcgtttgcgtggctgtggcaatatacggtgcgtgtggggcggcggcgacgagggttttgctgctccgtacaccgcgtgcagcggcgacgcgaccgcagctggtcgccgccccggatcgaggagggggaggagccggcggaggcccctgtggtggctgcgggggcgggagcgggagcgccatgaggggcggtggccgtggcggcggcgggaggcagccttcctacgcggcgccggacggggcggatgcggcggcgatcccggtcgcctcaaggaagatggtgcagagcctcaaggggatcctggccgaccgctcggagggcgagatctacgccacgctctgcgactgcggaatggaccccgacatagccgtcgagaggctcatctcccaggatacttttcatgaagtcagaagaaagcgggataggaaaaaggagactaaagttaatcacgaaacaaggcctcgacctttccagaaatatacataccgaggatataaggctgtttcagatcgaagtgggcgaggtcgcattcttcattttgtatttttgtgctataactgttataatgatgtatggtttgtagtttcctcaggataaatggtgctctcattttgttttctctctcttcatttcagcagaccctacaggcggtttcaaaggccctgtaaaaaaggaaccagagatgcaagctccactaaactcatcagccttggatgtcaagacaagtgacactacagaaatattttctgctactatcaatgttgcccagactgatgctaagaacaccacttctcagcctttatctaaagtgcagcatggttggggtggtattccaggtcgcccttccatggctgaaatagtgaagatgggcaggcctcaagctaaagttgggagcagatctgttgcaagtagcactgcgttgccaaccgttggtgattcagtcatttccaatacaccaaatcttgtgcctgaggaatataacagaactgtttttgcatcagaagcaggccatgtcgcagcagataaattgccaaacggtgctgttgaggtgcactctctacctaaagatgcttccgcatttgatatgttaccttcagctgagggaacagatgttgaagccccttccatgagtgctaatgcacaagggtcatcaacgccagatgccaatgaagatgacattgaaaaatatgcaaatttggaagagggcaatacagaaagcttgatatctcctggacaagtttctgcttctggtaaagatatacaatcagaatatactgaagttgtcagccatgtggatgaaggctcgatagagaaaacaaatgactttcagctcaatggccttccatttgagcacaaccaaaatctgaatggagacgtgtctacagcgacaacacaatttgatcatttgactctgcatgagggaccaaaattgtccgatgataatccggctgtaataattcctgatcatcttcaggtttcgaatgctgattgtgcgcatttgacgtttggtagttttgtgtctggaacacttgattcatccttgacaacaaaacctcttgaaagtcatggggatgctgcggcagttcctgatgatgattcaattgaccaatcagatggcagcaacgaggagaatcttgatattacatcagtacagcaatctgaagtcactagagctgatttcttggatgtcacaagcaatactgaatacaacctaacatcaactccagattatgcaacttcaagtgcaccgttgcaagattctgcttcacagagtttacaggaaaaccgacaattccagaacatctctcctttctcaagcttcatgcaaatgcaaaatggtctcctgccaccagcaattccaccattgcgtgaatttgatccagcattttcactattgctcacccatcctcctatgatgcatggtacaatgtcatcatccatgagcaatacaactgtttctacgcagccccaagagaatgccaatccagttggtttacccaaccctcaattgactcaatctcagcaaagcaccagcattgcttcagggcctccactccctcagcatcttcttcatccctatgctcaaccaacccttcctcttggctacgcaagcatgattggctatccatctcttccaccaagctatgcatatctcccgcctgccgcttttcagcaaccatacatgaacagtggcttgttccaccaggcagcagcggcagttcccacctcaagtgtgaaataccctctaccgcagtacaaaagcaacattgcccttgctagcttaccacagccaggctctttgctctcaagctacgttgggggctttggaactgcaagcaacatgcctggaaatttccctctgaatcaaagcacagcagcagcaacaacaactcttgggtttgatgggacggtcccttcacatttcaaagatggaaatcaatttatttctcttcagcagaatgagaaccctgcaatgtggatgcatggtgctagttcacgagggatgcccccacttgcagccagtaccatgtatggctatcaagggcagagtcatcaggccggccttcggcagggccaactaccttcacaatttggctctgcgcttgggcagtcacagccaggcctgggccctgaacaccgaaaccctagcgatagtaacctaagtggcgctgctcaggctaaccaaatgtggccaaatacctactgatccatcccccttgtcgacttctgtggaaggcggtcctgttgtgtgtgcaacgccggtgaggccatgcagtgcttgtgttctgatccaggcacgcggataccagctgtgcctgtgcgcatgagtcgctgtcgtgacattttgaggcacaagagacatatgttcgagcatgctctacctgtagggtttctaggatatggcaaaagaaaatgtagctcgatctatttattcaaattctgatagagaaaggacttcctcttttctattttattctcttttgtcattcacatatcatgtgacaaataaaaccgaaatatctaacagcagcgccattagttcccgaggaagtgaaactttacatcacaggtattgcgtgcctcttggcttcaattttatgattgaggtgattaattgatggatgagcatttccca

SEQ ID NO: 60424 - DNA, 2781 bp, Zea Mays
atgtcgtgttgctatatggtgccattcttgcttgaagaatcaacatacaactgttaacagagcagttgcattgcactgtacttgctttgaaatagatctatgcattgatatgcctttttttggactaaagttaatcacgaaacaaggcctcgacctttccagaaatatacataccgaggatataaggctgtttcagatcgaagtgggcgagaccctacaggcggtttcaaaggccctgtaaaaaaggaaccagagatgcaagctccactaaactcatcagccttggatgtcaagacaagtgacactacagaaatattttctgctactatcaatgttgcccagactgatgctaagaacaccacttctcagcctttatctaaagtgcagcatggttggggtggtattccaggtcgcccttccatggctgaaatagtgaagatgggcaggcctcaagctaaagttgggagcagatctgttgcaagtagcactgcgttgccaaccgttggtgattcagtcatttccaatacaccaaatcttgtgcctgaggaatataacagaactgtttttgcatcagaagcaggccatgtcgcagcagataaattgccaaacggtgctgttgaggtgcactctctacctaaagatgcttccgcatttgatatgttaccttcagctgagggaacagatgttgaagccccttccatgagtgctaatgcacaagggtcatcaacgccagatgccaatgaagatgacattgaaaaatatgcaaatttggaagagggcaatacagaaagcttgatatctcctggacaagtttctgcttctggtaaagatatacaatcagaatatactgaagttgtcagccatgtggatgaaggctcgatagagaaaacaaatgactttcagctcaatggccttccatttgagcacaaccaaaatctgaatggagacgtgtctacagcgacaacacaatttgatcatttgactctgcatgagggaccaaaattgtccgatgataatccggctgtaataattcctgatcatcttcaggtttcgaatgctgattgtgcgcatttgacgtttggtagttttgtgtctggaacacttgattcatccttgacaacaaaacctcttgaaagtcatggggatgctgcggcagttcctgatgatgattcaattgaccaatcagatggcaggatccatgacgatgaaggcaaggtgactttagctactgatgttaatgaatatgttacttctgcggcaaacagcaacgaggagaatcttgatattacatcagtacagcaatctgaagtcactagagctgatttcttggatgtcacaagcaatactgaatacaacctaacatcaactccagattatgcaacttcaagtgcaccgttgcaagattctgcttcacagagtttacaggaaaaccgacaattccagaacatctctcctttctcaagcttcatgcaaatgcaaaatggtctcctgccaccagcaattccaccattgcgtgaatttgatccagcattttcactattgctcacccatcctcctatgatgcatggtacaatgtcatcatccatgagcaatacaactgtttctacgcagccccaagagaatgccaatccagttggtttacccaaccctcaattgactcaatctcagcaaagcaccagcattgcttcagggcctccactccctcagcatcttcttcatccctatgctcaaccaacccttcctcttggctacgcaagcatgattggctatccatctcttccaccaagctatgcatatctcccgcctgccgcttttcagcaaccatacatgaacagtggcttgttccaccaggcagcagcggcagttcccacctcaagtgtgaaataccctctaccgcagtacaaaagcaacattgcccttgctagcttaccacagccaggctctttgctctcaagctacgttgggggctttggaactgcaagcaacatgcctggaaatttccctctgaatcaaagcacagcagcagcaacaacaactcttgggtttgatgggacggtcccttcacatttcaaagatggaaatcaatttatttctcttcagcagaatgagaaccctgcaatgtggatgcatggtgctagttcacgagggatgcccccacttgcagccagtaccatgtatggctatcaagggcagagtcatcaggccggccttcggcagggccaactaccttcacaatttggctctgcgcttgggcagtcacagccaggcctgggccctgaacaccgaaaccctagcgatagtaacctaagtggcgctgctcaggctaaccaaatgtggccaaatacctactgatccatcccccttgtcgacttctgtggaaggcggtcctgttgtgtgtgcaacgccggtgaggccatgcagtgcttgtgttctgatccaggcacgcggataccagctgtgcctgtgcgcatgagtcgctgtcgtgacattttgaggcacaagagacatatgttcgagcatgctctacctgtagggtttctaggatatggcaaaagaaaatgtagctcgatctatttattcaaattctgatagagaaaggacttcctcttttctattttattctcttttgtcattcacatatcatgtgacaaataaaaccgaaatatctaacagcagcgccattagttcccgaggaagtgaaactttacatcacaggtattgcgtgcctcttggcttcaattttatgattgaggtgattaattgatggatgagcatttccca

SEQ ID NO: 60425 - DNA, 490 bp, Zea Mays
atggcacaacgccgatgtttcggtgagtaccagcgccagcgcccactgatgcagcggcggcggcgacgatgccgttcagggatcttgtgtatatgtcggtggtgtcaggtgctatcctatctaatgggttcttctttggtccagctgggagatggaaggggggagctctcatgttcacggccacatcaggcgagcctttgccgtttgcacaagcataggccttctgcgactgcagcgtgtaacctcccatggcctgcgatgggttggtactgtccaaccttgcaggcatttggcggtaaccgtatgcttgtgggatctgttggtgaggaggataccttgaatccgtcactgggccattaactcttactgatcctgctatggcaaatggaaaacaatctcagaacagggcgggccatcgtaagtcagaaaatatcaacagatcatttgtagtactctctccgtaccaaattataagtcgttttggtttttg

SEQ ID NO: 60426 - DNA, 2774 bp, Zea Mays
ctcttcgcatcccgctatcgtctatgacatcatcatgtattagacttgcagtatgaatcatctctatgatctcagccaagcgccgatgttctaaaggaacttacggcaaagcagctaattcagcagttgctctcgataccagaaaaactaatgctggtcttaacctctttccaccagcactgaaaatttgttctgctgcagaaactaaaactggattttctgcaccaacaagctgttgaagttatatcagtgatcactgtgggagataatactatcagagctcattaagcacgaactgataaaataaccttcaacagtcatgtgtacctgttgcagattgcaaattagagcaggcgtaatatttgatttaaatgttctgaaattttaggccttatttatatgaataacaaagatctatagacgactgtaaagctgtgatgtatcatcatatagttcttaagggaaatgtttttttttacattcagggccaaaaatgtgtagtatgagcatatcgaccacctttcccataacctgaagcatttaggagagttgttgtgtgcatgaaacttattatgttgtccaagctcaaggccttagtctaagaagttcgtaaggaaaatagattttgcattcaataaaaaatgtgtagtatgagtatatcgtctgcaatgtgtatgaaacttattatttgtcaaagctcaagtccttactctaagttcttaaggaaaatatttttttgcattcaaccaaaaatgtgtagtatgaatatattgtccacctttgtcaaaactttaagcgtttaggagagttgttgtgtgcatgaaacttattatttgtcaaagatcaaggtcttagtcgaagacatggacatcaccaatggtggagcttggacaggaaaaaaagtgggggaatgtaacatgagatgaaagtagagggggacaaattagtttcttgtcagcgaaagggcctctagctgagttggttagatggtctgagtagcactcctcaggtcttgagtttgactccgtgtgaaagcgaatttcaggctagggttaaaaagatcccctcatctacctcacgccaaatcacacgtctaaggctgaggttcaggcctcatgggttttctcaacctgtgtcagaaggtaccagaggttgtctaataccctacaagtcaagttttttttgtcaacacttaaatgaataaaaatagatgctccattaagaatttgtctagcttaggggtggcaatggccttctttggtcctaactaagctccactggatatcacacctttagaaaataataatcgtgactcactttgagtcaatgtcataggcctggtggatcctagatatgaggagtggggaagcgctgaagtatgagtgtgtgactgtgtgtacttcttactttcagtcctacttgagatctcgaagcatgttaacattgaagaaacgaaaaacttgcagaaaagaacaaaaagggcagccaaagatgctgtggaggccacaaaaaaatgacaagttatagtaagcataattgcaaattccaccggacacttatggtgttctgagctccaacttgtcaaaaatgagaccactacatgaagaaaatacatgctcccttgaaaaggatggaagcaactattaatgcctaataatatatgtattcctgtcattttcataccactttcgaagagccggcgcaaccatggaactagacagttgctgatagcatatgattgttacttattttactttggcatttcatgagaatattttgtcttcaagaaattccgtgaactacgagcacttgaggaatgtgccagagacaaaatttcggaggcctggtggagcctagggatcatgaggactgggaaagtgctcaagtattgactgtacttattttcagttctatacgtgttcaagaaaaaataacctatttgatattttagtcggattgatggatctatgaaactaaaaatacataagttctcaaagcatgtcaaattgaaaaaataaagtgaagtttgcagaaaaaggacaaaaaacagtggtagaagttacggagaccacagaaaaatgacaagttagagcgaacggaactgcaaaatccatcagcccactcttggtgatctaagctccaagtcatcaaatatgagaccaatacaggaagaaacgcatatgcttttaatgtctttagttgtctctatattcctatcattttacagggcacttcaaagatcaggtgctgccatgcactgttaaggatagcatatgatggttaccaattttatttggagtttcattgaatattttaccttgaggaaattccatgaactaggaacgctcgaggaacatgtctaagccgaaggcaaacggatgatgtagcccgttaacatgctggttatatagatttgaatgcattttctaaagaaacagcaaaggaaatgcgtaacctttggctgcaaacatgtcggatatgagtaatgcattaatggcctttcccacaagtcaaatcacaactatatatatgctatcaattgcaatcacgaaaaaggagaaatttgacggtcacgtgcgcatagcttaaacatgtgctctctgaagtctgaaaagaagggaaaggaaaagggccccaaagtcctaaactgtatcgcttatagaattcgagaataagctcaccgatttgagattgttgttgaggttgagcaagtcgtctgagacaacctcgagcagcgcagaaacagaaatgcgttcaggggcgcttgatgttgt

SEQ ID NO: 60427 - DNA, 2480 bp, Zea Mays
gaaacaaacaggggctttcatttctccccgccctgcagcacgaccgcgaccagccaccgtctccgcccccgccccggttgcttcagatctcctcctcccccacccggccacccccagccgcaccagccaccggccagctcctccgcaccaggataatctctgcccttcgtaccccctcgccattgcgcgcgcatataaatcccacatccccatcgctctcgcctctgcccacccacccgccgcgcccctactgcgcagcacgcacgtcccctccgcggccctggatctaggctgatcggtcgccggccgggagcgaggatcgggatctcggcccggggctgcccccccgccggaatggaggtcttcggccccgtcacgcccggacaggtgtcatttttgctaggtctattccctgtcctcatctcatggatctactctgaaatcctcgaatacaagaaatctttgtctcatgggaaagttcattcagacgctaatttggataatggaaccatcaaggaggatgaaaagtcagtattacttgaaggaggacagttgaaatcaccatctacaaagttcaggaacttgtctaccaaagcgaatttgttacggtttataactatggacgagtcttttctgcttgaaaaccgtgctgtactgagagccatggctgaatttggcgttgttctggtttacttctatatctgtgaccgcacagacatatttccagaaagcaagaagagctacaatcgtgatctgttcctgtttctatacattcttctcatcatagcatcaacacttacttcactaaagaagcatcatgaaaaatcagcattttcaggaaagtctatactctatcttaatcgccaccaaactgaggaatggaaagggtggatgcaggtcttatttctgatgtaccattattttgctgcttctgagatatacaatgcaatccgtgtgttcattgcttgctatgtctggatgactggatttgggaatttctcatattactatatcaagaaagattttagtattgcaagatttgctcagatgatgtggagattaaatttctttgtggcattctgttgcattgtccttgacaatgatctcatgctctattatatatgcccaatgcacacactatttactcttatggtatatggatcacttggtctgtttaacaaatacaatgaggctataaagatccatcgccatccaaggcacacttacccctgctacatgagtggcatttccgatctggcctcgatcgatacatatggattattggaatgatttatgcttacttccatcctaatgttgaaagatggatggagaagctggaagaatctgagactaaggttagattatcaatcaagggaaccattgtcactctttcattgacggttggctttctgtggtatgaatatatatacaagctagacaaagttacatacaacaagtaccatccctacacatcatggatccctataactgtttatatctgcctgcgcaattgcacccagcagttgaggaatgcctctttagctcttttcgcatggcttggcaagattacactcgagacttatatttctcagatccatatttggcttaggtctagcatgccaaatggacaaccaaagtggcttctttgtttcataccagattatcctatgcttaacttcatgcttactacagcgatctatcttcttctatcataccgtgtgtttgagatcacaaacgtcttgaagtcggcttttatccccagtagggataatagccgcctataccaaaatttgattgctgggatcgccatctcagtgtgcttgtatctctgctcgcttattcttctgaagattcctggtgtatagggatgaagatcttgatagaaggtttcttgtaaaatgtttgcttgataggatgtttcagctcgggcctcgatccccttttgctgttgtggagatagttgggatgcgcggagaagcggctaaagttggacatacggggaattgaattgccagaggctgcagatacagaagtccgaatcttgatctttttgttcattcaaaacacggatggatacaacaagtaggcaatccttccattcttttggaagttgtagcaactgttcgctagactatgttgatgcaacctcgttgtatgagttatcctgtagaactgcaccgtgttgtgccataggtattctgaagctgtaaaaaaaacgacgggcatttcttcttccttgaaaagaagaaatataaaggcagaggcgcagagccctttcttctcctaattgtaatgtcgtgtttgctttggagtttgaaccatccagtctatatcctgcttcttcaagtgttcgtgctcgtgctgtacgtgcgtacccgcgggctcagtcgaccggtggacggtggtagactgtatgcacggctcaaacttggtgtatgtgtgaaaaattacccgccactgttgttggttacattgaaata

SEQ ID NO: 60428 - DNA, 2432 bp, Zea Mays
gaaacaaacaggggctttcatttctccccgccctgcagcacgaccgcgaccagccaccgtctccgcccccgccccggttgcttcagatctcctcctcccccacccggccacccccagccgcaccagccaccggccagctcctccgcaccaggataatctctgcccttcgtaccccctcgccattgcgcgcgcatataaatcccacatccccatcgctctcgcctctgcccacccacccgccgcgcccctactgcgcagcacgcacgtcccctccgcggccctggatctaggctgatcggtcgccggccgggagcgaggatcgggatctcggcccggggctgcccccccgccggaatggaggtcttcggccccgtcacgcccggacaggtgtcatttttgctaggtctattccctgtcctcatctcatggatctactctgaaatcctcgaatacaagaaatctttgtctcatgggaaagttcattcagacgctaatttggataatggaaccatcaaggaggatgaaaagtcagtattacttgaaggaggacagttgaaatcaccatctacaaagttcaggaacttgtctaccaaagcgaatttgttacggtttataactatggacgagtcttttctgcttgaaaaccgtgctgtactgagagccatggctgaatttggcgttgttctggtttacttctatatctgtgaccgcacagacatatttccagaaagcaagaagagctacaatcgtgatctgttcctgtttctatacattcttctcatcatagcatcaacacttacttcactaaagaagcatcatgaaaaatcagcattttcaggaaagtctatactctatcttaatcgccaccaaactgaggaatggaaagggtggatgcaggtcttatttctgatgtaccattattttgctgcttctgagatatacaatgcaatccgtgtgttcattgcttgctatgtctggatgactggatttgggaatttctcatattactatatcaagaaagattttagtattgcaagatttgctcagatgatgtggagattaaatttctttgtggcattctgttgcattgtccttgacaatgatctcatgctctattatatatgcccaatgcacacactatttactcttatggtatatggatcacttggtctgtttaacaaatacaatgaggctataaagatccatcgccatccaaggcacacttacccctgctacatgagtggcatttccgatctggcctcgatcgatacatatggattattggaatgatttatgcttacttccatcctaatgttgaaagatggatggagaagctggaagaatctgagactaaggttagattatcaatcaagggaaccattgtcactctttcattgacggttggctttctgtggtatgaatatatatacaagctagacaaagttacatacaacaagtaccatccctacacatcatggatccctataactgtttatatctgcctgcgcaattgcacccagcagttgaggaatgcctctttagctcttttcgcatggcttggcaagattacactcgagacttatatttctcagatccatatttggcttaggtctagcatgccaaatggacaaccaaagtggcttctttgtttcataccagattatcctatgcttaacttcatgcttactacagcgatctatcttcttctatcataccgtgtgtttgagatcacaaacgtcttgaagtcggcttttatccccagtagggataatagccgcctataccaaaatttgattgctgggatcgccatctcagtgtgcttgtatctctgctcgcttattcttctgaagattcctggtgtataggatgtttcagctcgggcctcgatccccttttgctgttgtggagatagttgggatgcgcggagaagcggctaaagttggacatacggggaattgaattgccagaggctgcagatacagaagtccgaatcttgatctttttgttcattcaaaacacggatggatacaacaagtaggcaatccttccattcttttggaagttgtagcaactgttcgctagactatgttgatgcaacctcgttgtatgagttatcctgtagaactgcaccgtgttgtgccataggtattctgaagctgtaaaaaaaacgacgggcatttcttcttccttgaaaagaagaaatataaaggcagaggcgcagagccctttcttctcctaattgtaatgtcgtgtttgctttggagtttgaaccatccagtctatatcctgcttcttcaagtgttcgtgctcgtgctgtacgtgcgtacccgcgggctcagtcgaccggtggacggtggtagactgtatgcacggctcaaacttggtgtatgtgtgaaaaattacccgccactgttgttggttacattgaaata

SEQ ID NO: 60429 - DNA, 2592 bp, Zea Mays
gaaacaaacaggggctttcatttctccccgccctgcagcacgaccgcgaccagccaccgtctccgcccccgccccggttgcttcagatctcctcctcccccacccggccacccccagccgcaccagccaccggccagctcctccgcaccaggataatctctgcccttcgtaccccctcgccattgcgcgcgcatataaatcccacatccccatcgctctcgcctctgcccacccacccgccgcgcccctactgcgcagcacgcacgtcccctccgcggccctggatctaggctgatcggtcgccggccgggagcgaggatcgggatctcggcccggggctgcccccccgccggaatggaggtcttcggccccgtcacgcccggacaggtgtcatttttgctaggtctattccctgtcctcatctcatggatctactctgaaatcctcgaatacaagaaatctttgtctcatgggaaagttcattcagacgctaatttggataatggaaccatcaaggaggatgaaaagtcagtattacttgaaggaggacagttgaaatcaccatctacaaagttcaggaacttgtctaccaaagcgaatttgttacggtttataactatggacgagtcttttctgcttgaaaaccgtgctgtactgagagccatggctgaatttggcgttgttctggtttacttctatatctgtgaccgcacagacatatttccagaaagcaagaagagctacaatcgtgatctgttcctgtttctatacattcttctcatcatagcatcaacacttacttcactaaagaagcatcatgaaaaatcagcattttcaggaaagtctatactctatcttaatcgccaccaaactgaggaatggaaagggtggatgcaggtcttatttctgatgtaccattattttgctgcttctgagatatacaatgcaatccgtgtgttcattgcttgctatgtctggatgactggatttgggaatttctcatattactatatcaagaaagattttagtattgcaagatttgctcagatgatgtggagattaaatttctttgtggcattctgttgcattgtccttgacaatgatctcatgctctattatatatgcccaatgcacacactatttactcttatggtatatggatcacttggtctgtttaacaaatacaatgaggtaccatcaatcatggctattaagattgcttgctgcttcttgtctgtaattttgatatgggaaatccctggggtatttgaatcattgtgggccccctttacgtttctgctaggctataaagatccatcgccatccaaggcacacttacccctgctacatgagtggcatttccgatctggcctcgatcgatacatatggattattggaatgatttatgcttacttccatcctaatgttgaaagatggatggagaagctggaagaatctgagactaaggttagattatcaatcaagggaaccattgtcactctttcattgacggttggctttctgtggtatgaatatatatacaagctagacaaagttacatacaacaagtaccatccctacacatcatggatccctataactgtttatatctgcctgcgcaattgcacccagcagttgaggaatgcctctttagctcttttcgcatggcttggcaagattacactcgagacttatatttctcagatccatatttggcttaggtctagcatgccaaatggacaaccaaagtggcttctttgtttcataccagattatcctatgcttaacttcatgcttactacagcgatctatcttcttctatcataccgtgtgtttgagatcacaaacgtcttgaagtcggcttttatccccagtagggataatagccgcctataccaaaatttgattgctgggatcgccatctcagtgtgcttgtatctctgctcgcttattcttctgaagattcctggtgtatagggatgaagatcttgatagaaggtttcttgtaaaatgtttgcttgataggatgtttcagctcgggcctcgatccccttttgctgttgtggagatagttgggatgcgcggagaagcggctaaagttggacatacggggaattgaattgccagaggctgcagatacagaagtccgaatcttgatctttttgttcattcaaaacacggatggatacaacaagtaggcaatccttccattcttttggaagttgtagcaactgttcgctagactatgttgatgcaacctcgttgtatgagttatcctgtagaactgcaccgtgttgtgccataggtattctgaagctgtaaaaaaaacgacgggcatttcttcttccttgaaaagaagaaatataaaggcagaggcgcagagccctttcttctcctaattgtaatgtcgtgtttgctttggagtttgaaccatccagtctatatcctgcttcttcaagtgttcgtgctcgtgctgtacgtgcgtacccgcgggctcagtcgaccggtggacggtggtagactgtatgcacggctcaaacttggtgtatgtgtgaaaaattacccgccactgttgttggttacattgaaata

SEQ ID NO: 60430 - DNA, 1938 bp, Zea Mays
ctactgcaatagttttcttctcacttgtatatttcaagctttcgagtttcgacaactaaatgccaccaaaatgtacttactgcagtagtgcttttgcattcccttttggtttctgtcttacacaggtactccgtctgttccaaattataagacgttttagctttctagatacattgctttaactatgtatgaacatagtgtatatctaagtgcatagcaaaagttatgcatataaaaaagccaaaatgccttatagtttggaatggagggagtattgtgttaatccattctggttgcaagtcttatttctgatgtaccattattttgctgcttctgagatatacaatgcaatccgtgtgttcattgcttgctatgtctggatgactggatttgggaatttctcatattactatatcaagaaagattttagtattgcaagatttgctcagatgatgtggagattaaatttctttgtggcattctgttgcattgtccttgacaatgatctcatgctctattatatatgcccaatgcacacactatttactcttatggtatatggatcacttggtctgtttaacaaatacaatgaggtaccatcaatcatggctattaagattgcttgctgcttcttgtctgtaattttgatatgggaaatccctggggtatttgaatcattgtgggccccctttacgtttctgctaggctataaagatccatcgccatccaaggcacacttacccctgctacatgagtggcatttccgatctggcctcgatcgatacatatggattattggaatgatttatgcttacttccatcctaatgttgaaagatggatggagaagctggaagaatctgagactaaggttagattatcaatcaagggaaccattgtcactctttcattgacggttggctttctgtggtatgaatatatatacaagctagacaaagttacatacaacaagtaccatccctacacatcatggatccctataactgtttatatctgcctgcgcaattgcacccagcagttgaggaatgcctctttagctcttttcgcatggcttggcaagattacactcgagacttatatttctcagatccatatttggcttaggtctagcatgccaaatggacaaccaaagtggcttctttgtttcataccagattatcctatgcttaacttcatgcttactacagcgatctatcttctttagggataatagccgcctataccaaaatttgattgctgggatcgccatctcagtgtgcttgtatctctgctcgcttattcttctgaagattcctggtgtatagggatgaagatcttgatagaaggtttcttgtaaaatgtttgcttgataggatgtttcagctcgggcctcgatccccttttgctgttgtggagatagttgggatgcgcggagaagcggctaaagttggacatacggggaattgaattgccagaggctgcagatacagaagtccgaatcttgatctttttgttcattcaaaacacggatggatacaacaagtaggcaatccttccattcttttggaagttgtagcaactgttcgctagactatgttgatgcaacctcgttgtatgagttatcctgtagaactgcaccgtgttgtgccataggtattctgaagctgtaaaaaaaacgacgggcatttcttcttccttgaaaagaagaaatataaaggcagaggcgcagagccctttcttctcctaattgtaatgtcgtgtttgctttggagtttgaaccatccagtctatatcctgcttcttcaagtgttcgtgctcgtgctgtacgtgcgtacccgcgggctcagtcgaccggtggacggtggtagactgtatgcacggctcaaacttggtgtatgtgtgaaaaattacccgccactgttgttggttacattgaaata

SEQ ID NO: 60431 - DNA, 1738 bp, Zea Mays
caagccagctaaagctttgttcgttttttctatatttaaacacttaaatatacattatgtatacaaactaaaatgtttttttatgattagacgtacgaaagtggccttcgtcactggtagatggaaaacgtaatgccggcgaagttgtttatgttacacgatgagcacatggttgttggccacacaagagtcaaacactcccttccctgcgccgatggtgacactcccacgccacaccccacaatccaatcccaaccggaatcgcctgcagccggcgcccggctccgccagtccaatggctccgccgcttgctcgcctcattctgatccttctcgctgccgccgtcccactcttggctgctcccgcggcggccgcggcggcggtgtttccgaaagaagcacttccgaccaagtccggggcgggccggggtgctccagcctcctgggcaacttcttcgagctcggcccctacttcgtgaaccccgacggcgagaccctctcgcgcaaccccttcgcgtggaaccgccgcttcggactcctcttcatcgacagcccgctcggcacaggcttcagcgcggcgccgtccccggccgacatccccaccaaccagtccgtcatcgccgcgcacatcctcgccgcgctgcagtccttctacgccctggacccagccctccgcgcgcggcccttcttcctgacgggcgagagctacgcgggcaagtacatccccgcggcgggggcgcacatcctggacgcgaaccgggcgctgccggaggcgctgcgcgtgaacctccgcggcgtggccatcggcaacgggctcacgcacccggtggcgcaggtggccacgcacgcggactcggcctacttcctgggcctcctcaacgcgcggcagaagcgggagctggaggcgctgcagtcggaggcggtgtcgctgacacgggcccagcggtgggccgcggcgtcggacgcgcgggggcgggtgctgtcgtggctgcagaacacgacggggctggccacgctgtacgactacgcgaagcagcgggactacgcgacggccgccgtgggggcgttcctgaaccgcgccgaggccaaggcggcgctgggcgcgcgcgaggacgtggcgtgggaggagtgcagcgacgcggtgggcgtggcgatgcacgcggacgtgatgcgcaacgtgctgccgcaggtggagtcgctgctgcggagcacggcccgcgtgctgctgtaccagggcgtccgcgacctccgggacggcgtcgtgtccaccgaggcgtggctgggcggggtgcgctgggacggcctgcgcgcgttcctggacgcggagcgcgccgtgtggcggacggccgcggagggcggggagctcgcgggctacgtgcagcggtcgggctcgctgacgcacgtggtggtgtacgccgcggggcacctagtgccggcggacaacgggcgcgcggcgcaggagatgatcgagggatgggtgctggggacagggatgttcggccgcggttgtggtgatcgcgtccgcgacggcgtcaggagcgccgccacatgatggctgcccgagcaccccgacagcacgggcggaatgtgtcccagctatcttactgcgcgatatggattcttgttgctcggatttgaatgggttcgattcgattctatgtttaccgagtgatgaaacagatcggaatgcaaaaaaaacagagatacttttaactgtttgttacaggatgttgaagcct

SEQ ID NO: 60432 - DNA, 3204 bp, Zea Mays
cccccccttccacgagacaaaatccagaaccaggccggcggcccactcccaccgccgcgcctacgccttcccccgccccccgcgcggaggagggtgccgccggcgatggagacgacggccgcgggcgcgccaagagcgcagacgctgcgggacctcgcggaggagggcaagaagcggggcgtcctgctcctcgtcttcgccttcgggctggccttcctcatgtcccttacgagctcgtcagtttggtttaatctgccatttgccatagctctgattgttttgttccgctacatatcgcttgattatggccttcgtagaaagagcgtaactagaacagatcatgccagtcattcactcgtcaaaacaaaaggtactgaggtaaagaaagtcattcatcagactgaaacggatggaaaaatagattggaggagcaaggttaactcgcctccagttgaagcagcattcgaacagttcacaaggcaccttatctcagaatgggtaacagatctgtggtactcgcgcgtaacacctgacaaggaaggtccagaggaactcatcgatgtagtcaatactgtccttggggagatttcagttcgggcaagaaatgttaaccttatcaatctgctgatcagggatttggtcgatcttatatgcaataatttggaactttatcatttctgtcaagccaagattggaagagagaagtttgtgggccttccttcagagcgtcgtgatgctgaactgaaaatgatccttttagctgaaaacaagttgcatcctgctttattttcagctggcgctgaatacaaggtattgaaaagtcttgctgacgggttgatctcaatcacagtgaagcctcaggatctacaatgtactttcttccggtgtacagcgcgggaacttctcgcttgtgcagttttgagacctgttgtgaacttagcaaatccaaggtttataaatgaaagaatcgaatcctttgctctttcgcatgccaataagttggagaaaggaactgcagaatccttggatgttgtcacaactgttaagcacagggaaccacatatgccctctgttgatgaattttcggcactaatagaccactcaagttcaggtgttgagctcgttcaatttcgtcagggtcaatcgaaaactgcatcagatatacaacctggaaaaagtacaaatccatatagtctaaaattagaatcctctcatgcacctttagtcagtagttcacacccactggagtcaacaagtttagcttcgtcttcccacgttacttctgataatgggttttcgttgcataccaaaagcagcaacagagcaactgcaaatggtcatggtagagagtgtgcacagcccttgggtatcagttctgagcgtgcacatcaagctttagcacttgagcaccttgagaatatgtggacaaagggaaagaactacaaaccagaaaatgtagaacatgtcgcaaaagtgtctgttggatctgcttctctgggctcgacttcagttcagcaatcagttccttgcagcacttcagtttgttacaatcaaagtaattctgaaagaccaacagcgtcatctcagtcaaaggaccagcatttggtaagacactcaactacacctacatatgtaacatatccaaatggcaccccgaaaagcctatctgcagaaatggcagaacatgccggtccagaagactttgcagtagagagtgagagttcatatgccactgaggacgatgaattcaacaatgtgactggacttgattctcctgttaccagagtttgggaaagcaaaagtaaaggaaatgctaccttatcacatatacatcacccactcgaatctcctggtttccatagagcaaagaagaacagaagtcatgtgggaaaactgaagatgtcaagaacttcttcaggaagaaaaaggtcaaggtcaaatgctcagaagcctcctatctggcaagaagtggagagatcctctttctctgttggtgatagtatggacatactaaatacatctgcaaatgatctaaagacgcatgagctagacgaggatcctgaggtggaaagtatggctaggatgtttagtagttcaaatacttcatctttattgttgccatcaagtgactctgcatattcttcaaattattgtggtgccaatgtgctacaagactcttatttgaagttaagatgcgaggtggtaggagctagcattgtcaaaagcgggtctggcatgttttgctgtgtattctatttccgtgaccgacgccaatggtaatagttggtccattaagaggaggtttcgtcattttgaagacctgcatcggcgtctaaaagagtatgctcagtacaatcttcatttacctccaaaacatttcctctcatcaggtttagaggtttctgttgttcgagagagatgcaagctgctcgacatatatctgaagaaccttctgcaaattcctattgtttcaagctgcatagaagtctgggattttctgagtgtggattcacagacatatattttcacggacactctctcagtcatccaaacattgtcagtcagtttagatgaaagatcaaatgggaaaaatataaaagcattgaactcttctggagctttgaatggaaattctatctctggaggtcaatctttgcatggacatatagacgacaccgtacataaggattcagacatcgcttgtgatggtttgagatttaggaaagggaatgtgaacaagaacttgggaaacggtgttagccacacaacagatagtgttagcaacacaactgccaatcattatcaggacaattctggaagtgatccagagcagaatgatcattccttttcaatagattcattaaatcctaagaagttgcgttcaactgaaaccaatgacacatctcaaattccagagtctggaggattttcagtatctcctaatgattggatggccccgaatcttagtgttcccttgtttcatcttgttgatgtggtctttcagctccaagatggaggctggataaggcgtcaagcattttgggtagcaaagcaaatactgcaattgggaatgggagacacgtttgatgactggcttgttgacaaaatccaattacttaggaaagggaggataattgcttttgctgttaagcgcattgaacaagatcaccccccataatttagtctgtattttctctgcgtaca

SEQ ID NO: 60433 - DNA, 3944 bp, Zea Mays
cccccccttccacgagacaaaatccagaaccaggccggcggcccactcccaccgccgcgcctacgccttcccccgccccccgcgcggaggagggtgccgccggcgatggagacgacggccgcgggcgcgccaagagcgcagacgctgcgggacctcgcggaggagggcaagaagcggggcgtcctgctcctcgtcttcgccttcgggctggccttcctcatgtcccttacgagctcgtcagtttggtttaatctgccatttgccatagctctgattgttttgttccgctacatatcgcttgattatggccttcgtagaaagagcgtaactagaacagatcatgccagtcattcactcgtcaaaacaaaaggtactgaggtaaagaaagtcattcatcagactgaaacggatggaaaaatagattggaggagcaaggttaactcgcctccagttgaagcagcattcgaacagttcacaaggcaccttatctcagaatgggtaacagatctgtggtactcgcgcgtaacacctgacaaggaaggtccagaggaactcatcgatgtagtcaatactgtccttggggagatttcagttcgggcaagaaatgttaaccttatcaatctgctgatcagggatttggtcgatcttatatgcaataatttggaactttatcatttctgtcaagccaagattggaagagagaagtttgtgggccttccttcagagcgtcgtgatgctgaactgaaaatgatccttttagctgaaaacaagttgcatcctgctttattttcagctggcgctgaatacaaggtattgaaaagtcttgctgacgggttgatctcaatcacagtgaagcctcaggatctacaatgtactttcttccggtgtacagcgcgggaacttctcgcttgtgcagttttgagacctgttgtgaacttagcaaatccaaggtttataaatgaaagaatcgaatcctttgctctttcgcatgccaataagttggagaaaggaactgcagaatccttggatgttgtcacaactgttaagcacagggaaccacatatgccctctgttgatgaattttcggcactaatagaccactcaagttcaggtgttgagctcgttcaatttcgtcagggtcaatcgaaaactgcatcagatatacaacctggaaaaagtacaaatccatatagtctaaaattagaatcctctcatgcacctttagtcagtagttcacacccactggagtcaacaagtttagcttcgtcttcccacgttacttctgataatgggttttcgttgcataccaaaagcagcaacagagcaactgcaaatggtcatggtagagagtgtgcacagcccttgggtatcagttctgagcgtgcacatcaagctttagcacttgagcaccttgagaatatgtggacaaagggaaagaactacaaaccagaaaatgtagaacatgtcgcaaaagtgtctgttggatctgcttctctgggctcgacttcagttcagcaatcagttccttgcagcacttcagtttgttacaatcaaagtaattctgaaagaccaacagcgtcatctcagtcaaaggaccagcatttggtaagacactcaactacacctacatatgtaacatatccaaatggcaccccgaaaagcctatctgcagaaatggcagaacatgccggtccagaagactttgcagtagagagtgagagttcatatgccactgaggacgatgaattcaacaatgtgactggacttgattctcctgttaccagagtttgggaaagcaaaagtaaaggaaatgctaccttatcacatatacatcacccactcgaatctcctggtttccatagagcaaagaagaacagaagtcatgtgggaaaactgaagatgtcaagaacttcttcaggaagaaaaaggtcaaggtcaaatgctcagaagcctcctatctggcaagaagtggagagatcctctttctctgttggtgatagtatggacatactaaatacatctgcaaatgatctaaagacgcatgagctagacgaggatcctgaggtggaaagtatggctaggatgtttagtagttcaaatacttcatctttattgttgccatcaagtgactctgcatattcttcaaattattgtggtgccaatgtgctacaagactcttatttgaagttaagatgcgaggtggtaggagctagcattgtcaaaagcgggtctggcatgttttgctgtgtattctatttccgtgaccgacgccaatggtaatagttggtccattaagaggaggtttcgtcattttgaagacctgcatcggcgtctaaaagagtatgctcagtacaatcttcatttacctccaaaacatttcctctcatcaggtttagaggtttctgttgttcgagagagatgcaagctgctcgacatatatctgaagaaccttctgcaaattcctattgtttcaagctgcatagaagtctgggattttctgagtgtggattcacagacatatattttcacggacactctctcagtcatccaaacattgtcagtcagtttagatgaaagatcaaatgggaaaaatataaaagcattgaactcttctggagctttgaatggaaattctatctctggaggtcaatctttgcatggacatatagacgacaccgtacataaggattcagacatcgcttgtgatggtttgagatttaggaaagggaatgtgaacaagaacttgggaaacggtgttagccacacaacagatagtgttagcaacacaactgccaatcattatcaggacaattctggaagtgatccagagcagaatgatcattccttttcaatagattcattaaatcctaagaagttgcgttcaactgaaaccaatgacacatctcaaattccagagtctggaggattttcagtatctcctaatgattggatggccccgaatcttagtgttcccttgtttcatcttgttgatgtggtctttcagctccaagatggaggctggataagattctctggcctgatggaattttcatgacaaaacatccaaagagaaattcgcctccacctcctcctggtgctcagagcaatggcatgggaaactatctaagcgatgaacaacggatagaagctgctcatcgtgcaaattttgtccgtgaactgataatagataaagccccatctccactagtgagtcttgttggtcgaaaggattatgaaagatgtgctcatgatatctatttctttcttcagtccccggtttgtttgaagcagctagcgttcgaactccttgagctgcttgttctttcttcatttccggagttggatggcactgtgaggaagtggcacgaagataaagagcaattctgcgcccagtaatgtttatcaaacgtttgaatttgtcacgggcggtgtttgtttccaacacatatcgtctttccagagtggtgtggcctgtgaattctgcgaaaataaggtggtggcttcagaggagtgcccgtggatatctcagtttgaagtgggtggtggctttgtgcagtgtgaatatggttagatagtgcgaggatatggtccctttttccaccgggccatggcagaacggtttttgtgcccgatagagttcatttttccccctccagatttggtatacgtaatgctgctgcctgaaaggaaagagatggtggcgcattttttttgcacccgttttggtggtacactggtacccgtcttgtgtaaatctgcatagagataaatgaagtttcgaggtggtcaatgaatgataatagctctctggcatcgtgatgattcgttgtggctccgccttgctgtacgtttttttggtgctgcccctgcgaatcatctcggcactattttgtgatgataaaaaaaaagtaatatgcgctggagattcgtttattcaaatttcc

SEQ ID NO: 60434 - DNA, 3694 bp, Zea Mays
cccccccttccacgagacaaaatccagaaccaggccggcggcccactcccaccgccgcgcctacgccttcccccgccccccgcgcggaggagggtgccgccggcgatggagacgacggccgcgggcgcgccaagagcgcagacgctgcgggacctcgcggaggagggcaagaagcggggcgtcctgctcctcgtcttcgccttcgggctggccttcctcatgtcccttacgagctcgtcagtttggtttaatctgccatttgccatagctctgattgttttgttccgctacatatcgcttgattatggccttcgtagaaagagcgtaactagaacagatcatgccagtcattcactcgtcaaaacaaaaggtactgaggtaaagaaagtcattcatcagactgaaacggatggaaaaatagattggaggagcaaggttaactcgcctccagttgaagcagcattcgaacagttcacaaggcaccttatctcagaatgggtaacagatctgtggtactcgcgcgtaacacctgacaaggaaggtccagaggaactcatcgatgtagtcaatactgtccttggggagatttcagttcgggcaagaaatgttaaccttatcaatctgctgatcagggatttggtcgatcttatatgcaataatttggaactttatcatttctgtcaagccaagattggaagagagaagtttgtgggccttccttcagagcgtcgtgatgctgaactgaaaatgatccttttagctgaaaacaagttgcatcctgctttattttcagctggcgctgaatacaaggtattgaaaagtcttgctgacgggttgatctcaatcacagtgaagcctcaggatctacaatgtactttcttccggtgtacagcgcgggaacttctcgcttgtgcagttttgagacctgttgtgaacttagcaaatccaaggtttataaatgaaagaatcgaatcctttgctctttcgcatgccaataagttggagaaaggaactgcagaatccttggatgttgtcacaactgttaagcacagggaaccacatatgccctctgttgatgaattttcggcactaatagaccactcaagttcaggtgttgagctcgttcaatttcgtcagggtcaatcgaaaactgcatcagatatacaacctggaaaaagtacaaatccatatagtctaaaattagaatcctctcatgcacctttagtcagtagttcacacccactggagtcaacaagtttagcttcgtcttcccacgttacttctgataatgggttttcgttgcataccaaaagcagcaacagagcaactgcaaatggtcatggtagagagtgtgcacagcccttgggtatcagttctgagcgtgcacatcaagctttagcacttgagcaccttgagaatatgtggacaaagggaaagaactacaaaccagaaaatgtagaacatgtcgcaaaagtgtctgttggatctgcttctctgggctcgacttcagttcagcaatcagttccttgcagcacttcagtttgttacaatcaaagtaattctgaaagaccaacagcgtcatctcagtcaaaggaccagcatttggtaagacactcaactacacctacatatgtaacatatccaaatggcaccccgaaaagcctatctgcagaaatggcagaacatgccggtccagaagactttgcagtagagagtgagagttcatatgccactgaggacgatgaattcaacaatgtgactggacttgattctcctgttaccagagtttgggaaagcaaaagtaaaggaaatgctaccttatcacatatacatcacccactcgaatctcctggtttccatagagcaaagaagaacagaagtcatgtgggaaaactgaagatgtcaagaacttcttcaggaagaaaaaggtcaaggtcaaatgctcagaagcctcctatctggcaagaagtggagagatcctctttctctgttggtgatagtatggacatactaaatacatctgcaaatgatctaaagacgcatgagctagacgaggatcctgaggtggaaagtatggctaggatgtttagtagttcaaatacttcatctttattgttgccatcaagtgactctgcatattcttcaaattattgtggtgccaatgtgctacaagactcttatttgaagttaagatgcgaggtggtaggagctagcattgtcaaaagcgggtctggcatgttttgctgtgtattctatttccgtgaccgacgccaatggtaatagttggtccattaagaggaggtttcgtcattttgaagacctgcatcggcgtctaaaagagtatgctcagtacaatcttcatttacctccaaaacatttcctctcatcaggtttagaggtttctgttgttcgagagagatgcaagctgctcgacatatatctgaagaaccttctgcaaattcctattgtttcaagctgcatagaagtctgggattttctgagtgtggattcacagacatatattttcacggacactctctcagtcatccaaacattgtcagtggatggccccgaatcttagtgttcccttgtttcatcttgttgatgtggtctttcagctccaagatggaggctggataaggcgtcaagcattttgggtagcaaagcaaatactgcaattgggaatgggagacacgtttgatgactggcttgttgacaaaatccaattacttaggaaagggaggataattgcttttgctgttaagcgcattgaacaaattctctggcctgatggaattttcatgacaaaacatccaaagagaaattcgcctccacctcctcctggtgctcagagcaatggcatgggaaactatctaagcgatgaacaacggatagaagctgctcatcgtgcaaattttgtccgtgaactgataatagataaagccccatctccactagtgagtcttgttggtcgaaaggattatgaaagatgtgctcatgatatctatttctttcttcagtccccggtttgtttgaagcagctagcgttcgaactccttgagctgcttgttctttcttcatttccggagttggatggcactgtgaggaagtggcacgaagataaagagcaattctgcgcccagtaatgtttatcaaacgtttgaatttgtcacgggcggtgtttgtttccaacacatatcgtctttccagagtggtgtggcctgtgaattctgcgaaaataaggtggtggcttcagaggagtgcccgtggatatctcagtttgaagtgggtggtggctttgtgcagtgtgaatatggttagatagtgcgaggatatggtccctttttccaccgggccatggcagaacggtttttgtgcccgatagagttcatttttccccctccagatttggtatacgtaatgctgctgcctgaaaggaaagagatggtggcgcattttttttgcacccgttttggtggtacactggtacccgtcttgtgtaaatctgcatagagataaatgaagtttcgaggtggtcaatgaatgataatagctctctggcatcgtgatgattcgttgtggctccgccttgctgtacgtttttttggtgctgcccctgcgaatcatctcggcactattttgtgatgataaaaaaaaagtaatatgcgctggagattcgtttattcaaatttcc

SEQ ID NO: 60435 - DNA, 4022 bp, Zea Mays
cccccccttccacgagacaaaatccagaaccaggccggcggcccactcccaccgccgcgcctacgccttcccccgccccccgcgcggaggagggtgccgccggcgatggagacgacggccgcgggcgcgccaagagcgcagacgctgcgggacctcgcggaggagggcaagaagcggggcgtcctgctcctcgtcttcgccttcgggctggccttcctcatgtcccttacgagctcgtcagtttggtttaatctgccatttgccatagctctgattgttttgttccgctacatatcgcttgattatggccttcgtagaaagagcgtaactagaacagatcatgccagtcattcactcgtcaaaacaaaaggtactgaggtaaagaaagtcattcatcagactgaaacggatggaaaaatagattggaggagcaaggttaactcgcctccagttgaagcagcattcgaacagttcacaaggcaccttatctcagaatgggtaacagatctgtggtactcgcgcgtaacacctgacaaggaaggtccagaggaactcatcgatgtagtcaatactgtccttggggagatttcagttcgggcaagaaatgttaaccttatcaatctgctgatcagattggaagagagaagtttgtgggccttccttcagagcgtcgtgatgctgaactgaaaatgatccttttagctgaaaacaagttgcatcctgctttattttcagctggcgctgaatacaaggtattgaaaagtcttgctgacgggttgatctcaatcacagtgaagcctcaggatctacaatgtactttcttccggtgtacagcgcgggaacttctcgcttgtgcagttttgagacctgttgtgaacttagcaaatccaaggtttataaatgaaagaatcgaatcctttgctctttcgcatgccaataagttggagaaaggaactgcagaatccttggatgttgtcacaactgttaagcacagggaaccacatatgccctctgttgatgaattttcggcactaatagaccactcaagttcaggtgttgagctcgttcaatttcgtcagggtcaatcgaaaactgcatcagatatacaacctggaaaaagtacaaatccatatagtctaaaattagaatcctctcatgcacctttagtcagtagttcacacccactggagtcaacaagtttagcttcgtcttcccacgttacttctgataatgggttttcgttgcataccaaaagcagcaacagagcaactgcaaatggtcatggtagagagtgtgcacagcccttgggtatcagttctgagcgtgcacatcaagctttagcacttgagcaccttgagaatatgtggacaaagggaaagaactacaaaccagaaaatgtagaacatgtcgcaaaagtgtctgttggatctgcttctctgggctcgacttcagttcagcaatcagttccttgcagcacttcagtttgttacaatcaaagtaattctgaaagaccaacagcgtcatctcagtcaaaggaccagcatttggtaagacactcaactacacctacatatgtaacatatccaaatggcaccccgaaaagcctatctgcagaaatggcagaacatgccggtccagaagactttgcagtagagagtgagagttcatatgccactgaggacgatgaattcaacaatgtgactggacttgattctcctgttaccagagtttgggaaagcaaaagtaaaggaaatgctaccttatcacatatacatcacccactcgaatctcctggtttccatagagcaaagaagaacagaagtcatgtgggaaaactgaagatgtcaagaacttcttcaggaagaaaaaggtcaaggtcaaatgctcagaagcctcctatctggcaagaagtggagagatcctctttctctgttggtgatagtatggacatactaaatacatctgcaaatgatctaaagacgcatgagctagacgaggatcctgaggtggaaagtatggctaggatgtttagtagttcaaatacttcatctttattgttgccatcaagtgactctgcatattcttcaaattattgtggtgccaatgtgctacaagactcttatttgaagttaagatgcgaggtggtaggagctagcattgtcaaaagcgggtctggcatgttttgctgtgtattctatttccgtgaccgacgccaatggtaatagttggtccattaagaggaggtttcgtcattttgaagacctgcatcggcgtctaaaagagtatgctcagtacaatcttcatttacctccaaaacatttcctctcatcaggtttagaggtttctgttgttcgagagagatgcaagctgctcgacatatatctgaagaaccttctgcaaattcctattgtttcaagctgcatagaagtctgggattttctgagtgtggattcacagacatatattttcacggacactctctcagtcatccaaacattgtcagtcagtttagatgaaagatcaaatgggaaaaatataaaagcattgaactcttctggagctttgaatggaaattctatctctggaggtcaatctttgcatggacatatagacgacaccgtacataaggattcagacatcgcttgtgatggtttgagatttaggaaagggaatgtgaacaagaacttgggaaacggtgttagccacacaacagatagtgttagcaacacaactgccaatcattatcaggacaattctggaagtgatccagagcagaatgatcattccttttcaatagattcattaaatcctaagaagttgcgttcaactgaaaccaatgacacatctcaaattccagagtctggaggattttcagtatctcctaatgattggatggccccgaatcttagtgttcccttgtttcatcttgttgatgtggtctttcagctccaagatggaggctggataaggcgtcaagcattttgggtagcaaagcaaatactgcaattgggaatgggagacacgtttgatgactggcttgttgacaaaatccaattacttaggaaagggaggataattgcttttgctgttaagcgcattgaacaaattctctggcctgatggaattttcatgacaaaacatccaaagagaaattcgcctccacctcctcctggtgctcagagcaatggcatgggaaactatctaagcgatgaacaacggatagaagctgctcatcgtgcaaattttgtccgtgaactgataatagataaagccccatctccactagtgagtcttgttggtcgaaaggattatgaaagatgtgctcatgatatctatttctttcttcagtccccggtttgtttgaagcagctagcgttcgaactccttgagctgcttgttctttcttcatttccggagttggatggcactgtgaggaagtggcacgaagataaagagcaattctgcgcccagtaatgtttatcaaacgtttgaatttgtcacgggcggtgtttgtttccaacacatatcgtctttccagagtggtgtggcctgtgaattctgcgaaaataaggtggtggcttcagaggagtgcccgtggatatctcagtttgaagtgggtggtggctttgtgcagtgtgaatatggttagatagtgcgaggatatggtccctttttccaccgggccatggcagaacggtttttgtgcccgatagagttcatttttccccctccagatttggtatacgtaatgctgctgcctgaaaggaaagagatggtggcgcattttttttgcacccgttttggtggtacactggtacccgtcttgtgtaaatctgcatagagataaatgaagtttcgaggtggtcaatgaatgataatagctctctggcatcgtgatgattcgttgtggctccgccttgctgtacgtttttttggtgctgcccctgcgaatcatctcggcactattttgtgatgataaaaaaaaagtaatatgcgctggagattcgtttattcaaatttcc

SEQ ID NO: 60436 - DNA, 4055 bp, Zea Mays
cccccccttccacgagacaaaatccagaaccaggccggcggcccactcccaccgccgcgcctacgccttcccccgccccccgcgcggaggagggtgccgccggcgatggagacgacggccgcgggcgcgccaagagcgcagacgctgcgggacctcgcggaggagggcaagaagcggggcgtcctgctcctcgtcttcgccttcgggctggccttcctcatgtcccttacgagctcgtcagtttggtttaatctgccatttgccatagctctgattgttttgttccgctacatatcgcttgattatggccttcgtagaaagagcgtaactagaacagatcatgccagtcattcactcgtcaaaacaaaaggtactgaggtaaagaaagtcattcatcagactgaaacggatggaaaaatagattggaggagcaaggttaactcgcctccagttgaagcagcattcgaacagttcacaaggcaccttatctcagaatgggtaacagatctgtggtactcgcgcgtaacacctgacaaggaaggtccagaggaactcatcgatgtagtcaatactgtccttggggagatttcagttcgggcaagaaatgttaaccttatcaatctgctgatcagggatttggtcgatcttatatgcaataatttggaactttatcatttctgtcaagccaagattggaagagagaagtttgtgggccttccttcagagcgtcgtgatgctgaactgaaaatgatccttttagctgaaaacaagttgcatcctgctttattttcagctggcgctgaatacaaggtattgaaaagtcttgctgacgggttgatctcaatcacagtgaagcctcaggatctacaatgtactttcttccggtgtacagcgcgggaacttctcgcttgtgcagttttgagacctgttgtgaacttagcaaatccaaggtttataaatgaaagaatcgaatcctttgctctttcgcatgccaataagttggagaaaggaactgcagaatccttggatgttgtcacaactgttaagcacagggaaccacatatgccctctgttgatgaattttcggcactaatagaccactcaagttcaggtgttgagctcgttcaatttcgtcagggtcaatcgaaaactgcatcagatatacaacctggaaaaagtacaaatccatatagtctaaaattagaatcctctcatgcacctttagtcagtagttcacacccactggagtcaacaagtttagcttcgtcttcccacgttacttctgataatgggttttcgttgcataccaaaagcagcaacagagcaactgcaaatggtcatggtagagagtgtgcacagcccttgggtatcagttctgagcgtgcacatcaagctttagcacttgagcaccttgagaatatgtggacaaagggaaagaactacaaaccagaaaatgtagaacatgtcgcaaaagtgtctgttggatctgcttctctgggctcgacttcagttcagcaatcagttccttgcagcacttcagtttgttacaatcaaagtaattctgaaagaccaacagcgtcatctcagtcaaaggaccagcatttggtaagacactcaactacacctacatatgtaacatatccaaatggcaccccgaaaagcctatctgcagaaatggcagaacatgccggtccagaagactttgcagtagagagtgagagttcatatgccactgaggacgatgaattcaacaatgtgactggacttgattctcctgttaccagagtttgggaaagcaaaagtaaaggaaatgctaccttatcacatatacatcacccactcgaatctcctggtttccatagagcaaagaagaacagaagtcatgtgggaaaactgaagatgtcaagaacttcttcaggaagaaaaaggtcaaggtcaaatgctcagaagcctcctatctggcaagaagtggagagatcctctttctctgttggtgatagtatggacatactaaatacatctgcaaatgatctaaagacgcatgagctagacgaggatcctgaggtggaaagtatggctaggatgtttagtagttcaaatacttcatctttattgttgccatcaagtgactctgcatattcttcaaattattgtggtgccaatgtgctacaagactcttatttgaagttaagatgcgaggtggtaggagctagcattgtcaaaagcgggtctggcatgttttgctgtgtattctatttccgtgaccgacgccaatggtttcgtcattttgaagacctgcatcggcgtctaaaagagtatgctcagtacaatcttcatttacctccaaaacatttcctctcatcaggtttagaggtttctgttgttcgagagagatgcaagctgctcgacatatatctgaagaaccttctgcaaattcctattgtttcaagctgcatagaagtctgggattttctgagtgtggattcacagacatatattttcacggacactctctcagtcatccaaacattgtcagtcagtttagatgaaagatcaaatgggaaaaatataaaagcattgaactcttctggagctttgaatggaaattctatctctggaggtcaatctttgcatggacatatagacgacaccgtacataaggattcagacatcgcttgtgatggtttgagatttaggaaagggaatgtgaacaagaacttgggaaacggtgttagccacacaacagatagtgttagcaacacaactgccaatcattatcaggacaattctggaagtgatccagagcagaatgatcattccttttcaatagattcattaaatcctaagaagttgcgttcaactgaaaccaatgacacatctcaaattccagagtctggaggattttcagtatctcctaatgattggatggccccgaatcttagtgttcccttgtttcatcttgttgatgtggtctttcagctccaagatggaggctggataaggcgtcaagcattttgggtagcaaagcaaatactgcaattgggaatgggagacacgtttgatgactggcttgttgacaaaatccaattacttaggaaagggaggataattgcttttgctgttaagcgcattgaacaaattctctggcctgatggaattttcatgacaaaacatccaaagagaaattcgcctccacctcctcctggtgctcagagcaatggcatgggaaactatctaagcgatgaacaacggatagaagctgctcatcgtgcaaattttgtccgtgaactgataatagataaagccccatctccactagtgagtcttgttggtcgaaaggattatgaaagatgtgctcatgatatctatttctttcttcagtccccggtttgtttgaagcagctagcgttcgaactccttgagctgcttgttctttcttcatttccggagttggatggcactgtgaggaagtggcacgaagataaagagcaattctgcgcccagtaatgtttatcaaacgtttgaatttgtcacgggcggtgtttgtttccaacacatatcgtctttccagagtggtgtggcctgtgaattctgcgaaaataaggtggtggcttcagaggagtgcccgtggatatctcagtttgaagtgggtggtggctttgtgcagtgtgaatatggttagatagtgcgaggatatggtccctttttccaccgggccatggcagaacggtttttgtgcccgatagagttcatttttccccctccagatttggtatacgtaatgctgctgcctgaaaggaaagagatggtggcgcattttttttgcacccgttttggtggtacactggtacccgtcttgtgtaaatctgcatagagataaatgaagtttcgaggtggtcaatgaatgataatagctctctggcatcgtgatgattcgttgtggctccgccttgctgtacgtttttttggtgctgcccctgcgaatcatctcggcactattttgtgatgataaaaaaaaagtaatatgcgctggagattcgtttattcaaatttcc

SEQ ID NO: 60437 - DNA, 3919 bp, Zea Mays
cccccccttccacgagacaaaatccagaaccaggccggcggcccactcccaccgccgcgcctacgccttcccccgccccccgcgcggaggagggtgccgccggcgatggagacgacggccgcgggcgcgccaagagcgcagacgctgcgggacctcgcggaggagggcaagaagcggggcgtcctgctcctcgtcttcgccttcgggctggccttcctcatgtcccttacgagctcgtcagtttggtttaatctgccatttgccatagctctgattgttttgttccgctacatatcgcttgattatggccttcgtagaaagagcgtaactagaacagatcatgccagtcattcactcgtcaaaacaaaaggtactgaggtaaagaaagtcattcatcagactgaaacggatggaaaaatagattggaggagcaaggttaactcgcctccagttgaagcagcattcgaacagttcacaaggcaccttatctcagaatgggtaacagatctgtggtactcgcgcgtaacacctgacaaggaaggtccagaggaactcatcgatgtagtcaatactgtccttggggagatttcagttcgggcaagaaatgttaaccttatcaatctgctgatcagggatttggtcgatcttatatgcaataatttggaactttatcatttctgtcaagccaagattggaagagagaagtttgtgggccttccttcagagcgtcgtgatgctgaactgaaaatgatccttttagctgaaaacaagttgcatcctgctttattttcagctggcgctgaatacaaggtattgaaaagtcttgctgacgggttgatctcaatcacagtgaagcctcaggatctacaatgtactttcttccggtgtacagcgcgggaacttctcgcttgtgcagttttgagacctgttgtgaacttagcaaatccaaggtttataaatgaaagaatcgaatcctttgctctttcgcatgccaataagttggagaaaggaactgcagaatccttggatgttgtcacaactgttaagcacagggaaccacatatgccctctgttgatgaattttcggcactaatagaccactcaagttcaggtgttgagctcgttcaatttcgtcagggtcaatcgaaaactgcatcagatatacaacctggaaaaagtacaaatccatatagtctaaaattagaatcctctcatgcacctttagtcagtagttcacacccactggagtcaacaagtttagcttcgtcttcccacgttacttctgataatgggttttcgttgcataccaaaagcagcaacagagcaactgcaaatggtcatggtagagagtgtgcacagcccttgggtatcagttctgagcgtgcacatcaagctttagcacttgagcaccttgagaatatgtggacaaagggaaagaactacaaaccagaaaatgtagaacatgtcgcaaaagtgtctgttggatctgcttctctgggctcgacttcagttcagcaatcagttccttgcagcacttcagtttgttacaatcaaagtaattctgaaagaccaacagcgtcatctcagtcaaaggaccagcatttggtaagacactcaactacacctacatatgtaacatatccaaatggcaccccgaaaagcctatctgcagaaatggcagaacatgccggtccagaagactttgcagtagagagtgagagttcatatgccactgaggacgatgaattcaacaatgtgactggacttgattctcctgttaccagagtttgggaaagcaaaagtaaaggaaatgctaccttatcacatatacatcacccactcgaatctcctggtttccatagagcaaagaagaacagaagtcatgtgggaaaactgaagatgtcaagaacttcttcaggaagaaaaaggtcaaggtcaaatgctcagaagcctcctatctggcaagaagtggagagatcctctttctctgttggtgatagtatggacatactaaatacatctgcaaatgatctaaagacgcatgagctagacgaggatcctgaggtggaaagtatggctaggatgtttagtagttcaaatacttcatctttattgttgccatcaagtgactctgcatattcttcaaattattgtggtgccaatgtgctacaagactcttatttgaagttaagatgcgaggtggtaggagctagcattgtcaaaagcgggtctggcatgttttgctgtgtattctatttccgtgaccgacgccaatggtttcgtcattttgaagacctgcatcggcgtctaaaagagtatgctcagtacaatcttcatttacctccaaaacatttcctctcatcaggtttagaggtttctgttgttcgagagagatgcaagctgctcgacatatatctgaagaaccttctgcaaattcctattgtttcaagctgcatagaagtctgggattttctgagtgtggattcacagacatatattttcacggacactctctcagtcatccaaacattgtcagtcagtttagatgaaagatcaaatgggaaaaatataaaagcattgaactcttctggagctttgaatggaaattctatctctggaggtcaatctttgcatggacatatagacgacaccgtacataaggattcagacatcgcttgtgatggtttgagatttaggaaagggaatgtgaacaagaacttgggaaacggtgttagccacacaacagatagtgttagcaacacaactgccaatcattatcaggacaattctggaagtgatccagagcagaatgatcattccttttcaatagattcattaaatcctaagaagttgcgttcaactgaaaccaatgacacatctcaaattccagagtctggaggattttcagtatctcctaatgattggatggccccgaatcttagtgttcccttgtttcatcttgttgatgtggtctttcagctccaagatggaggctggataagattctctggcctgatggaattttcatgacaaaacatccaaagagaaattcgcctccacctcctcctggtgctcagagcaatggcatgggaaactatctaagcgatgaacaacggatagaagctgctcatcgtgcaaattttgtccgtgaactgataatagataaagccccatctccactagtgagtcttgttggtcgaaaggattatgaaagatgtgctcatgatatctatttctttcttcagtccccggtttgtttgaagcagctagcgttcgaactccttgagctgcttgttctttcttcatttccggagttggatggcactgtgaggaagtggcacgaagataaagagcaattctgcgcccagtaatgtttatcaaacgtttgaatttgtcacgggcggtgtttgtttccaacacatatcgtctttccagagtggtgtggcctgtgaattctgcgaaaataaggtggtggcttcagaggagtgcccgtggatatctcagtttgaagtgggtggtggctttgtgcagtgtgaatatggttagatagtgcgaggatatggtccctttttccaccgggccatggcagaacggtttttgtgcccgatagagttcatttttccccctccagatttggtatacgtaatgctgctgcctgaaaggaaagagatggtggcgcattttttttgcacccgttttggtggtacactggtacccgtcttgtgtaaatctgcatagagataaatgaagtttcgaggtggtcaatgaatgataatagctctctggcatcgtgatgattcgttgtggctccgccttgctgtacgtttttttggtgctgcccctgcgaatcatctcggcactattttgtgatgataaaaaaaaagtaatatgcgctggagattcgtttattcaaatttcc

SEQ ID NO: 60438 - DNA, 4012 bp, Zea Mays
cccccccttccacgagacaaaatccagaaccaggccggcggcccactcccaccgccgcgcctacgccttcccccgccccccgcgcggaggagggtgccgccggcgatggagacgacggccgcgggcgcgccaagagcgcagacgctgcgggacctcgcggaggagggcaagaagcggggcgtcctgctcctcgtcttcgccttcgggctggccttcctcatgtcccttacgagctcgtcagtttggtttaatctgccatttgccatagctctgattgttttgttccgctacatatcgcttgattatggccttcgtagaaagagcgtaactagaacagatcatgccagtcattcactcgtcaaaacaaaaggtactgaggtaaagaaagtcattcatcagactgaaacggatggaaaaatagattggaggagcaaggttaactcgcctccagttgaagcagcattcgaacagttcacaaggcaccttatctcagaatgggtaacagatctgtggtactcgcgcgtaacacctgacaaggaaggtccagaggaactcatcgatgtagtcaatactgtccttggggagatttcagttcgggcaagaaatgttaaccttatcaatctgctgatcagggatttggtcgatcttatatgcaataatttggaactttatcatttctgtcaagccaagattggaagagagaagtttgtgggccttccttcagagcgtcgtgatgctgaactgaaaatgatccttttagctgaaaacaagttgcatcctgctttattttcagctggcgctgaatacaaggtattgaaaagtcttgctgacgggttgatctcaatcacagtgaagcctcaggatctacaatgtactttcttccggtgtacagcgcgggaacttctcgcttgtgcagttttgagacctgttgtgaacttagcaaatccaaggtttataaatgaaagaatcgaatcctttgctctttcgcatgccaataagttggagaaaggaactgcagaatccttggatgttgtcacaactgttaagcacagggaaccacatatgccctctgttgatgaattttcggcactaatagaccactcaagttcaggtgttgagctcgttcaatttcgtcagggtcaatcgaaaactgcatcagatatacaacctggaaaaagtacaaatccatatagtctaaaattagaatcctctcatgcacctttagtcagtagttcacacccactggagtcaacaagtttagcttcgtcttcccacgttacttctgataatgggttttcgttgcataccaaaagcagcaacagagcaactgcaaatggtcatggtagagagtgtgcacagcccttgggtatcagttctgagcgtgcacatcaagctttagcacttgagcaccttgagaatatgtggacaaagggaaagaactacaaaccagaaaatgtagaacatgtcgcaaaagtgtctgttggatctgcttctctgggctcgacttcagttcagcaatcagttccttgcagcacttcagtttgttacaatcaaagtaattctgaaagaccaacagcgtcatctcagtcaaaggaccagcatttggtaagacactcaactacacctacatatgtaacatatccaaatggcaccccgaaaagcctatctgcagaaatggcagaacatgccggtccagaagactttgcagtagagagtgagagttcatatgccactgaggacgatgaattcaacaatgtgactggacttgattctcctgttaccagagtttgggaaagcaaaagtaaaggaaatgctaccttatcacatatacatcacccactcgaatctcctggtttccatagagcaaagaagaacagaagtcatgtgggaaaactgaagatgtcaagaacttcttcaggaagaaaaaggtcaaggtcaaatgctcagaagcctcctatctggcaagaagtggagagatcctctttctctgttggtgatagtatggacatactaaatacatctgcaaatgatctaaagacgcatgagctagacgaggatcctgaggtggaaagtatggctaggatgtttagtagttcaaatacttcatctttattgttgccatcaagtgactctgcatattcttcaaattattgtggtgccaatgtgctacaagactcttatttgaagttaagatgcgaggtggtaggagctagcattgtcaaaagcgggtctggcatgttttgctgtgtattctatttccgtgaccgacgccaatggtaatagttggtccattaagaggaggtttcgtcattttgaagacctgcatcggcgtctaaaagagtatgctcagtacaatcttcatttacctccaaaacatttcctctcatcaggtttagaggtttctgttgttcgagagagatgcaagctgctcgacatatatctgaagaaccttctgcaaattcctattgtttcaagctgcatagaagtctgggattttctgagtgtggattcacagacatatattttcacggacactctctcagtcatccaaacattgtcagtcagtttagatgaaagatcaaatgggaaaaatataaaagcattgaactcttctggagctttgaatggaaattctatctctggaggtcaatctttgcatggacatatagacgacaccgtacataaggattcagacatcgcttgtgatggtttgagatttaggaaagggaatgtgaacaagaacttgggaaacggtgttagccacacaacagatagtgttagcaacacaactgccaatcattatcaggacaattctggaagtgatccagagcagaatgatcattccttttcaatagattcattaaatcctaagaagttgcgttcaactgaaaccaatgacacatctcaaattccagagtctggaggattttcagtatctcctaatgattggatggccccgaatcttagtgttcccttgtttcatcttgttgatgtggtctttcagctccaagatggaggctggataaggcgtcaagcattttgggtagcaaagcaaatactgcaattgggaatgggagacacgtttgatgactggcttgttgacaaaatccaattacttaggaaagggaggataattgcttttgctgttaagcgcattgaacaaattctctggcctgatggaattttcatgacaaaacatccaaagagaaattcgcctccacctcctcctggtgctcagagcaatggcatgggaaactatctaagcgatgaacaacggatagaagctgctcatcgtgcaaattttgtccgtgaactgataatagataaagccccatctccactagtgagtcttgttggtcgaaaggattatgaaagatgtgctcatgatatctatttctttcttcagtccccggtttgtttgaagcagctagcgttcgaactccttgagctgcttgttctttcttcatttccggagttggatggcactgtgaggaagtggcacgaagataaagagcaattctgcgcccaagtggtgtggcctgtgaattctgcgaaaataaggtggtggcttcagaggagtgcccgtggatatctcagtttgaagtgggtggtggctttgtgcagtgtgaatatggttagatagtgcgaggatatggtccctttttccaccgggccatggcagaacggtttttgtgcccgatagagttcatttttccccctccagatttggtatacgtaatgctgctgcctgaaaggaaagagatggtggcgcattttttttgcacccgttttggtggtacactggtacccgtcttgtgtaaatctgcatagagataaatgaagtttcgaggtggtcaatgaatgataatagctctctggcatcgtgatgattcgttgtggctccgccttgctgtacgtttttttggtgctgcccctgcgaatcatctcggcactattttgtgatgataaaaaaaaagtaatatgcgctggagattcgtttattcaaatttcc

SEQ ID NO: 60439 - DNA, 1714 bp, Zea Mays
gcaaacagagcaccgaacgggacgtccaactccccaaccaccgagcatggtcaccgtggtgtgtgacaagtacctgccctgcccgccttaatcatctcgatcgtgttcagcaacaccacacaagtgacacaaccaatgccggctgtccccggcacgcgctccagcaccaccacgacccatggccgacgccgccaacccgccgaccaagcccaccaaagcctccgctcccttcgttgtaattgacgccgccagcgccaacaaggcccgcgacggtggcgccgatgccccgacaccgtcggcggggcacggccgccgctggctgcggcgggcgtgctgcggcgtggccgtcggcggcgcgctggccgcggcggcggtgctgtcgctgtcgctcaccgtgctcagggtgcgggacccgacgctgtccatggagtccgtggccgtcaggcgcttcagcgtgcgcctggacgccgcgtccccggcgcgcccgctgcggatcaacgtcacgctgtccggcgccatcgtggtccgcaaccccaactacgagtccatgcggttcggcgccagcgccacggagatcttcgtggacggcgcggcggacccgggccccgtcggcgtgggccgcgcgccgcccggggaggtccccgcgcgcggtgccagccgggtggccgccgacgtcgacgtgctcgtcgacagggtcgcgcccgccgtggtcgcccaggtgctgttcggcggcggcgaggtgcgcctcgccacgcgcaccgccgtcgacggcaggctcagcctgctcggcgggctctacggccgccgcaccgtgcgcgtcgccatgcggtgccgcgtcgcgctccgcgtctctgccgcggccgtcgccgtcgccggcaaccccgcgtgcgtcgcggacttcgggcgctgacgtggtctactcttcgtcagctgtagtctgtgggtgagccggccggtgtagtttttgccctttctctttaccgccggcgatgaccggcggagatagttacggtggcagctataactgaactgccgccgaatgatgatccaataacactcctgtcggctagtctcgtttacagaggacagactttgggcacaattcgatgaccaattgatgatggtgagtcagttattttgactggtggcggctaagctataactgagctgcagcctagtggtgctccaataatactcactagtatttggcgcgccgaaattgaatactcctgaacattggcgtacagtgacagaaacattacattatatacgtatatagagtgatacggatgattatggatattacataatacatggtaacccatgatcatccgtatatattacatggtcattatatttacagaccgttgttgttgttgagacagcctcagccaaggtcgaggagagaaccttgccggccacgttgatgttgagtctggctagcgggcaggattgagtgcgctgtactagagatggcaatggagacccgatctccgatttcccgtgggaaattcctctgttaggggacgggtatgagactaatctagtccccgcggggatctaaatggggcaaatttaatccccgtcgggttcgcgggaacgggggatggaaaacgttccccgtgtacccgccccacgaaacttttttattcaagttagtcaatttatttggtagaattataataaaaactcaatgcatgacatgttataaaat

SEQ ID NO: 60440 - DNA, 1125 bp, Zea Mays
atctgcatctacctcctcgtcatgtttggtttcagagatccgccactttcctctgcgttttttttcgggatccttttgtctttccatggtagggtgcgatgacgaggtacacacaaccctgatcaatcgcctccgatggcgatctgatgttcaccttttacctttggttcgtattcgctgagcatccgatcttcttcatctatcgaggccagcattttttgtttctttttttttcttgctcggtttgctttggatcgagggacctggggatccgccgcccttcttcgtgcggcgtcatccagtttttacccctcgaatacggcttgcaggcgcgtcctagccatctcgctctctgcataatcctctgcgagacccgggctcgtatgccacattcgtcgttgtcaaactaaacaaaaaaaataggcttttgtcgcgaagatcccagcagagaggtgcgctgatgcctccctaacaatcataatcttcgcagagaaacgctcatgatccgtggtttcgtggatgtgtgatttggatttttgttccattacatctgtttccacggcgacattttcatgattactgcagcgaactgaacgagggacctatggatggactgctctttgtccgtgttgtgccgtccaagtttgccttcggatagtaaaaccagcaatctggtcacgagatctcgcaagccttttcatgtttgtgggaatggtgtgccaatttgccaaattttgggtttctatcgttatcttcataggtcgtaattttgccaggatatagcgccggaaccccatactgaggtcgtcgttattgcagtcataagcgacgatgaaactttgaacagaccagaatgttcttgcagtcacaagtggttgtctaaatttggatattgaacagaattacttccagttgaacctaccgcttcaacaattggcatacttgcctgagtggctaacgatccatgcaatactgcactattattaattggagcccgagacaccacctcaaatttcataacgtcgctataaaaacaaatattagttttcacaataatgaagactataaaatacttttaatgcctagttttattattctaaaaaatagtttaaaacaatctctaag

SEQ ID NO: 60441 - DNA, 1918 bp, Zea Mays
gcacaaccaagagccaacagagcaacgcccaggcacacacgacgcggaccaggcaaccagctgccgagggaggaaccctagcggaacactgtgcaggtgacggcggcgcgctaccggtgacggcggcgcgctaccggtgacgggggatacggtggcatcgtccccctcggcccctcttccatccccggcgcggcggcgccagcagccggcctgcagatcagctcaacaaagataaccttgcgcatcctcctaagaagatcaagactacccagccaggttctacagaccctcaaaaccttaatcgttagatcatcgccgttctcatgaagggcttatattttacggtgagcacattcttttgctgatggagaccactgaacctctacaggatatcatgtgtgagtttcgtgctggtaagatgtctcatgagggaacacgagtggttccagacacgcgcaagggtcttgtccgcgttggtaggggtgaagagggattagtccattttcagtggcttgaccgtggacagaacatagttgaagatgatcaaatcatctttcctgatgaggcggtctttgagaaggtgacagaatctcctggagggtttacatcttgaagtttaagcaagacagcagaaaattcttcttctggatgcaggaaccaaatgctgatggggactcccagacttgcatgcaagttaatgcctacataaatcgatcattagatgctgaggctgatcttcgagtacctattgaagcagaaatgtctgaagatacggctgatgatgatatctcttccagagctgggaatctagttgagagcatgaccgctgatttggctggtgaagtgacgtctgctgctggacctgtacgcttggaggatctgcagagaattctgagtgcaatacagtcatcaggtgctgcagctgaccctgatgctggagtaggactaggagacatcttgaagcctgatctggtcttgccattaattgaggacttgcccattgaacaattggcatcacatcttccggagggtggctcatggagtcctggtgatatcgttgagcttctccaaagtcctcctttgcgccaacaattagatgcattcacccacgttctgcggactgggcagatagatcttgctcaatttggagttgaccctgacaaatataagttcacggtggtgtcgttcctggaggcattggaagactcggttggaagaggtgcttctgaagctggagacaaggatgcagaggtcgagcgaggcagtggaaatgatgccatggacgagagttgatatccgtgtactaggtgtctgaattcatacgtgacaagtcttgtgttgttgttttgggtagaacgctagctcatagtattttgggcttctggcacacagaaagcaagtttctggacaagttttggacattattgctgctgtgagatgtagtgctaggcaacagatggtctggttggtggatcatggattccatggcattgagaagcttgcaaggctagattgattgtgttctgcgggggtaaatcttgcgtggcgttttgaacgtggattggtaaacagaatagcatcttttgaacgtcggttgttccatgtccacagctgatggtggtggcctcgaatgtcgtactgtacgtccatgtcgatgattccgtcgcaggagcctactactactatatccctgttctatgtaagatatgtgtactccagtacaaacagtatatggacagctcaggatttttttatattgttctacacatacatctttagatgatttttatggatatgatgagtcaaatcttgaggttagaacattatcgaattcataacttacctccaatgacgattgtatggcccctagaatccatttatctcattgagattattgaaatctttactgctttaaaac

SEQ ID NO: 60442 - DNA, 1916 bp, Zea Mays
acaaccaagagccaacagagcaacgcccaggcacacacgacgcggaccaggcaaccagctgccgagggaggaaccctagcggaacactgtgcaggtgacggcggcgcgctaccggtgacggcggcgcgctaccggtgacgggggatacggtggcatcgtccccctcggcccctcttccatccccggcgcggcggcgccagcagccggcctgcaggtatgaatcatagttcatagtaacaccaacaaacatataggatcaagactacccagccaggttctacagaccctcaaaaccttaatcgttagatcatcgccgttctcatgaagggcttatattttacggtgagcacattcttttgctgatggagaccactgaacctctacaggatatcatgtgtgagtttcgtgctggtaagatgtctcatgagggaacacgagtggttccagacacgcgcaagggtcttgtccgcgttggtaggggtgaagagggattagtccattttcagtggcttgaccgtggacagaacatagttgaagatgatcaaatcatctttcctgatgaggcggtctttgagaaggtgacagaatctcctggagggtttacatcttgaagtttaagcaagacagcagaaaattcttcttctggatgcaggaaccaaatgctgatggggactcccagacttgcatgcaagttaatgcctacataaatcgatcattagatgctgaggctgatcttcgagtacctattgaagcagaaatgtctgaagatacggctgatgatgatatctcttccagagctgggaatctagttgagagcatgaccgctgatttggctggtgaagtgacgtctgctgctggacctgtacgcttggaggatctgcagagaattctgagtgcaatacagtcatcaggtgctgcagctgaccctgatgctggagtaggactaggagacatcttgaagcctgatctggtcttgccattaattgaggacttgcccattgaacaattggcatcacatcttccggagggtggctcatggagtcctggtgatatcgttgagcttctccaaagtcctcctttgcgccaacaattagatgcattcacccacgttctgcggactgggcagatagatcttgctcaatttggagttgaccctgacaaatataagttcacggtggtgtcgttcctggaggcattggaagactcggttggaagaggtgcttctgaagctggagacaaggatgcagaggtcgagcgaggcagtggaaatgatgccatggacgagagttgatatccgtgtactaggtgtctgaattcatacgtgacaagtcttgtgttgttgttttgggtagaacgctagctcatagtattttgggcttctggcacacagaaagcaagtttctggacaagttttggacattattgctgctgtgagatgtagtgctaggcaacagatggtctggttggtggatcatggattccatggcattgagaagcttgcaaggctagattgattgtgttctgcgggggtaaatcttgcgtggcgttttgaacgtggattggtaaacagaatagcatcttttgaacgtcggttgttccatgtccacagctgatggtggtggcctcgaatgtcgtactgtacgtccatgtcgatgattccgtcgcaggagcctactactactatatccctgttctatgtaagatatgtgtactccagtacaaacagtatatggacagctcaggatttttttatattgttctacacatacatctttagatgatttttatggatatgatgagtcaaatcttgaggttagaacattatcgaattcataacttacctccaatgacgattgtatggcccctagaatccatttatctcattgagattattgaaatctttactgctttaaaac

SEQ ID NO: 60443 - DNA, 1911 bp, Zea Mays
acaaccaagagccaacagagcaacgcccaggcacacacgacgcggaccaggcaaccagctgccgagggaggaaccctagcggaacactgtgcaggtgacggcggcgcgctaccggtgacggcggcgcgctaccggtgacgggggatacggtggcatcgtccccctcggcccctcttccatccccggcgcggcggcgccagcagccggcctgcagatcagctcaacaaagataaccttgcgcatcctcctaagaagatcaagactacccagccaggttctacagaccctcaaaaccttaatcgttagatcatcgccgttctcatgaagggcttatattttacggtgagcacattcttttgctgatggagaccactgaacctctacaggatatcatgtgtgagtttcgtgctggtaagatgtctcatgagggaacacgagtggttccagacacgcgcaagggtcttgtccgcgttgggtgaagagggattagtccattttcagtggcttgaccgtggacagaacatagttgaagatgatcaaatcatctttcctgatgaggcggtctttgagaaggtgacagaatctcctggagggtttacatcttgaagtttaagcaagacagcagaaaattcttcttctggatgcaggaaccaaatgctgatggggactcccagacttgcatgcaagttaatgcctacataaatcgatcattagatgctgaggctgatcttcgagtacctattgaagcagaaatgtctgaagatacggctgatgatgatatctcttccagagctgggaatctagttgagagcatgaccgctgatttggctggtgaagtgacgtctgctgctggacctgtacgcttggaggatctgcagagaattctgagtgcaatacagtcatcaggtgctgcagctgaccctgatgctggagtaggactaggagacatcttgaagcctgatctggtcttgccattaattgaggacttgcccattgaacaattggcatcacatcttccggagggtggctcatggagtcctggtgatatcgttgagcttctccaaagtcctcctttgcgccaacaattagatgcattcacccacgttctgcggactgggcagatagatcttgctcaatttggagttgaccctgacaaatataagttcacggtggtgtcgttcctggaggcattggaagactcggttggaagaggtgcttctgaagctggagacaaggatgcagaggtcgagcgaggcagtggaaatgatgccatggacgagagttgatatccgtgtactaggtgtctgaattcatacgtgacaagtcttgtgttgttgttttgggtagaacgctagctcatagtattttgggcttctggcacacagaaagcaagtttctggacaagttttggacattattgctgctgtgagatgtagtgctaggcaacagatggtctggttggtggatcatggattccatggcattgagaagcttgcaaggctagattgattgtgttctgcgggggtaaatcttgcgtggcgttttgaacgtggattggtaaacagaatagcatcttttgaacgtcggttgttccatgtccacagctgatggtggtggcctcgaatgtcgtactgtacgtccatgtcgatgattccgtcgcaggagcctactactactatatccctgttctatgtaagatatgtgtactccagtacaaacagtatatggacagctcaggatttttttatattgttctacacatacatctttagatgatttttatggatatgatgagtcaaatcttgaggttagaacattatcgaattcataacttacctccaatgacgattgtatggcccctagaatccatttatctcattgagattattgaaatctttactgctttaaaac

SEQ ID NO: 60444 - DNA, 1652 bp, Zea Mays
acgtcctggtgtctagacgtgaggatcagctcaacaaagataaccttgcgcatcctcctaagaagatcaagactacccagccaggttctacagaccctcaaaaccttaatcgttagatcatcgccgttctcatgaagggcttatattttacggtgagcacattcttttgctgatggagaccactgaacctctacaggatatcatgtgtgagtttcgtgctggtaagatgtctcatgagggaacacgagtggttccagacacgcgcaagggtcttgtccgcgttggtaggggtgaagagggattagtccattttcagtggcttgaccgtggacagaacatagttgaagatgatcaaatcatctttcctgatgaggcggtctttgagaaggaaccaaatgctgatggggactcccagacttgcatgcaagttaatgcctacataaatcgatcattagatgctgaggctgatcttcgagtacctattgaagcagaaatgtctgaagatacggctgatgatgatatctcttccagagctgggaatctagttgagagcatgaccgctgatttggctggtgaagtgacgtctgctgctggacctgtacgcttggaggatctgcagagaattctgagtgcaatacagtcatcaggtgctgcagctgaccctgatgctggagtaggactaggagacatcttgaagcctgatctggtcttgccattaattgaggacttgcccattgaacaattggcatcacatcttccggagggtggctcatggagtcctggtgatatcgttgagcttctccaaagtcctcctttgcgccaacaattagatgcattcacccacgttctgcggactgggcagatagatcttgctcaatttggagttgaccctgacaaatataagttcacggtggtgtcgttcctggaggcattggaagactcggttggaagaggtgcttctgaagctggagacaaggatgcagaggtcgagcgaggcagtggaaatgatgccatggacgagagttgatatccgtgtactaggtgtctgaattcatacgtgacaagtcttgtgttgttgttttgggtagaacgctagctcatagtattttgggcttctggcacacagaaagcaagtttctggacaagttttggacattattgctgctgtgagatgtagtgctaggcaacagatggtctggttggtggatcatggattccatggcattgagaagcttgcaaggctagattgattgtgttctgcgggggtaaatcttgcgtggcgttttgaacgtggattggtaaacagaatagcatcttttgaacgtcggttgttccatgtccacagctgatggtggtggcctcgaatgtcgtactgtacgtccatgtcgatgattccgtcgcaggagcctactactactatatccctgttctatgtaagatatgtgtactccagtacaaacagtatatggacagctcaggatttttttatattgttctacacatacatctttagatgatttttatggatatgatgagtcaaatcttgaggttagaacattatcgaattcataacttacctccaatgacgattgtatggcccctagaatccatttatctcattgagattattgaaatctttactgctttaaaac

SEQ ID NO: 60445 - DNA, 763 bp, Zea Mays
caaaaccttaatcgttagatcatcgccgttctcatgaagggcttatattttacggtgagcacattcttttgctgatggagaccactgaacctctacaggatatcatgtgtgagtttcgtgctggtaagatgtctcatgagggaacacgagtggttccagacacgcgcaagggtcttgtccgcgttggtaggggtgaagagggattagtccattttcagtggcttgaccgtggacagaacatagttgaagatgatcaaatcatctttcctgatgaggcggtctttgagaaggtgacagaatctcctggagggtttacatcttgaagtttaagcaagacagcagaaaattcttcttctggatgcaggaaccaaatgctgatggggactcccagacttgcatgcaagttaatgcctacataaatcgatcattagatgctgaggctgatcttcgagtacctattgaagcagaaatgtctgaagatacggctgatgatgatatctcttccagagctgggaatctagttgagagcatgaccgctgatttggctggtgaagtgacgtctgctgctggacctgtacgcttggaggatctgcagagaattctgagtgcaatacagtcatcaggtgctgcagctgaccctgatgctggagtaggactaggagacatcttgaagcctgatctggtcttgccattaattgaggacttgcccattgaacaattggcatcacatcttccggagttcatggccgttgctcaattccag

SEQ ID NO: 60446 - DNA, 1580 bp, Zea Mays
aaatttagaagccaacggctcacctctgctggctgctgctactgcacatggatatcatgtgtgagtttcgtgctggtaagatgtctcatgagggaacacgagtggttccagacacgcgcaagggtcttgtccgcgttggtaggggtgaagagggattagtccattttcagtggcttgaccgtggacagaacatagttgaagatgatcaaatcatctttcctgatgaggcggtctttgagaaggtgacagaatctcctggagggtttacatcttgaagtttaagcaagacagcagaaaattcttcttctggatgcaggaaccaaatgctgatggggactcccagacttgcatgcaagttaatgcctacataaatcgatcattagatgctgaggctgatcttcgagtacctattgaagcagaaatgtctgaagatacggctgatgatgatatctcttccagagctgggaatctagttgagagcatgaccgctgatttggctggtgaagtgacgtctgctgctggacctgtacgcttggaggatctgcagagaattctgagtgcaatacagtcatcaggtgctgcagctgaccctgatgctggagtaggactaggagacatcttgaagcctgatctggtcttgccattaattgaggacttgcccattgaacaattggcatcacatcttccggagggtggctcatggagtcctggtgatatcgttgagcttctccaaagtcctcctttgcgccaacaattagatgcattcacccacgttctgcggactgggcagatagatcttgctcaatttggagttgaccctgacaaatataagttcacggtggtgtcgttcctggaggcattggaagactcggttggaagaggtgcttctgaagctggagacaaggatgcagaggtcgagcgaggcagtggaaatgatgccatggacgagagttgatatccgtgtactaggtgtctgaattcatacgtgacaagtcttgtgttgttgttttgggtagaacgctagctcatagtattttgggcttctggcacacagaaagcaagtttctggacaagttttggacattattgctgctgtgagatgtagtgctaggcaacagatggtctggttggtggatcatggattccatggcattgagaagcttgcaaggctagattgattgtgttctgcgggggtaaatcttgcgtggcgttttgaacgtggattggtaaacagaatagcatcttttgaacgtcggttgttccatgtccacagctgatggtggtggcctcgaatgtcgtactgtacgtccatgtcgatgattccgtcgcaggagcctactactactatatccctgttctatgtaagatatgtgtactccagtacaaacagtatatggacagctcaggatttttttatattgttctacacatacatctttagatgatttttatggatatgatgagtcaaatcttgaggttagaacattatcgaattcataacttacctccaatgacgattgtatggcccctagaatccatttatctcattgagattattgaaatctttactgctttaaaac

SEQ ID NO: 60447 - DNA, 1490 bp, Zea Mays
agccaacggctcacctctgctggctgctgctactgcacatggatatcatgtgtgagtttcgtgctggtaagatgtctcatgagggaacacgagtggttccagacacgcgcaagggtcttgtccgcgttggtaggggtgaagagggattagtccattttcagtggcttgaccgtggacagaacatagttgaagatgatcaaatcatctttcctgatgaggcggtctttgagaaggtgacagaatctcctggagggtttacatcttgaagtttaagcaagacagcagaaaattcttcttctggatgcaggaaccaaatgctgatggggactcccagacttgcatgcaagttaatgcctacataaatcgatcattagatgctgaggctgatcttcgagtacctattgaagcagaaatgtctgaagatacggctgatgatgatatctcttccagagctgggaatctagttgagagcatgaccgctgatttggctggtgaagtgacgtctgctgctggacctgtacgcttggaggatctgcagagaattctgagtgcaatacagtcatcaggtgctgcagctgaccctgatgctggagtaggactaggagacatcttgaagcctgatctggtcttgccattaattgaggacttgcccattgaacaattggcatcacatcttccggaggttctgcggactgggcagatagatcttgctcaatttggagttgaccctgacaaatataagttcacggtggtgtcgttcctggaggcattggaagactcggttggaagaggtgcttctgaagctggagacaaggatgcagaggtcgagcgaggcagtggaaatgatgccatggacgagagttgatatccgtgtactaggtgtctgaattcatacgtgacaagtcttgtgttgttgttttgggtagaacgctagctcatagtattttgggcttctggcacacagaaagcaagtttctggacaagttttggacattattgctgctgtgagatgtagtgctaggcaacagatggtctggttggtggatcatggattccatggcattgagaagcttgcaaggctagattgattgtgttctgcgggggtaaatcttgcgtggcgttttgaacgtggattggtaaacagaatagcatcttttgaacgtcggttgttccatgtccacagctgatggtggtggcctcgaatgtcgtactgtacgtccatgtcgatgattccgtcgcaggagcctactactactatatccctgttctatgtaagatatgtgtactccagtacaaacagtatatggacagctcaggatttttttatattgttctacacatacatctttagatgatttttatggatatgatgagtcaaatcttgaggttagaacattatcgaattcataacttacctccaatgacgattgtatggcccctagaatccatttatctcattgagattattgaaatctttactgctttaaaac

SEQ ID NO: 60448 - DNA, 2732 bp, Zea Mays
cccactgctccgcctcgcctcacgccaccacggggggagcgggagcccgcgttctgtgccctccgcgccgctgcagtccctccccctgtccaggcggagagatcaggttgccggagcggaggggggattggaattggagcgccagcaccaccacagatggggggtctgctcaaggaagagggcccggcggtggatgtctccgtggagggtaccctggtctggctgcgccgccccaacggctcctggtggcccagcatcgtcatctcgccgcaagacgtccccgaaggctgcgccccgccgccgcgctgccccgccacgcccatcatgctcctcggccgtcgccccgacggaccaaccttcgttcagtcaatctcctgctcactcctcaagtcctagagttatggagtgcagccagctactctaagcctaacgaacacttgcttgcgctcgccacagcgactggtgtaacctggccaggtgcaagcgcgtcaagcccttccgctgcggggagctcgacttcgagcagcgcatcaccaacgccctcacactcgccgccagcggcaacaggtccagctggagctacaacaagggcaggtacgcccgcatggagggcgccattctccaggccctcgacatagagaaggatagcgctcttggcccggtaaccaaggcctacctccatgcccccagctgctcacctagtcccaaagttggaatgcccaacggacaagtcaaagatgctgcaccaaaggatccttctccagccatccagccgcctctgccgccgccgcggtccaagaggaagcgcaagacgccctatgactccgaggacgatacgcctcaaggctcctgccgtatgagggatctcagggacatcggatccaagacggtccccacaatggacctgtctaatgctgccgcaatctttgctcccaagtataatgatctgcctaatgttgggcaggccagaagaattgtgcgctctcaggccaccacaaagaggaagcatgctgctgcacatcaggaccaaccttgcgggatccccaggaagaaggataggtctcgtccgctctcagagctctgcaatggagatatctggaatggttccagaccaaatggtcagaaggctgatgaacacttgttgggtgtggcaacatgttcaagcagctcctctggcacttcaaccttggatactccattggacacaaacagctgtcatcgcagcgcagcatccacagatcaagcaaagggcacagcaatatcctgcatggcaaggctactcagtgatgattcacggcatgggaatgattttgtcggaactccccctgctgcacaaaatatctcggaacccgatcatttgcatagatatcaaccttgtggattgacaaataatcctacctggaaagctgggaaacatgcatgtaaaagtattaagatgagaaccataaggtctgttggtcatgagggcaaggacaggacaagagattctaataatgatcatggctgccagaaaacaaagacaggaaagcacgaagcagcaagagatgatgaggttgtccttttggagaataggctggagaagcgttcattgaataagaacaagccggctgaacatgatactaaaatgcatattgccatagttcctagtggtatggattgtgttggcacggttcagcagcaacactgtaaaagcaagtgtggtcctgaggagtcattagaaaccttaagcagccattcgaactgtgagagtggttcagtatcgtcagtggtgtttgaaaagccactgcatttgaatcccagcctttatgatgtggagttgagtgtgctggggagcagcaacacttggcgccgtgtgccccttgtctctcttatgagtaggttgaactgtaaacccgtggtggggtatccagtctcggtggaggtcagcgatgatctgtttggctgtccttcatcaaggagagatgtccagctgcccgctacgagtcgttttcagcgcgccgtgccatcatcagcgttggagaaagaagaggtggacaggttatggcagccgcatgccaaaaggggaggggcaggggcaggggcagtgacctcgtcgtcgagaaagacgcgaggagcggcgtcgggggcgaccatcgcgtgcatcccgctccgagtcgttttcagcaggatcaacgaggcgctgagaatgccctagctgggtgccttttgtggccaatgcatttgctttgggaaatgcttgttgtggcctgtcactaggaaggagcatggtgctgatgtatctatctatctatcatgtggttgagccactccactccactcacagtaataaaaataaaataaaaatctgcttctggtgttggtgatgtattgctttctcttcctttatttgacgttgctgtagacgtatgggctgtgcccaattttcatcctactcaaccgaccgacgaattccaatcaacatgattctgacagaaccaaaatagctacagatgccatatcattctgacagacacagcatatttacactgaacaaaaaacataaggcgggcgggccagccaatttacggcgatcattataattatcggtcaaaaaattagtctactccctccgttctttcatttttatctgccagtcacgggtcgttttgtttcctctccatctgtattgagcggaaaatccttgctgccgactctgaagccgtgcgtgccgtgtggggaacaaccctaatgac

SEQ ID NO: 60449 - DNA, 2628 bp, Zea Mays
ccctcccttccccaaaagattttggaagcacacgccactgcgagatgggcctcttcccgtccccgtctctgcctgcccaggcaacagccattcctctcctccagtcctcctcgcatcactcgactcgactcgactcgctcgctccaccgaccaccgtgcggccgcggagcggcgcggctttgctccactccactcgcgccggggcggtttccgtcgccgccagggcaccgcccgtgacaccctgatctcccttcacctactcgtggattcgatcccatccagcccgtcccgtccctctcccaccctttccagatctgcctgcgagcccccgccacgcaccctcatgacccaccactaccccccgacgcgcatcacgcgaggggagcgtcactactgctgccgccgccaatggctctctgccctgaccgagcccatggacgacctcaccgtggggggcctcgcgctcttcgccgccgtcgctgacttcatagacgactccgctcccgcgatgccgcagccagcggcggccagcaccgcgcacgagcccgagcccgagcccgggagcccctgctcagtcgccagcgactgcagcagcgtcgccaccgccgacttcgagggatttgccgacctcggctccgcgctcgtgctcgacgacctcgtctcctccgcctccacctccgccagctctgcctccgggcccagggccgccgccgccgctcccgccaggagcgtcttcgcgctcgactgcgtgccgcgctgggggctccagtccgtgtgcggccgccgacccgagatggaggacgccgcccgcgtgctgccaaccttcttccacgtcccgctctggatgctcgccggcgacgcgcccgtcgacggcctcgaccgggcgtccttccgcctccccgcgcacttcttcggcgtctacgacggacacggcggcctccaggtcgccaactactgccgggagagaatccacgaggtactggcagaggagctcaccaaggcagaggaggccgcgtccgacgctgacctgggtggcctcgaccctaacactcagaagcactgggagaaggcctttgtgggctgcttcagccgtgttgatgcagaggtgggaggagacgcggcgaccgaagccaagcctgtggctccagacaccgtgggctcaacagcggtggttgcgcttgtctgctcatcgcatgtcatcgttgccaactgtggcgactcgcgagcggtgctctgccggggcaagcagcctgtggcgctttccgtggaccataaaccaaacagggaagatgagtatgcaaggattgaggcccagggtggcaaggtcatcaattggaatggctatcgagtcctcggtgttctcgccatgtcccggtcaattgcgttccaatccacttcacttaaagttgactacaaccgatccaaatagacttgtggatgaaaaggggacagatacctgaagccatatattatcccagtccctgaggtcacaattgtcgcccgtgcaaaagatgatgagtgcctaattattgcaagtgatggcctctgggatgtgatgtcaaacgaggaggtatgtgatgctgctcgcaagcgcatactgctgtggcacaagaagaattcagatgcctcatcgtcagcccaaagaagcggtgattcgccagatgaagcggctcaagcagctgctgagtatttatcgaagctggctctccataaggggagcaaggacaacataaccgtaattgtagtcgacctcaagtcacataggaagatcaagagcagagcataaccgtggattcggtaagacttggacagtagaaatggttgttactacactaggacgctagaaaggtggagaaaaggctcctgttcagtctgctgcacatgtacactggttggcccaacactagtctttttccacaaccatataggctgccacgtttgttcagggactcatacacagatctaatctggttagaaattgggctgacgaagtaaggtaaaggtacaatagaaaccgccagcattaaactgtacctgtgctacttgtgttttggtatattgatgtctaggagtagcagattagcagtgcaaagaatactacgataccccaagttgtttctgcaacaaatgttatgtgcatgtatatcataaaataagaccatctgtaatatgaattcaattcttggcatccgacgttattaattcagttgattgccaacaggatggttgttttgctgctgagaattacatctcattcggtctgattttgccactcagccacgctgatagctattgaactttgacagtctgacgagatttcggaatccaagctgcatcatcagctgtgtgttgacgaccgacagcatcagtgcagtcttttaattatagtcattggagctgcatcttcactttctaattactcagtgcagccaaataggttctatgttatacatatagattgcgttatcttttttttttttccttttagcattgtgtgtagtcaacaaactccacacgtttctataagctgcttgtaatttgtttttgtttttttaatttaaaaacttagggaggggagacgatgttaggctatggccagcacataaggtggcagtatctatgttttat

SEQ ID NO: 60450 - DNA, 3355 bp, Zea Mays
ccctcccttccccaaaagattttggaagcacacgccactgcgagatgggcctcttcccgtccccgtctctgcctgcccaggcaacagccattcctctcctccagtcctcctcgcatcactcgactcgactcgactcgctcgctccaccgaccaccgtgcggccgcggagcggcgcggctttgctccactccactcgcgccggggcggtttccgtcgccgccagggcaccgcccgtgacaccctgatctcccttcacctactcgtggattcgatcccatccagcccgtcccgtccctctcccaccctttccagatctgcctgcgagcccccgccacgcaccctcatgacccaccactaccccccgacgcgcatcacgcgaggggagcgtcactactgctgccgccgccaatggctctctgccctgaccgagcccatggacgacctcaccgtggggggcctcgcgctcttcgccgccgtcgctgacttcatagacgactccgctcccgcgatgccgcagccagcggcggccagcaccgcgcacgagcccgagcccgagcccgggagcccctgctcagtcgccagcgactgcagcagcgtcgccaccgccgacttcgagggatttgccgacctcggctccgcgctcgtgctcgacgacctcgtctcctccgcctccacctccgccagctctgcctccgggcccagggccgccgccgccgctcccgccaggagcgtcttcgcgctcgactgcgtgccgcgctgggggctccagtccgtgtgcggccgccgacccgagatggaggacgccgcccgcgtgctgccaaccttcttccacgtcccgctctggatgctcgccggcgacgcgcccgtcgacggcctcgaccgggcgtccttccgcctccccgcgcacttcttcggcgtctacgacggacacggcggcctccaggtcgccaactactgccgggagagaatccacgaggtactggcagaggagctcaccaaggcagaggaggccgcgtccgacgctgacctgggtggcctcgaccctaacactcagaagcactgggagaaggcctttgtgggctgcttcagccgtgttgatgcagaggtgggaggagacgcggcgaccgaagccaagcctgtggctccagacaccgtgggctcaacagcggtggttgcgcttgtctgctcatcgcatgtcatcgttgccaactgtggcgactcgcgagcggtgctctgccggggcaagcagcctgtggcgctttccgtggaccataaaccaaacagggaagatgagtatgcaaggattgaggcccagggtggcaaggtcatcaattggaatggctatcgagtcctcggtgttctcgccatgtcccggtcaattggtacgtgtccctatcctcttcatgtcatgagagcaacgttggtttatgatgccatatacatccacacagtttttcaattcctgaaaaactacagactggttaatcagactacttacagcaacggtacaatatgtagctatcaccacttggaatgttgttggctggtccattctgttcgttgacaaattattattggctatttgatttgttgcagtttcgctttagggatgtatgctttaattttggtagtcaaaaaggttgctagtccgttatggaaacctaatgagttcaactttgattgcgccactggatgaaatggtatggacttgtgttggataacaaacagttgtggtttggaatgtatcgctaactatgcagcgcaggctttaagcctcttccaggcttgtgatggaattatgccattgtgtgcatatcttgacatttgaacgtttcttttcacccacaggagttcacagattcaattaagctatttattacttggacctggactgcttgatcctatgttctataaccatggattccttgcagtcacaggagagcctcagtgtactgttttgatgcctttgtttcagcgttccaatccacttcacttaaagttgactacaaccgatccaaatagacttgtggatgaaaaggttgccatcaaccaactgctcttatgactgcttgtttctcccaacatcagatagaatgatagacaaatgataacgatgatgtaattttgattgattgccaaaagcaggaggtgacattgttgatctatgtgcaggggacagatacctgaagccatatattatcccagtccctgaggtcacaattgtcgcccgtgcaaaagatgatgagtgcctaattattgcaagtgatggcctctgggatgtgatgtcaaacgaggaggtatgtgatgctgctcgcaagcgcatactgctgtggcacaagaagaattcagatgcctcatcgtcagcccaaagaagcggtgattcgccagatgaagcggctcaagcagctgctgagtatttatcgaagctggctctccataaggggagcaaggacaacataaccgtaattgtagtcgacctcaagtcacataggaagatcaagagcagagcataaccgtggattcggtaagacttggacagtagaaatggttgttactacactaggacgctagaaaggtggagaaaaggctcctgttcagtctgctgcacatgtacactggttggcccaacactagtctttttccacaaccatataggctgccacgtttgttcagggactcatacacagatctaatctggttagaaattgggctgacgaagtaaggtaaaggtacaatagaaaccgccagcattaaactgtacctgtgctacttgtgttttggtatattgatgtctaggagtagcagattagcagtgcaaagaatactacgataccccaagttgtttctgcaacaaatgttatgtgcatgtatatcataaaataagaccatctgtaatatgaattcaattcttggcatccgacgttattaattcagttgattgccaacaggatggttgttttgctgctgagaattacatctcattcggtctgattttgccactcagccacgctgatagctattgaactttgacagtctgacgagatttcggaatccaagctgcatcatcagctgtgtgttgacgaccgacagcatcagtgcagtcttttaattatagtcattggagctgcatcttcactttctaattactcagtgcagccaaataggttctatgttatacatatagattgcgttatcttttttttttttccttttagcattgtgtgtagtcaacaaactccacacgtttctataagctgcttgtaatttgtttttgtttttttaatttaaaaacttagggaggggagacgatgttaggctatggccagcacataaggtggcagtatctatgttttat

SEQ ID NO: 60451 - DNA, 2755 bp, Zea Mays
ccctcccttccccaaaagattttggaagcacacgccactgcgagatgggcctcttcccgtccccgtctctgcctgcccaggcaacagccattcctctcctccagtcctcctcgcatcactcgactcgactcgactcgctcgctccaccgaccaccgtgcggccgcggagcggcgcggctttgctccactccactcgcgccggggcggtttccgtcgccgccagggcaccgcccgtgacaccctgatctcccttcacctactcgtggattcgatcccatccagcccgtcccgtccctctcccaccctttccagatctgcctgcgagcccccgccacgcaccctcatgacccaccactaccccccgacgcgcatcacgcgaggggagcgtcactactgctgccgccgccaatggctctctgccctgaccgagcccatggacgacctcaccgtggggggcctcgcgctcttcgccgccgtcgctgacttcatagacgactccgctcccgcgatgccgcagccagcggcggccagcaccgcgcacgagcccgagcccgagcccgggagcccctgctcagtcgccagcgactgcagcagcgtcgccaccgccgacttcgagggatttgccgacctcggctccgcgctcgtgctcgacgacctcgtctcctccgcctccacctccgccagctctgcctccgggcccagggccgccgccgccgctcccgccaggagcgtcttcgcgctcgactgcgtgccgcgctgggggctccagtccgtgtgcggccgccgacccgagatggaggacgccgcccgcgtgctgccaaccttcttccacgtcccgctctggatgctcgccggcgacgcgcccgtcgacggcctcgaccgggcgtccttccgcctccccgcgcacttcttcggcgtctacgacggacacggcggcctccaggtcgccaactactgccgggagagaatccacgaggtactggcagaggagctcaccaaggcagaggaggccgcgtccgacgctgacctgggtggcctcgaccctaacactcagaagcactgggagaaggcctttgtgggctgcttcagccgtgttgatgcagaggtgggaggagacgcggcgaccgaagccaagcctgtggctccagacaccgtgggctcaacagcggtggttgcgcttgtctgctcatcgcatgtcatcgttgccaactgtggcgactcgcgagcggtgctctgccggggcaagcagcctgtggcgctttccgtggaccataaaccaaacagggaagatgagtatgcaaggattgaggcccagggtggcaaggtcatcaattggaatggctatcgagtcctcggtgttctcgccatgtcccggtcaattggagttcacagattcaattaagctatttattacttggacctggactgcttgatcctatgttctataaccatggattccttgcagtcacaggagagcctcagtgtactgttttgatgcctttgtttcagcgttccaatccacttcacttaaagttgactacaaccgatccaaatagacttgtggatgaaaaggggacagatacctgaagccatatattatcccagtccctgaggtcacaattgtcgcccgtgcaaaagatgatgagtgcctaattattgcaagtgatggcctctgggatgtgatgtcaaacgaggaggtatgtgatgctgctcgcaagcgcatactgctgtggcacaagaagaattcagatgcctcatcgtcagcccaaagaagcggtgattcgccagatgaagcggctcaagcagctgctgagtatttatcgaagctggctctccataaggggagcaaggacaacataaccgtaattgtagtcgacctcaagtcacataggaagatcaagagcagagcataaccgtggattcggtaagacttggacagtagaaatggttgttactacactaggacgctagaaaggtggagaaaaggctcctgttcagtctgctgcacatgtacactggttggcccaacactagtctttttccacaaccatataggctgccacgtttgttcagggactcatacacagatctaatctggttagaaattgggctgacgaagtaaggtaaaggtacaatagaaaccgccagcattaaactgtacctgtgctacttgtgttttggtatattgatgtctaggagtagcagattagcagtgcaaagaatactacgataccccaagttgtttctgcaacaaatgttatgtgcatgtatatcataaaataagaccatctgtaatatgaattcaattcttggcatccgacgttattaattcagttgattgccaacaggatggttgttttgctgctgagaattacatctcattcggtctgattttgccactcagccacgctgatagctattgaactttgacagtctgacgagatttcggaatccaagctgcatcatcagctgtgtgttgacgaccgacagcatcagtgcagtcttttaattatagtcattggagctgcatcttcactttctaattactcagtgcagccaaataggttctatgttatacatatagattgcgttatcttttttttttttccttttagcattgtgtgtagtcaacaaactccacacgtttctataagctgcttgtaatttgtttttgtttttttaatttaaaaacttagggaggggagacgatgttaggctatggccagcacataaggtggcagtatctatgttttat

SEQ ID NO: 60452 - DNA, 2672 bp, Zea Mays
ccctcccttccccaaaagattttggaagcacacgccactgcgagatgggcctcttcccgtccccgtctctgcctgcccaggcaacagccattcctctcctccagtcctcctcgcatcactcgactcgactcgactcgctcgctccaccgaccaccgtgcggccgcggagcggcgcggctttgctccactccactcgcgccggggcggtttccgtcgccgccagggcaccgcccgtgacaccctgatctcccttcacctactcgtggattcgatcccatccagcccgtcccgtccctctcccaccctttccagatctgcctgcgagcccccgccacgcaccctcatgacccaccactaccccccgacgcgcatcacgcgaggggagcgtcactactgctgccgccgccaatggctctctgccctgaccgagcccatggacgacctcaccgtggggggcctcgcgctcttcgccgccgtcgctgacttcatagacgactccgctcccgcgatgccgcagccagcggcggccagcaccgcgcacgagcccgagcccgagcccgggagcccctgctcagtcgccagcgactgcagcagcgtcgccaccgccgacttcgagggatttgccgacctcggctccgcgctcgtgctcgacgacctcgtctcctccgcctccacctccgccagctctgcctccgggcccagggccgccgccgccgctcccgccaggagcgtcttcgcgctcgactgcgtgccgcgctgggggctccagtccgtgtgcggccgccgacccgagatggaggacgccgcccgcgtgctgccaaccttcttccacgtcccgctctggatgctcgccggcgacgcgcccgtcgacggcctcgaccgggcgtccttccgcctccccgcgcacttcttcggcgtctacgacggacacggcggcctccaggtcgccaactactgccgggagagaatccacgaggtactggcagaggagctcaccaaggcagaggaggccgcgtccgacgctgacctgggtggcctcgaccctaacactcagaagcactgggagaaggcctttgtgggctgcttcagccgtgttgatgcagaggtgggaggagacgcggcgaccgaagccaagcctgtggctccagacaccgtgggctcaacagcggtggttgcgcttgtctgctcatcgcatgtcatcgttgccaactgtggcgactcgcgagcggtgctctgccggggcaagcagcctgtggcgctttccgtggaccataaaccaaacagggaagatgagtatgcaaggattgaggcccagggtggcaaggtcatcaattggaatggctatcgagtcctcggtgttctcgccatgtcccggtcaattgtcacaggagagcctcagtgtactgttttgatgcctttgtttcagcgttccaatccacttcacttaaagttgactacaaccgatccaaatagacttgtggatgaaaaggggacagatacctgaagccatatattatcccagtccctgaggtcacaattgtcgcccgtgcaaaagatgatgagtgcctaattattgcaagtgatggcctctgggatgtgatgtcaaacgaggaggtatgtgatgctgctcgcaagcgcatactgctgtggcacaagaagaattcagatgcctcatcgtcagcccaaagaagcggtgattcgccagatgaagcggctcaagcagctgctgagtatttatcgaagctggctctccataaggggagcaaggacaacataaccgtaattgtagtcgacctcaagtcacataggaagatcaagagcagagcataaccgtggattcggtaagacttggacagtagaaatggttgttactacactaggacgctagaaaggtggagaaaaggctcctgttcagtctgctgcacatgtacactggttggcccaacactagtctttttccacaaccatataggctgccacgtttgttcagggactcatacacagatctaatctggttagaaattgggctgacgaagtaaggtaaaggtacaatagaaaccgccagcattaaactgtacctgtgctacttgtgttttggtatattgatgtctaggagtagcagattagcagtgcaaagaatactacgataccccaagttgtttctgcaacaaatgttatgtgcatgtatatcataaaataagaccatctgtaatatgaattcaattcttggcatccgacgttattaattcagttgattgccaacaggatggttgttttgctgctgagaattacatctcattcggtctgattttgccactcagccacgctgatagctattgaactttgacagtctgacgagatttcggaatccaagctgcatcatcagctgtgtgttgacgaccgacagcatcagtgcagtcttttaattatagtcattggagctgcatcttcactttctaattactcagtgcagccaaataggttctatgttatacatatagattgcgttatcttttttttttttccttttagcattgtgtgtagtcaacaaactccacacgtttctataagctgcttgtaatttgtttttgtttttttaatttaaaaacttagggaggggagacgatgttaggctatggccagcacataaggtggcagtatctatgttttat

SEQ ID NO: 60453 - DNA, 2565 bp, Zea Mays
ccctcccttccccaaaagattttggaagcacacgccactgcgagatgggcctcttcccgtccccgtctctgcctgcccaggcaacagccattcctctcctccagtcctcctcgcatcactcgactcgactcgactcgctcgctccaccgaccaccgtgcggccgcggagcggcgcggctttgctccactccactcgcgccggggcggtttccgtcgccgccagggcaccgcccgtgacaccctgatctcccttcacctactcgtggattcgatcccatccagcccgtcccgtccctctcccaccctttccagatctgcctgcgagcccccgccacgcaccctcatgacccaccactaccccccgacgcgcatcacgcgaggggagcgtcactactgctgccgccgccaatggctctctgccctgaccgagcccatggacgacctcaccgtggggggcctcgcgctcttcgccgccgtcgctgacttcatagacgactccgctcccgcgatgccgcagccagcggcggccagcaccgcgcacgagcccgagcccgagcccgggagcccctgctcagtcgccagcgactgcagcagcgtcgccaccgccgacttcgagggatttgccgacctcggctccgcgctcgtgctcgacgacctcgtctcctccgcctccacctccgccagctctgcctccgggcccagggccgccgccgccgctcccgccaggagcgtcttcgcgctcgactgcgtgccgcgctgggggctccagtccgtgtgcggccgccgacccgagatggaggacgccgcccgcgtgctgccaaccttcttccacgtcccgctctggatgctcgccggcgacgcgcccgtcgacggcctcgaccgggcgtccttccgcctccccgcgcacttcttcggcgtctacgacggacacggcggcctccaggtcgccaactactgccgggagagaatccacgaggtactggcagaggagctcaccaaggcagaggaggccgcgtccgacgctgacctgggtggcctcgaccctaacactcagaagcactgggagaaggcctttgtgggctgcttcagccgtgttgatgcagaggtgggaggagacgcggcgaccgaagccaagcctgtggctccagacaccgtgggctcaacagcggtggttgcgcttgtctgctcatcgcatgtcatcgttgccaactgtggcgactcgcgagcggtgctctgccggggcaagcagcctgtggcgctttccgtggaccataaaccaaacagggaagatgagtatgcaaggattgaggcccagggtggcaaggtcatcaattggaatggctatcgagtcctcggtgttctcgccatgtcccggtcaattggggacagatacctgaagccatatattatcccagtccctgaggtcacaattgtcgcccgtgcaaaagatgatgagtgcctaattattgcaagtgatggcctctgggatgtgatgtcaaacgaggaggtatgtgatgctgctcgcaagcgcatactgctgtggcacaagaagaattcagatgcctcatcgtcagcccaaagaagcggtgattcgccagatgaagcggctcaagcagctgctgagtatttatcgaagctggctctccataaggggagcaaggacaacataaccgtaattgtagtcgacctcaagtcacataggaagatcaagagcagagcataaccgtggattcggtaagacttggacagtagaaatggttgttactacactaggacgctagaaaggtggagaaaaggctcctgttcagtctgctgcacatgtacactggttggcccaacactagtctttttccacaaccatataggctgccacgtttgttcagggactcatacacagatctaatctggttagaaattgggctgacgaagtaaggtaaaggtacaatagaaaccgccagcattaaactgtacctgtgctacttgtgttttggtatattgatgtctaggagtagcagattagcagtgcaaagaatactacgataccccaagttgtttctgcaacaaatgttatgtgcatgtatatcataaaataagaccatctgtaatatgaattcaattcttggcatccgacgttattaattcagttgattgccaacaggatggttgttttgctgctgagaattacatctcattcggtctgattttgccactcagccacgctgatagctattgaactttgacagtctgacgagatttcggaatccaagctgcatcatcagctgtgtgttgacgaccgacagcatcagtgcagtcttttaattatagtcattggagctgcatcttcactttctaattactcagtgcagccaaataggttctatgttatacatatagattgcgttatcttttttttttttccttttagcattgtgtgtagtcaacaaactccacacgtttctataagctgcttgtaatttgtttttgtttttttaatttaaaaacttagggaggggagacgatgttaggctatggccagcacataaggtggcagtatctatgttttat

SEQ ID NO: 60454 - DNA, 1819 bp, Zea Mays
cttttgttatcttttttcaccataaatactgcaggggggagtcccccaccccaatgtaagaattttattgttaaaaaaggaataagaaaagaactgtgcagcagggaacaactgaatggatttcactaaattattcgctcatagatcataaatggattcctttgcctgtaaagcaacaatgcatgcaagattcatagagtgataagtgttcaacaatagcttagacatgctggaaactgtagtaggttgaaagcaggtaatggtcttacaaatttatgagtcgggtattcagcgctttgcactcctgaatgatttcatcctcatcaagaagctcttccaatgtaaagttctccttgtccagaattgtatccacctgaccaacaggaaaagaaagttaggcatgtgggacggggatgccccagtgtatgctactaaattttcacaagaaacctgagatggtaaaaaaaaaaggtatactaagggcatgtttggattccaggagctaaagcaaaaatgattatagagtttagttacttaggagctaaatatccaaacaggaagagctaaaagtgactaaattgatacttttttcaccactataatcagttttagtgcttcctatttggatctttagctcctaagagcagctccagtagttatgtaaaatatatctccttaaaattgtatttagcaagtttgtaaacagctattgggcgttcaaaaaaaatttgtggatctccaacagttgctattatttaggtagttaatctgtttgaaaaatcaaattggtgggtcatttggataccatgcaacacgactgccgtacaaaacaggaagagtcaaaggcatgtgtgacatacgaagcagcaggaacagggaaagattgccacgagtgagaaaatggcgtcagttttttttcgtgacttgctacatgattatcaaatgtagggaggaaatagggttacatgagaagtgactaaatttatgaagtcaatttagagagctgttggagagaggtttttgtgctaactatctaaattcttgatttagagagtcatttagagaactactggagttgctctaagtaactaaactttagtcacttttgttttagctcctgggatccaaacagcccctaaataaataagacatgacaataaacatggtcggtccactggacagttagttattattactataaaatgagtacaatgaaccaaaagaatacatctagtgataacatgatgatgaaactaccccatgggccagaaaaagttttacgactctttataagggaataagaaataaataaacagtaagcatacttgacatgaaattagtttccgacacaggtataggaagccctataaatagtaatgggacagaaacagaaaatatgttcccacagagacagtaacagaaaatgtgcagagagccagagaaagcctgtttattaatgaaccggaatcgttgtcaatggaattgctcaaactagctgcactcaagctttatccaattccttccctgggtaggtgtgcgtgcagcaggaacatgacggtgatcacagaatataaccctgaacgtggagtggaagctgttccaacatcaacgccgattcagccggctgtagataatgagtcaaaagggaaaccaacaggacctagattttgctatagtttgttttgttatgttcttttcggaagtcaagcttggcgaatgccgtaaaagttcgggagtccattgcagaagacaggaaaatatcctgtgcaatcacttatattggtgcaagcgtgcaatcaagcggtttggtgcatctaat

SEQ ID NO: 60455 - DNA, 2847 bp, Zea Mays
ccatcccgtcccgattccaatccaatcccccgcaagcgcgaagagaggagacgagaagggggagggatccacagttcacacacaccccgcttcccatggcgctagcgctgcgctgccctcccgccgccacctcgtcccggagccccttcctaccgtcgacctccccagcccctgcggggaaggtcccgaggaggccgcccgccagctggaggtgcctcgcctactacggcgacggcggattccgcaagaactacgaccacatccccaagcagttccgcgaggagaacctcaaggatggactgatggataattacaagcatgttcctcaattcctttatggattaagtgatgctcagatggaaatgtttatgaatgacgataacccttataatcggcagtcccagaaagttacagagcgtttctgctgcgaggagctacgatgagtttggtatgtacaccttgtcaggcatgcatgagggccctgcaagttacagcatgggtatgggcatggggggcagcatgagcatgagcatgggcagaggagggagaggatatagaagaatgagaagctctgctccagatcttccgtcattgctactggactctcgaattatatttcttggaatgcctattgttccagcagtaactgagcttattgctgctcaatttctatggctagactatgacgaccgcacaaaacccatttatctgtatataaactccactggaactatggacgaaaataacgagcttgttgcatctgaaactgatgcttatgcaattgctgattttatcaatcgaagtaaatccaaggtttacacaatcaatcttagcatggcatatggtcaggctgcgatgcttctttcccttggtgtcaagggcaaaagaggagtgctgccgaattcaatcactaaattgcacctgcctaaggtgcacaaatctggtggagctgccattgatatgtggattaaggcaaaagagttagatacaaacacagattactacctcgaactcttgtctaaaggagttggtaaaccaaaggaagagcttgctgaattccttaggggcccgaggtacttccgagcacaagaggctcttgattatggacttgccgatacgatattacactcgctggatggttctttcaaaccaaaggacctgaccgcgcagctagccaaggcacaggcgatgcgccagtcaggcaagcgtgcagctgctggagctgggagatggtcaactccaaccgcacccaggtagagactagaatggtagagcaggacaatatatgttcatctggatggtcttgtggctctgctatacaaagaggccagccttttgtatacttgtgttggaaatccatggagcttggaattagacgcacggctggatagtgagatgttgtgtactgtagtgtagtgtcagttgtgacgtacgtgtatcatctgtgtgcaatctttgctacactcgacccacatacattgcattcagatagattaatttcaccagtgaaaacgatagcctgtatggcaacagatgttctgcactgatgctgatcgttggtccgttattttggtgacatgtttactggtggtgaaatgtgaatggccatgatcatctccaccgtatgtttatactgacacaacaaagtataaacatgaataaacttgttcgacaattcatcaacactgttacatttataaacatgtttacaattcacttgtgtctgtgcagtgcatgtatatatccacatcatggactgtatgtgtcacgtagtttgtggtggtgacaagcgctattacgattgtcacagagatgcatgcatggttggcttctagttcctgctggacctggagaagagcctgctggagacgaatacgccgagggagaaggcggcgacggcgacggcgatcacctccctgttcctcttgaccgtctccacaaggccctccgcccactcggagcccgccagcccctggagctcctccgccacgcgctccttgaagccacggcatgcctttctctggtgctccgccgcagctgcagcatttgcattggcccgctcttcctcggtgcgccgctccgccaggctttcggtcggatccgtcgccttgctctctgcgttggcctgcgtctcgggctgcttcttcgtgtcggctgccggtgcaggtgctgcggcggcggccttgggcttatcttcctttgccgtcgtgtcggctgccggtgcaggtgctgcggcggcggcggccgccttgggcttatcttcctttgccgccgcctccttgtgctgctgctccggctccgatttggcgcccttggctcccgccacctgcttggtggcggcagcggcatcggcatcggcatcctcgggcttcttggcctgctgctggtcttcctttgcgggcgcgggcaggcgcttgggcacggtgagcgtgaggactccaaggtcgaagcggccggcgatgtcgtcgaggttggaggtggatggcagctggaagaccttgttgaagcgggagtgcctggcgttggcgttggcggcggcggcgtcggagcgctggccgcggacggtgaggcggccggcgccgtcgacttgcaccctgaaatcttgtttcctgaagccttcttacaagcaagcaaagcaaagaatggagtcatgcatgcgcatacaggtccaggtctccattgccattagctagagctcgtactactactacctgagaggtggatgcggaggatgaagctgctggcgttctcctcccactcgtacctcgggtccaactcctgaccagcagccgcaggcggcttggacgagcctcctccttgcttgctgccggcggtggccattggcga

SEQ ID NO: 60456 - DNA, 2800 bp, Zea Mays
ccatcccgtcccgattccaatccaatcccccgcaagcgcgaagagaggagacgagaagggggagggatccacagttcacacacaccccgcttcccatggcgctagcgctgcgctgccctcccgccgccacctcgtcccggagccccttcctaccgtcgacctccccagcccctgcggggaaggtcccgaggaggccgcccgccagctggaggtgcctcgcctactacggcgacggcggattccgcaagaactacgaccacatccccaagcagttccgcgaggagaacctcaaggatggactgatggataattacaagcatgttcctcaattcctttatggattaagtgatgctcagatggaaatgtttatgaatgacgataacccttataatcggcagtcccagaaagttacagaggaaagcgtttctgctgcgaggagctacgatgagtttggtatgtacaccttgtcaggcatgcatgagggccctgcaagttacagcatgggtatgggcatggggggcagcatgagcatgagcatgggcagaggagggagaggatatagaagaatgagaagctctgctccagatcttccgtcattgctactggactctcgaattatatttcttggaatgcctattgttccagcagtaactgagcttattgctgctcaatttctatggctagactatgacgaccgcacaaaacccatttatctgtatataaactccactggaactatggacgaaaataacgagcttgttgcatctgaaactgatgcttatgcaattgctgattttatcaatcgaagtaaatccaaggtttacacaatcaatcttagcatggcatatggtcaggctgcgatgcttctttcccttggtgtcaagggcaaaagaggagtgctgccgaattcaatcactaaattgcacctgcctaaggtgcacaaatctggtggagctgccattgatatgtggattaaggagttggtaaaccaaaggaagagcttgctgaattccttaggggcccgaggtacttccgagcacaagaggctcttgattatggacttgccgatacgatattacactcgctggatggttctttcaaaccaaaggacctgaccgcgcagctagccaaggcacaggcgatgcgccagtcaggcaagcgtgcagctgctggagctgggagatggtcaactccaaccgcacccaggtagagactagaatggtagagcaggacaatatatgttcatctggatggtcttgtggctctgctatacaaagaggccagccttttgtatacttgtgttggaaatccatggagcttggaattagacgcacggctggatagtgagatgttgtgtactgtagtgtagtgtcagttgtgacgtacgtgtatcatctgtgtgcaatctttgctacactcgacccacatacattgcattcagatagattaatttcaccagtgaaaacgatagcctgtatggcaacagatgttctgcactgatgctgatcgttggtccgttattttggtgacatgtttactggtggtgaaatgtgaatggccatgatcatctccaccgtatgtttatactgacacaacaaagtataaacatgaataaacttgttcgacaattcatcaacactgttacatttataaacatgtttacaattcacttgtgtctgtgcagtgcatgtatatatccacatcatggactgtatgtgtcacgtagtttgtggtggtgacaagcgctattacgattgtcacagagatgcatgcatggttggcttctagttcctgctggacctggagaagagcctgctggagacgaatacgccgagggagaaggcggcgacggcgacggcgatcacctccctgttcctcttgaccgtctccacaaggccctccgcccactcggagcccgccagcccctggagctcctccgccacgcgctccttgaagccacggcatgcctttctctggtgctccgccgcagctgcagcatttgcattggcccgctcttcctcggtgcgccgctccgccaggctttcggtcggatccgtcgccttgctctctgcgttggcctgcgtctcgggctgcttcttcgtgtcggctgccggtgcaggtgctgcggcggcggccttgggcttatcttcctttgccgtcgtgtcggctgccggtgcaggtgctgcggcggcggcggccgccttgggcttatcttcctttgccgccgcctccttgtgctgctgctccggctccgatttggcgcccttggctcccgccacctgcttggtggcggcagcggcatcggcatcggcatcctcgggcttcttggcctgctgctggtcttcctttgcgggcgcgggcaggcgcttgggcacggtgagcgtgaggactccaaggtcgaagcggccggcgatgtcgtcgaggttggaggtggatggcagctggaagaccttgttgaagcgggagtgcctggcgttggcgttggcggcggcggcgtcggagcgctggccgcggacggtgaggcggccggcgccgtcgacttgcaccctgaaatcttgtttcctgaagccttcttacaagcaagcaaagcaaagaatggagtcatgcatgcgcatacaggtccaggtctccattgccattagctagagctcgtactactactacctgagaggtggatgcggaggatgaagctgctggcgttctcctcccactcgtacctcgggtccaactcctgaccagcagccgcaggcggcttggacgagcctcctccttgcttgctgccggcggtggccattggcga

SEQ ID NO: 60457 - DNA, 2713 bp, Zea Mays
ccatcccgtcccgattccaatccaatcccccgcaagcgcgaagagaggagacgagaagggggagggatccacagttcacacacaccccgcttcccatggcgctagcgctgcgctgccctcccgccgccacctcgtcccggagccccttcctaccgtcgacctccccagcccctgcggggaaggtcccgaggaggccgcccgccagctggaggtgcctcgcctactacggcgacggcggattccgcaagaactacgaccacatccccaagcagttccgcgaggagaacctcaaggatggactgatggataattacaagcatgttcctcaattcctttatggattaagtgatgctcagatggaaatgtttatgaatgacgataacccttataatcggcagtcccagaaagttacagaggatatagaagaatgagaagctctgctccagatcttccgtcattgctactggactctcgaattatatttcttggaatgcctattgttccagcagtaactgagcttattgctgctcaatttctatggctagactatgacgaccgcacaaaacccatttatctgtatataaactccactggaactatggacgaaaataacgagcttgttgcatctgaaactgatgcttatgcaattgctgattttatcaatcgaagtaaatccaaggtttacacaatcaatcttagcatggcatatggtcaggctgcgatgcttctttcccttggtgtcaagggcaaaagaggagtgctgccgaattcaatcactaaattgcacctgcctaaggtgcacaaatctggtggagctgccattgatatgtggattaaggcaaaagagttagatacaaacacagattactacctcgaactcttgtctaaaggagttggtaaaccaaaggaagagcttgctgaattccttaggggcccgaggtacttccgagcacaagaggctcttgattatggacttgccgatacgatattacactcgctggatggttctttcaaaccaaaggacctgaccgcgcagctagccaaggcacaggcgatgcgccagtcaggcaagcgtgcagctgctggagctgggagatggtcaactccaaccgcacccaggtagagactagaatggtagagcaggacaatatatgttcatctggatggtcttgtggctctgctatacaaagaggccagccttttgtatacttgtgttggaaatccatggagcttggaattagacgcacggctggatagtgagatgttgtgtactgtagtgtagtgtcagttgtgacgtacgtgtatcatctgtgtgcaatctttgctacactcgacccacatacattgcattcagatagattaatttcaccagtgaaaacgatagcctgtatggcaacagatgttctgcactgatgctgatcgttggtccgttattttggtgacatgtttactggtggtgaaatgtgaatggccatgatcatctccaccgtatgtttatactgacacaacaaagtataaacatgaataaacttgttcgacaattcatcaacactgttacatttataaacatgtttacaattcacttgtgtctgtgcagtgcatgtatatatccacatcatggactgtatgtgtcacgtagtttgtggtggtgacaagcgctattacgattgtcacagagatgcatgcatggttggcttctagttcctgctggacctggagaagagcctgctggagacgaatacgccgagggagaaggcggcgacggcgacggcgatcacctccctgttcctcttgaccgtctccacaaggccctccgcccactcggagcccgccagcccctggagctcctccgccacgcgctccttgaagccacggcatgcctttctctggtgctccgccgcagctgcagcatttgcattggcccgctcttcctcggtgcgccgctccgccaggctttcggtcggatccgtcgccttgctctctgcgttggcctgcgtctcgggctgcttcttcgtgtcggctgccggtgcaggtgctgcggcggcggccttgggcttatcttcctttgccgtcgtgtcggctgccggtgcaggtgctgcggcggcggcggccgccttgggcttatcttcctttgccgccgcctccttgtgctgctgctccggctccgatttggcgcccttggctcccgccacctgcttggtggcggcagcggcatcggcatcggcatcctcgggcttcttggcctgctgctggtcttcctttgcgggcgcgggcaggcgcttgggcacggtgagcgtgaggactccaaggtcgaagcggccggcgatgtcgtcgaggttggaggtggatggcagctggaagaccttgttgaagcgggagtgcctggcgttggcgttggcggcggcggcgtcggagcgctggccgcggacggtgaggcggccggcgccgtcgacttgcaccctgaaatcttgtttcctgaagccttcttacaagcaagcaaagcaaagaatggagtcatgcatgcgcatacaggtccaggtctccattgccattagctagagctcgtactactactacctgagaggtggatgcggaggatgaagctgctggcgttctcctcccactcgtacctcgggtccaactcctgaccagcagccgcaggcggcttggacgagcctcctccttgcttgctgccggcggtggccattggcga

SEQ ID NO: 60458 - DNA, 2839 bp, Zea Mays
ccatcccgtcccgattccaatccaatcccccgcaagcgcgaagagaggagacgagaagggggagggatccacagttcacacacaccccgcttcccatggcgctagcgctgcgctgccctcccgccgccacctcgtcccggagccccttcctaccgtcgacctccccagcccctgcggggaaggtcccgaggaggccgcccgccagctggaggtgcctcgcctactacggcgacggcggattccgcaagaactacgaccacatccccaagcagttccgcgaggagaacctcaaggatggactgatggataattacaagcatgttcctcaattcctttatggattaagtgatgctcagatggaaatgtttatgaatgacgataacccttataatcggcagtcccagaaagttacagaggaaagcgtttctgctgcgaggagctacgatgagtttggtatgtacaccttgtcaggcatgcatgagggccctgcaagttacagcatgggtatgggcatggggggcagcatgagcatgagcatgggcagaggagggagaggatatagaagaatgagaagctctgctccagatcttccgtcattgctactggactctcgaattatatttcttggaatgccttaactgagcttattgctgctcaatttctatggctagactatgacgaccgcacaaaacccatttatctgtatataaactccactggaactatggacgaaaataacgagcttgttgcatctgaaactgatgcttatgcaattgctgattttatcaatcgaagtaaatccaaggtttacacaatcaatcttagcatggcatatggtcaggctgcgatgcttctttcccttggtgtcaagggcaaaagaggagtgctgccgaattcaatcactaaattgcacctgcctaaggtgcacaaatctggtggagctgccattgatatgtggattaaggcaaaagagttagatacaaacacagattactacctcgaactcttgtctaaaggagttggtaaaccaaaggaagagcttgctgaattccttaggggcccgaggtacttccgagcacaagaggctcttgattatggacttgccgatacgatattacactcgctggatggttctttcaaaccaaaggacctgaccgcgcagctagccaaggcacaggcgatgcgccagtcaggcaagcgtgcagctgctggagctgggagatggtcaactccaaccgcacccaggtagagactagaatggtagagcaggacaatatatgttcatctggatggtcttgtggctctgctatacaaagaggccagccttttgtatacttgtgttggaaatccatggagcttggaattagacgcacggctggatagtgagatgttgtgtactgtagtgtagtgtcagttgtgacgtacgtgtatcatctgtgtgcaatctttgctacactcgacccacatacattgcattcagatagattaatttcaccagtgaaaacgatagcctgtatggcaacagatgttctgcactgatgctgatcgttggtccgttattttggtgacatgtttactggtggtgaaatgtgaatggccatgatcatctccaccgtatgtttatactgacacaacaaagtataaacatgaataaacttgttcgacaattcatcaacactgttacatttataaacatgtttacaattcacttgtgtctgtgcagtgcatgtatatatccacatcatggactgtatgtgtcacgtagtttgtggtggtgacaagcgctattacgattgtcacagagatgcatgcatggttggcttctagttcctgctggacctggagaagagcctgctggagacgaatacgccgagggagaaggcggcgacggcgacggcgatcacctccctgttcctcttgaccgtctccacaaggccctccgcccactcggagcccgccagcccctggagctcctccgccacgcgctccttgaagccacggcatgcctttctctggtgctccgccgcagctgcagcatttgcattggcccgctcttcctcggtgcgccgctccgccaggctttcggtcggatccgtcgccttgctctctgcgttggcctgcgtctcgggctgcttcttcgtgtcggctgccggtgcaggtgctgcggcggcggccttgggcttatcttcctttgccgtcgtgtcggctgccggtgcaggtgctgcggcggcggcggccgccttgggcttatcttcctttgccgccgcctccttgtgctgctgctccggctccgatttggcgcccttggctcccgccacctgcttggtggcggcagcggcatcggcatcggcatcctcgggcttcttggcctgctgctggtcttcctttgcgggcgcgggcaggcgcttgggcacggtgagcgtgaggactccaaggtcgaagcggccggcgatgtcgtcgaggttggaggtggatggcagctggaagaccttgttgaagcgggagtgcctggcgttggcgttggcggcggcggcgtcggagcgctggccgcggacggtgaggcggccggcgccgtcgacttgcaccctgaaatcttgtttcctgaagccttcttacaagcaagcaaagcaaagaatggagtcatgcatgcgcatacaggtccaggtctccattgccattagctagagctcgtactactactacctgagaggtggatgcggaggatgaagctgctggcgttctcctcccactcgtacctcgggtccaactcctgaccagcagccgcaggcggcttggacgagcctcctccttgcttgctgccggcggtggccattggcga

SEQ ID NO: 60459 - DNA, 1281 bp, Zea Mays
ccatcccgtcccgattccaatccaatcccccgcaagcgcgaagagaggagacgagaagggggagggatccacagttcacacacaccccgcttcccatggcgctagcgctgcgctgccctcccgccgccacctcgtcccggagccccttcctaccgtcgacctccccagcccctgcggggaaggtcccgaggaggccgcccgccagctggaggtgcctcgcctactacggcgacggcggattccgcaagaactacgaccacatccccaagcagttccgcgaggagaacctcaaggatggactgatggataattacaagcatgttcctcaattcctttatggattaagtgatgctcagatggaaatgtttatgaatgacgataacccttataatcggcagtcccagaaagttacagaggaaagcgtttctgctgcgaggagctacgatgagtttggtatgtacaccttgtcaggcatgcatgagggccctgcaagttacagcatgggtatgggcatggggggcagcatgagcatgagcatgggcagaggagggagaggatatagaagaatgagaagctctgctccagatcttccgtcattgctactggactctcgaattatatttcttggaatgcctattgttccagcagtaactgagcttattgctgctcaatttctatggctagactatgacgaccgcacaaaacccatttatctgtatataaactccactggaactatggacgaaaataacgagcttgttgcatctgaaactgatgcttatgcaattgctgattttatcaatcgaagtaaatccaaggtttacacaatcaatcttagcatggcatatggtcaggctgcgatgcttctttcccttggtgtcaagggcaaaagaggagtgctgccgaattcaatcactaaattgcacctgcctaaggtgcacaaatctggtggagctgccattgatatgtggattaaggcaaaagagttagatacaaacacagattactacctcgaactcttgtctaaaggagttggtaaaccaaaggaagagcttgctgaattccttaggggcccgaggtacttccgagcacaagaggctcttgattatggacttgccgatacgatattacactcgctggatggttctttcaaaccaaaggacctgaccgcgcagctagccaaggcacaggcgatgcgccagtcaggcaagcgtgcagctgctggagctgggagatggtcaactccaaccgcacccaggtacctttggatatggtgatgac

SEQ ID NO: 60460 - DNA, 2005 bp, Zea Mays
gacgcagggcaatcacggatttcatggtacaagataagaagaatgccagggcactgcccctgcccctgtggtttggacagctagctacatggactcctgctttcacgttctcatacaggcactcctgcactgtgctccttcgtctcctcctcccctgcctgccaccaactgccaaggtaataatggccacactttcttcttcttctttgcttgccttctgcactgcaattgccgccgcaagtgctgtgtgtttgcctctcgttcatccccaaaccctacctctcgcctcggtctcctttgaatttctccatcgatctattattgttcctatataaaaggatgctgtcgtcgggaaggaaatcctcttgtctgccgcgacgactccaaagtctactgcaaacctgcattcttatccgctgcagtttctgattccgacaccattcatccagtttccatacttttgaccggccctataatttctcaaacgtgtggaggcgcctgcaattcgcccccagatatcccccccaaccaatttgatagaatttccaagttttttttcccgcaagtcttccgaatctcgtcaacgtcaaggtgccaagtgcagataccttccctgcctcacaaacaacgccaccctgtactagataccatcagggtcttcaaccagggtttatgttcaggtggcactgccagcagaagtgatccgttgacttcagctatgggcaacctgtgctgctgtgttcaagtcgaccagtcgactgtggccatcagggagcagtttggcaagtttgacagcgtgcttgagccaggatgccactgcatgccttggttcgccggcaagcgtgtagctgggcaactcacactcaggctgcagcaactggatgtgcgctgtgagacaaaaacaaaggacaatgttttcgtgaatgtggtggcatctattcagtaccgcgctctggctgacaaagcaagtgacgctttctacaaactgagcaacacaaggtcccagatccaagcctacgtctttgacgtgatcagagcaagcgttcccaagctccatttggacgatgctttcgagcagaaggacgagatcgcaagggcggtggaggaagagcttgagaaggccatgtcggcttatggctttgagatcgtgcagactctcatcgtggacatcgagccagacgagcatgtgaagcgcgcaatgaacgagatcaacgcagctgcgaggctcagggcggctgcaaacgagaaggcggaggcggagaagatcgtgcagatcaagcgcgcggagggggaggcagaagccaagtacctgtccgggctgggcattgcgcgccagcggcaggccatcgtggacgggctcagggacagcgtgctggggttctccgtcaacgtgccgggcaccaccgccaaggacgtcatggacatggtgctcatcacccagtacttcgacaccatgaaggagatcggcgcgtcgtccaaggcgtcctcggtgttcatcccgcatggccccggagcggtgcgcgacattgccacgcagatccgcgacggcctcctgcagggatcctctgtcgccaaacactaagctgcctgccgttgccgttgctgctgaagaacaccaccaccactattatatatataatataatgatgatcttggtaccagagtgatgcttgtctatattgttcatcactcatcgtcaccatctgctaggatggctatctttatgcttggggattggagaaaaccttatctaaccttttagggaaccggtaatatatataatgcagcatgagtttgcagtatgttcatcagaaccttttagagtctagatgcatgaatggcatcatagaatagaatacaagagttgcttccattccatcactgagttactttttcctcagcaccggttgctgctgcccgttgcaactgctagagatattaaatctgaactgatctttataaatttataataaatttatcttagcttaaaaaaatataaaactaa

SEQ ID NO: 60461 - DNA, 2218 bp, Zea Mays
gacgcagggcaatcacggatttcatggtacaagataagaagaatgccagggcactgcccctgcccctgtggtttggacagctagctacatggactcctgctttcacgttctcatacaggcactcctgcactgtgctccttcgtctcctcctcccctgcctgccaccaactgccaaggtaataatggccacactttcttcttcttctttgcttgccttctgcactgcaattgccgccgcaagtgctgtgtgtttgcctctcgttcatccccaaaccctacctctcgcctcggtctcctttgaatttctccatcgatctattattgttcctatataaaaggatgctgtcgtcgggaaggaaatcctcttgtctgccgcgacgactccaaagtctactgcaaacctgcattcttatccgctgcagtttctgattccgacaccattcatccagtttccatacttttgaccggccctataatttctcaaacgtgtggaggcgcctgcaattcgcccccagatatcccccccaaccaatttgatagaatttccaagttttttttcccgcaagtcttccgaatctcgtcaacgtcaaggtcgagcgtttagcacgcaacccattttgtattgtcattatatatataaataaataataaaagcgacatgttgtgcttgtattgtatgtttgctccaatctttcaaattcgctagatgatgctgaccctcccagtctgcttctttatgatgaatccaatccgtcgtggagacatctaagcaggctttactgaatctagttgctatttaaccaggtgccaagtgcagataccttccctgcctcacaaacaacgccaccctgtactagataccatcagggtcttcaaccagggtttatgttcaggtggcactgccagcagaagtgatccgttgacttcagctatgggcaacctgtgctgctgtgttcaagtcgaccagtcgactgtggccatcagggagcagtttggcaagtttgacagcgtgcttgagccaggatgccactgcatgccttggttcgccggcaagcgtgtagctgggcaactcacactcaggctgcagcaactggatgtgcgctgtgagacaaaaacaaaggacaatgttttcgtgaatgtggtggcatctattcagtaccgcgctctggctgacaaagcaagtgacgctttctacaaactgagcaacacaaggtcccagatccaagcctacgtctttgacgtgatcagagcaagcgttcccaagctccatttggacgatgctttcgagcagaaggacgagatcgcaagggcggtggaggaagagcttgagaaggccatgtcggcttatggctttgagatcgtgcagactctcatcgtggacatcgagccagacgagcatgtgaagcgcgcaatgaacgagatcaacgcagctgcgaggctcagggcggctgcaaacgagaaggcggaggcggagaagatcgtgcagatcaagcgcgcggagggggaggcagaagccaagtacctgtccgggctgggcattgcgcgccagcggcaggccatcgtggacgggctcagggacagcgtgctggggttctccgtcaacgtgccgggcaccaccgccaaggacgtcatggacatggtgctcatcacccagtacttcgacaccatgaaggagatcggcgcgtcgtccaaggcgtcctcggtgttcatcccgcatggccccggagcggtgcgcgacattgccacgcagatccgcgacggcctcctgcagggatcctctgtcgccaaacactaagctgcctgccgttgccgttgctgctgaagaacaccaccaccactattatatatataatataatgatgatcttggtaccagagtgatgcttgtctatattgttcatcactcatcgtcaccatctgctaggatggctatctttatgcttggggattggagaaaaccttatctaaccttttagggaaccggtaatatatataatgcagcatgagtttgcagtatgttcatcagaaccttttagagtctagatgcatgaatggcatcatagaatagaatacaagagttgcttccattccatcactgagttactttttcctcagcaccggttgctgctgcccgttgcaactgctagagatattaaatctgaactgatctttataaatttataataaatttatcttagcttaaaaaaatataaaactaa

SEQ ID NO: 60462 - DNA, 1928 bp, Zea Mays
gacgcagggcaatcacggatttcatggtacaagataagaagaatgccagggcactgcccctgcccctgtggtttggacagctagctacatggactcctgctttcacgttctcatacaggcactcctgcactgtgctccttcgtctcctcctcccctgcctgccaccaactgccaaggtaataatggccacactttcttcttcttctttgcttgccttctgcactgcaattgccgccgcaagtgctgtgtgtttgcctctcgttcatccccaaaccctacctctcgcctcggtctcctttgaatttctccatcgatctattattgttcctatataaaaggatgctgtcgtcgggaaggaaatcctcttgtctgccgcgacgactccaaagtctactgcaaacctgcattcttatccgctgcagtttctgattccgacaccattcatccagtttccatacttttgaccggccctataatttctcaaacgtgtggaggcgcctgcaattcgcccccagatatcccccccaaccaatttgatagaatttccaagttttttttcccgcaagtcttccgaatctcgtcaacgtcaaggtttatgttcaggtggcactgccagcagaagtgatccgttgacttcagctatgggcaacctgtgctgctgtgttcaagtcgaccagtcgactgtggccatcagggagcagtttggcaagtttgacagcgtgcttgagccaggatgccactgcatgccttggttcgccggcaagcgtgtagctgggcaactcacactcaggctgcagcaactggatgtgcgctgtgagacaaaaacaaaggacaatgttttcgtgaatgtggtggcatctattcagtaccgcgctctggctgacaaagcaagtgacgctttctacaaactgagcaacacaaggtcccagatccaagcctacgtctttgacgtgatcagagcaagcgttcccaagctccatttggacgatgctttcgagcagaaggacgagatcgcaagggcggtggaggaagagcttgagaaggccatgtcggcttatggctttgagatcgtgcagactctcatcgtggacatcgagccagacgagcatgtgaagcgcgcaatgaacgagatcaacgcagctgcgaggctcagggcggctgcaaacgagaaggcggaggcggagaagatcgtgcagatcaagcgcgcggagggggaggcagaagccaagtacctgtccgggctgggcattgcgcgccagcggcaggccatcgtggacgggctcagggacagcgtgctggggttctccgtcaacgtgccgggcaccaccgccaaggacgtcatggacatggtgctcatcacccagtacttcgacaccatgaaggagatcggcgcgtcgtccaaggcgtcctcggtgttcatcccgcatggccccggagcggtgcgcgacattgccacgcagatccgcgacggcctcctgcagggatcctctgtcgccaaacactaagctgcctgccgttgccgttgctgctgaagaacaccaccaccactattatatatataatataatgatgatcttggtaccagagtgatgcttgtctatattgttcatcactcatcgtcaccatctgctaggatggctatctttatgcttggggattggagaaaaccttatctaaccttttagggaaccggtaatatatataatgcagcatgagtttgcagtatgttcatcagaaccttttagagtctagatgcatgaatggcatcatagaatagaatacaagagttgcttccattccatcactgagttactttttcctcagcaccggttgctgctgcccgttgcaactgctagagatattaaatctgaactgatctttataaatttataataaatttatcttagcttaaaaaaatataaaactaa

SEQ ID NO: 60463 - DNA, 1379 bp, Zea Mays
cgctatttgattgtctttgctctctctctctctctgtctgtggtttatgttcaggtggcactgccagcagaagtgatccgttgacttcagctatgggcaacctgtgctgctgtgttcaagtcgaccagtcgactgtggccatcagggagcagtttggcaagtttgacagcgtgcttgagccaggatgccactgcatgccttggttcgccggcaagcgtgtagctgggcaactcacactcaggctgcagcaactggatgtgcgctgtgagacaaaaacaaaggacaatgttttcgtgaatgtggtggcatctattcagtaccgcgctctggctgacaaagcaagtgacgctttctacaaactgagcaacacaaggtcccagatccaagcctacgtctttgacgtgatcagagcaagcgttcccaagctccatttggacgatgctttcgagcagaaggacgagatcgcaagggcggtggaggaagagcttgagaaggccatgtcggcttatggctttgagatcgtgcagactctcatcgtggacatcgagccagacgagcatgtgaagcgcgcaatgaacgagatcaacgcagctgcgaggctcagggcggctgcaaacgagaaggcggaggcggagaagatcgtgcagatcaagcgcgcggagggggaggcagaagccaagtacctgtccgggctgggcattgcgcgccagcggcaggccatcgtggacgggctcagggacagcgtgctggggttctccgtcaacgtgccgggcaccaccgccaaggacgtcatggacatggtgctcatcacccagtacttcgacaccatgaaggagatcggcgcgtcgtccaaggcgtcctcggtgttcatcccgcatggccccggagcggtgcgcgacattgccacgcagatccgcgacggcctcctgcagggatcctctgtcgccaaacactaagctgcctgccgttgccgttgctgctgaagaacaccaccaccactattatatatataatataatgatgatcttggtaccagagtgatgcttgtctatattgttcatcactcatcgtcaccatctgctaggatggctatctttatgcttggggattggagaaaaccttatctaaccttttagggaaccggtaatatatataatgcagcatgagtttgcagtatgttcatcagaaccttttagagtctagatgcatgaatggcatcatagaatagaatacaagagttgcttccattccatcactgagttactttttcctcagcaccggttgctgctgcccgttgcaactgctagagatattaaatctgaactgatctttataaatttataataaatttatcttagcttaaaaaaatataaaactaa

SEQ ID NO: 60464 - DNA, 1398 bp, Zea Mays
tggagatggaattattaggtgctaagtattcagcatctgtgaaagaatttacttgatggaggtttatgttcaggtggcactgccagcagaagtgatccgttgacttcagctatgggcaacctgtgctgctgtgttcaagtcgaccagtcgactgtggccatcagggagcagtttggcaagtttgacagcgtgcttgagccaggatgccactgcatgccttggttcgccggcaagcgtgtagctgggcaactcacactcaggctgcagcaactggatgtgcgctgtgagacaaaaacaaaggacaatgttttcgtgaatgtggtggcatctattcagtaccgcgctctggctgacaaagcaagtgacgctttctacaaactgagcaacacaaggtcccagatccaagcctacgtctttgacgtgatcagagcaagcgttcccaagctccatttggacgatgctttcgagcagaaggacgagatcgcaagggcggtggaggaagagcttgagaaggccatgtcggcttatggctttgagatcgtgcagactctcatcgtggacatcgagccagacgagcatgtgaagcgcgcaatgaacgagatcaacgcagctgcgaggctcagggcggctgcaaacgagaaggcggaggcggagaagatcgtgcagatcaagcgcgcggagggggaggcagaagccaagtacctgtccgggctgggcattgcgcgccagcggcaggccatcgtggacgggctcagggacagcgtgctggggttctccgtcaacgtgccgggcaccaccgccaaggacgtcatggacatggtgctcatcacccagtacttcgacaccatgaaggagatcggcgcgtcgtccaaggcgtcctcggtgttcatcccgcatggccccggagcggtgcgcgacattgccacgcagatccgcgacggcctcctgcagggatcctctgtcgccaaacactaagctgcctgccgttgccgttgctgctgaagaacaccaccaccactattatatatataatataatgatgatcttggtaccagagtgatgcttgtctatattgttcatcactcatcgtcaccatctgctaggatggctatctttatgcttggggattggagaaaaccttatctaaccttttagggaaccggtaatatatataatgcagcatgagtttgcagtatgttcatcagaaccttttagagtctagatgcatgaatggcatcatagaatagaatacaagagttgcttccattccatcactgagttactttttcctcagcaccggttgctgctgcccgttgcaactgctagagatattaaatctgaactgatctttataaatttataataaatttatcttagcttaaaaaaatataaaactaa

SEQ ID NO: 60465 - DNA, 2162 bp, Zea Mays
cctcgccttccgcttaaaccccatcccaactcatcgaagccctcgccaatcggcacgaccatggctgccatccacctgcgcccgctccgctccgtcgccgtctcctccgcgaggtaccgctcgcttctccaccttctcgcccgccccctctcctcttcccaatcgtcccacgcctaccaccctttccccaccccggccgccgccgcccccaaccatgttcaccaccaccaccctacccaccacagccagcagcagtcggcgccgccgaggaacccgcctccccttggcccctctccgcagtggtccccgcagcctccgccgccccgcggctatgggcctccaccgccgcagcacccgcatgtgccgccgccgccgccacgcggctacggacctctatcaccgggacagcacttgccgccttcgccacacggctacggccctccactgccgccgccgccaccaccacacggccacggacctccgccaccaggacagcatgttgtgccgccgctgcctccatcacacggccacagacctccaccatcgtgccagcatgtgccaccgccgccgccatcgcacggtcacggacctccgccaccgggccagtacgtgccgtctgcgctgccacgcgaccacgggcctccacccccgcaccagcaggcaccgcctccaccgccgccgcctgagcctgtagcggggcctggggagctgatgggattgtgccgggagggtcgggtgaaggacgccgtggagcttctggacaagggggcgtgcgccgacccagccgccttctacgagctcgcggcagcctgctccaaccctaagctgctggaggagctcaggaaggtgcacgacttcttcctccgctcacccttccgcggcgatctacgggtcaacaacaagctgctaaagatgtacgccaagtgtgcagccatgccccacgcccgcaggacgttcgacaatatgcctgaccgcgacatggactcgtggcacatcgtgatcgatggctactcggtcaatgggctcggggacgaggcgctgcgactgttcgagctgatgaaggagtggaccatggcattgagcctggtgtggagcactatgttggaatcattgaggttttggggaagtcagggcacctcaatgaggccctggagttcattgagaagctgccgtttgagcccaatgccatggtgtgggagtcgctcttaaacctggcccggatgaatggagacattgatcttgaggaccgggcagaggagttgttggtgtcacttgatccatccaagtcaaaccataagaagctcccaaccccacctccaaagaggcgtctgggaattaacatgcttgatgggaggaacaagctagtagagtataggcttccaccaaagattgaaaagaaggtggtcaatgagcagaggtacgtcccagacacaagatatgtgctccatgacattgaccaggaggccaaggaacaggcattgctgtaccacagtgagaggctggcaattgcttatggtctgattagcaccccagcaaggactccacttcgcatcattaagaacctgaggatatgtggggactgccacaatgccatcaagatcatgtcaaggatagttgggagagagctcattgtgagggacaataagaggtttcaccatttcaaggatggaaagtgctcctgtggagattattggtgataatggattaaagtcattcctctcaccagtatttgctgccatcctttacatggatatatatgctggcagccatggtttcaattgataataagcattatgaaggtatccaatggtgatgttagtagtttctcatccttaaatacacttaagatccttagatgcaagcacctgtatcatgcaaggttatcgcttcttgatgcactaatcaatcttactctctgtatcagtttcatgtttctcacgggaaacatgtgctaatttgaaatatatagctatatggttgtaagaactgattcggccttgctttaatttggatgaagaactaaaatgaatcttatgtatttgtgcacataaattttattttctcgtttgattatgtgcattctatgttgggatatgctactaattaatttaattagtatttttgctattgtcaccattgcttgcccacttaaccagactatc

SEQ ID NO: 60466 - DNA, 750 bp, Zea Mays
aaacgaataccggatacggaaaggatgacggcatagattgcttcgaccttggagcgatgtctacagtaaatgaacggcatagattgcttcgaccttggagagactcatgacatgaggaaatagccagtcatcttttctactcgccgatgagtcctaaaccaagaaccagggaataataataaagtttctgtacatgctgctgggcaaacagaacacgaataggatccacatccacaagtctcaacctcccctcccacggaatcgatccgactccgcccaccaccaaggaaatgggagtaaaatacctactccagcacaagatgcaagccttcccctatctctatcagtaccaaccatccaataaagccccaccccgcaaggattcccaaatatttcgaacggcctgagtccatgatcgagcaggcaaggtaagggataacccggcgtactgaactgaaaccgggttcttggagatggtaatctgccgtgctctcactgggagttaggcctggaacctcgatgacggccccgactctcttcggtcactgcttatctcaaactcgcttgaacttgccttggactcgttgtctgcgtggctgctgtggcctctccggctccggcggtccttcagaggatcacacagcacaagatttagaacaaggaattacggtatcgacggaacaaagctcaagatgtacaacaaacctcccgtgaaggcacgtcttctgcctcgagcatccgaacaacctg

SEQ ID NO: 60467 - DNA, 773 bp, Zea Mays
atgaaggcactgtctctatttttgatgggtcagtagccaccctctgttggctaacgacatgtcccaaatagcctgttttctgttgggatatgctcttgactgcggctgcgcggccgtcggcgatggaggcatggcaccgcgggcaggagcagcaagcccggggcatcgtgttgtaggtgagggacgggaacctggagcgggcgctgtcggtcatggagctcaagatgcggtccgccgcatccggtcgcgcacccaccgccacgtgaaggactcggagaagcgcgtgctcgcgcgtaaggcgctaatgcagcacgtccggtaccaggagctcggcaagaagctccgcgagatcctcatcaggaacatcagtggcttgcggtgacgaattggaacggattctatagtgatcgccaagtgctcgacgaaatgtctcgtgaagttctatctaccacgcttagtggaattgagtgtgtttgcggattgagttgcgctgaggaagaagtttcagtgctgagcgcagtgtcaacccggtgcaggtatctggattggaaggtttgtgtgagaggaacactttcatgtgcacccaactcatccttagctcacttaggcatccacgaaacaggtgtgttgtatggtggtaccaggatatatgaacatgctacaaattttgaacatgctacaaatttaggagccttttggtagatttttcatggcatgtggtgatccaacgtatcaggtttgtgtcactaatttgatcctgcatctttatcata

SEQ ID NO: 60468 - DNA, 1107 bp, Zea Mays
  misc_feature (1)..(2): n is a, c, g, or t
nnttcttattcggagttcacacacactgcacttggactagtgcatctataaagttatcagggttcagtagaaatgcaatcactggctgcatttccctgtgttgtttatagtatgattacatagggaataagaaaataataataaaaaaagagagtagcatttgcttaattgtatttccttggcacccaagcttccttctgaaactgtagccttctgctttttccgcagtgtgctgtgcgccgcaagcttcctcgctgaaccgggctgcgaaattgggaattgggagcgccaggaagcttctgtgatcagccaaggagcctgatcctgacgtggttcgtgggacgtcaacgcgatgacggcagcacttgaaaccattgtggctggaaagcccagcggccagagctatattgcattgcccgtgtgtatgttggaattggaacgccaagtcaaaaaggatggacgggtcgcctgcaaaattgaccggcgtgtctttttttttgaaagtttaggagggggaagccctactgtaaattttgaattaaaatggttaattacagcagagtggagagtcgaaatctgcagctaggtacaagtgaatcagatgctagaggggagcaagggatagaacatagaaggcactaaaagaactaaatttgtctctgatgaagccagtctgaaattgagttgtcatatttttctcttgctctgtgaatgaccataagtagtttctttctgaactcatttttgcaattctgaactgttggttcttgattttcaaagatccatttattccggcatttctagatgctccatgctattaggatgattatttacatggagaaaggaacgttaatctgctatttgagattagcagacgcttctcctggctgggcaattctgggaggatcaatgctaatggagttccaatatgcttttgcaaagttacaccttagagaaatagatggtagagagttttctccttttgtcaaaatgcagttttcacatgtaattgaccggcgtgtctcgttgtcttttggtgatgtcgaaaggacctatgaattaatttaacatctgggtgctattcatctagaaatctctcttatgttt

SEQ ID NO: 60469 - DNA, 938 bp, Zea Mays
acactgcacttggactagtgcatctataaagttatcagggttcagtagaaatgcaatcactggctgcatttccctgtgttgtttatagtatgattacatagggaataagaaaataataataaaaaaagagagtagcatttgcttaattgtatttccttggcacccaagcttccttctgaaactgtagccttctgctttttccgcagtgtgctgtgcgccgcaagcttcctcgctgaaccgggctgcgaaattgggaattgggagcgccaggaagcttctgtgatcagccaaggagcctgatcctgacgtggttcgtgggacgtcaacgcgatgacggcagcacttgaaaccattgtggctggaaagcccagcggccagagctatattgcagagtggagagtcgaaatctgcagctaggtacaagtgaatcagatgctagaggggagcaagggatagaacatagaaggcactaaaagaactaaatttgtctctgatgaagccagtctgaaattgagttgtcatatttttctcttgctctgtgaatgaccataagtagtttctttctgaactcatttttgcaattctgaactgttggttcttgattttcaaagatccatttattccggcatttctagatgctccatgctattaggatgattatttacatggagaaaggaacgttaatctgctatttgagattagcagacgcttctcctggctgggcaattctgggaggatcaatgctaatggagttccaatatgcttttgcaaagttacaccttagagaaatagatggtagagagttttctccttttgtcaaaatgcagttttcacatgtaattgaccggcgtgtctcgttgtcttttggtgatgtcgaaaggacctatgaattaatttaacatctgggtgctattcatctagaaatctctcttatgttt

SEQ ID NO: 60470 - DNA, 1622 bp, Zea Mays
gatgctggtgcgcagcgtcgtgaacgagtggttgccgcccgagtgcgcgatctggtcctctccggcttcggctacctgcgctcgcgcacgtcgtccgaccacaccatcatcgtcgagaagaagaacgacgggttcgctaacaactacgtctactgcgctgtgaagacttacctcgccacgcgcatgaacaccgacatccagcagcgcctgcgcgtcagcagcatggacgaggacgacaagatgatggtcagcatggatgagggcgacgagatgctcgatgtttatcaaggcacggagttcaagtggtgccttgtctgcaaagacaactcaaatgactccctcaacagcagccagaacgagtcccacttcttcgagctgaccttcaacaagaagcacaaggacaaagccctcagatcgtacctcccgttcattttggccacagccaaggccattaaagcccaggagagaaccctcatgatacacatgactgagtacggcaattggtccccgattgaactccaccacccatctacattcgacacgcttgccatggacaagaagctgaagcagtccatcatcgatgacctggacaggttcatgaagaggaaagattactacaggaagattggcaaggcatggaagcggggttaccttctgtatggtccacctgggactgggaagtcaagcctaatcgcagccatggccaaccatctcaggtttgacatatatgatctcgagctaactgcggtcacatccaactcagacctcaggaggcttcttgttaacatggacaaccgatccattctagtcattgaagatattgactgcaccatcgaactcaaacaacggcaggaggccgagggacatgatgagtcagattctacagaacaaaacaagggggaaggcaaggtaacgctgtctggactgctcaactttgttgatgggctgtggtcaacaagtggggaagaaaggatcatcgtcttcacaaccaattacaaggagcggcttgacccggcactgctgcggcctggaaggatggacatgcacatccacatgggaggttgctgaggttctgatgaggaacgatgacactgatgttgtgctccatgatcttgtcgatttcctgaagtcaaaaatcaaggatgccaatgagatcaagactgaacacaaggaagcagacaaccagctagatgagaagaaaaatgacaaaaaataaaacccagtgcatttccttccaaaaaagaagatgaaagctaatggcggtttaagactgagcacaaggaagcaaataaccagctggatgaggagaaaggcaacgagatagtgagaaaaaaaaacagtgcaattccttctagtagaggaaagaagatgaaagcaacacatcgtatttcatatagatagatcctacaggggatccattggcatatgtgagtgtttgcatattgttaacattatgtttttggtgatcaatgaggtgtaatggtacttgcagtgcatctgcagaattctgttagtgcttgtttaggagcatgtatgcagaactacagatatgtaaaatcccattacaacttacatgaaactgcaaacatgccattgcatgcaaatggcaaccttggaaagtg

SEQ ID NO: 60471 - DNA, 1951 bp, Zea Mays
cctaaacctagcgcgcgccactctccctggcagccgccgccaggaagcctccactccagcgcccgagcgcgacggcacgaggccgtgagcacctgcagcccgcagaggcagtgccgctgcctgccttcgtccgagcgagcgagcccaggcggccaggccctaagggctgaccgagccgccgctggccgctgcgcgcgagcagccgctgagctgcctccgagccagccgccacccgccaggccgccagcacggtcgcgctgcccaccctggtacgccaatcctcatctctatgcggcgcccaagaaaactctgcacaaagctcaactggtcagctccttttgctaactctatgatcaattatatctgtatgtaagacctacatgtatgttctcaccggatcccagctctaagaggttgaaattagtcctcgtctcccactttgcaaagtcctggtggtctgaaacaatagaaaagccattgtatgtagcgtaaaaatgcatggaattcactatcacataatagcaaatctggatgctagacacacgtatcggtcttctgtgacaatcatggtacaaggtttacctcgatgattattcttttctgagacccatcatcctccaacactggtatatcattttatttaattctactatttaatttaatttaatgctacttgcaagaatgcatagtgtacactatataattcaatgctacgaactttacacttggaaattacctgattttagttgtggcggccctggacctctgtaacacaaatggagaggcatatccggccgtcgacaccaagcaggccttgagcttgtggcagccgtggtgatcggtcttatcaccagtggtgtcgttagatgccaaatgcagtttgctctgcacgaggattttgctttctggtgtctgtcccgttggaaccggggatttcctgagtgacgaatagacttcccatggcagctattctgttgaggatgtgggaaaggtgcactgcagagtctgagaagtgagagaaataaatgacaagtggtttcaactaaaccaagcaccacagttggaggtcaaatccttggaagacaatattgtgaagttattgtagcttgtgtgctaaaacgagatacagttttgcctcgccctggagtgatgtcgttgtggtgcttttgtgactgatcatctctggagcttttgtgaatgatctagctagatatctgtaaatgatctagttgtgaatgatattataattgtgatgcttttgtgaatatataattgtggtgcttttgtatttataatcaccgacaagcaaaaaggacagttttcataaattataattagaaacacatgtggatcatctggcaacgaacgaggaatcgaatggagtacgtacgtacgcgcgtacactgtctttatacatgccatcgacgacgacaattaacctaagaaatgaatgatgagggccatacatcatcagccagctgacctagacggcgtcaccgttctcggccgccgggtagtagcccgcgtcaacgtcgccgcggcacgacagggaggacgcggagcgcggcggcacgggcgggcgcgccagccggcggccgaagctgtcgtagtggatggcgcccgcgaagtccagcggctggcagcgctcccccatcaggatccgccggctccagagggccacctcgcccgccgaccccgacgacgccctgcccttgtcgatggccgccccgcgcgcgcacagcgccgccgcaaccacgtcggccgtcgtctggtggtgcttcgttggcctcctcctctggtggcgccggaggaggcgccgcgtcgcgcgcgacacgcgcactgtgcacgccgccaccaggcccgacaccctgcccaggagttcctcgccgtagcccgccgccatgcttttgtcgtgcgatgatctggaaagtgctacagcagcgggttcaat

SEQ ID NO: 60472 - DNA, 4884 bp, Zea Mays
gttcatgtccaatcactgaaacaccacctggctggcatgctccacggtcgaatgctaatccatcccaacgcagcagtgcaacgcatgtcgagttgtcgacacaaggcctgggcatcctcgtggcatctggatcaccagtgaaatcgaacaagctagcttccaggccggcctgctacaggcccagtcgaaaacttacaggagccgaaccaaacggccacggccacggacagtgttgccttctcctcccccttctccttctcccgtccactcagcgtgcctgactgcccgtgcgcgccctcgctcagtcgctctcgcgcgcggcgacaactgagccaccgccgacggtccaactcttcgtcggaccctttgccggcgacgagcacccaccaggggtttcatggtagcgtgacctgtctcggcctagaaaatgtatataaagaaggtcgtaatcgaagggtttaagagctacaaggaggagatatcaacagagcccttcagtcccaaagttaacgtagttgttggtgcaaatggatctggcaaatcaaatttctttcatgctatacgatttgtcctgagtgacatgtttcagaacctgcgaagtgaagataggggtgcccttctccatgaaggtgctggacactcggttgtatctgcttttgttgagatagtgtttgacaattcagacaatcgtattccagttgataaagaagaggtacgcttgcgcaggacaattgcttcaaagaaggatgaatactacttggatgggaagcatgtcagtaaaactgaagtcatgaatctgctagagagtgctggtttctctcgttctaatccatactacgttgtgcagcaaggaaagattgcatcccttaccttgatgaaagattctgaacgactggatcttctcaaagagattggtggtacacgtgtttatgaggatagacggaaggagagcttgaaaataatgaccgaaacagccaacaaaaggaagcagattgatcaagttgtccactacttagaggaaagactgagagaactcgatgaagagaaagaagaactaaagaagtaccagcagctggacaaacagagaagatcacttgagtatactatattggaccatgagcttaatgacgcaaggaatgaattagcttcgatggatgataaccgaagaaaaatttctgaaagtatgtcccttgcggacaatgaagtggtggatgtccgagagatgatcaagagttttgataaagaaataaaagtctcaactaaagggataaatgataccaaggcgcaaaaggaaggtgttgagaagaggcgtactgaagctctgaaggtagttgctaagattgaacttgatttgagagatataaaagataggattgtgaatgagaagcgagcaaaggatgaggcagcgagggatttgcagagtgtgaggagagagagtgaaaagtcaaagtctgaattggctgaaattagtaaggtgcatcaggccaaactaaaggaagaggaggatatatcgaagagcattatggatcgtgagaagcggctaagtatattgtaccaaaagcagggaagggcgacccaattcgcaaacaaagctgctagagataagtggcttcaaaaggaaattgaagatctcaagcctgtacttttatcaaataaaaagcaggaaggtttacttcaagaagaaatccagaagcttaaagatgaaatcaatgatttaactaactacatcgagtctcggaaaagcgaatcaagtaagttagaggaaacacttgcgaaaagacataatgactataacgatttgaggaagcagagagatgtgcttcaagaagaaaggaagtcatattggaaggaggaatctgaggtgacagctgaacttgataggctacaagaagatcttataaaggcacagaaaagcttggaccaagcaactcctggggatatcaggagaggcctgaattctgttagcagaatcattaaggaccatggtattactggtgtttttggtcctgtattagaactggttgattgtgaagagaagttctttacagctgttgaggtcactgctgcaaatagcttgttccatgtggttgtcgagaatgatgacatatcaacaaagatcattcaaatattaactagagaaaaaggtggaagggtgacatttataccattgaacagagtgaaagttccagatctcagctgtccgcaaagtcctgattttgttccattgttgaaaaaattgaaatatcgatctgaccatcgtcgtgctttcgaacaggtttttggcaggacagtcatatgccgagatctggaaactgcgactaaagttgcacgtagcaatggtctagattgcatcacacttgatggtgatcaggtagggaaaaaaggtgctatgacaggaggcttctatgattctagacgctcaaaactaaagtttgtgaagataataagggataacaagacagcaattgatagaaagacgggtcatctagagagtgtcgtaaacaagctaaaagatatagataagaaaattacagatttagttaccaaacagcagcaaatggatgctgaacgtgatcatgcgaagtcagagttggaacaatttaaggctgacattgccagggctatgaagcaaagggggtcacttgagaaagcccttgtcaagaaggaaaaatcacttaacaacatctgcaaccaaattgagcaagtccagtctagcattgcaatgaagaatgatgaaatgggcacagagcttattgatcagctaacttcagaagaaagagatctcctttcacgattgaatcctgaaattactgatttgaaggagagatttctaatgtgtaaaaacagtcggattgagatcgaagcacgaaaggaagaattggagaccaatttatcaacaaatcttatcaggcgtcagaaagagctagaagcgataatttcatctgcagattctagaaccttgcctttggaagctgaggcaaaggagcaagaactgaaaagttccaagagaaaccttgatgaactaacttcattattaaaggctaatgtcgatgccataaataatttcaccagaaagatggatgatctgaaaagaaaaagggatgatctgaaggctcgtgaagctattttagagcagactgtacaagatggtgccaaagacttagaacagttgatgaacagcaggaacacttatctagccaagcaagaagagtgcacgaagaagatccgagatttgggcttgttgcctgctgatgcttttgaagcgtacaagaggaaaaacaagaaacagctacataagatactctatgactgtaatgagcagttgaagcagtttagtcatgtgaaccaaaaggctcttgaccaatatgtgaacttcacagaacaacgcgaacaactgcagagaaggcgagctgaacttgatgccggtgatgtgaaaatcatggaactcatatcggttttagaccaaaggaaggatgaatccattgagcgcacatttaaaggggttgcaaggcacttccgtgaagtgttttctgagctggtgcaaggtggtcatggatatttggttatgatgaagaaaaaggatggggatgcagttgatgatgatgaggaggaggatggacctcgtgatccaggccctgatgggagaatagaaaagtatatcggtgtgaaagtcaaggtatcatttactggcaagggagaaactcagtctatgaaacaattgtcaggcggacagaagacggtggtcgcactaacactgattttcgctatccaacgatgtgacccagctccattttatctgttcgacgagatcgatgctgctctggatccacaataccgaacagcagttggaaatatgatccgccgtctagctgacatggctgacactcagttcattgcgaccacattccggccagagattgctaaagtggctgataagatatatgccgtgagacacaagaatagggtgagcaacatcgacgtggtgtccaaggaggaggccctggacttcatcgagcgtgatcagacttaggtagctattggaccagcttgtttggcgcatcaacgttgtgaatgtagcagctaccaccttggtttggtaccagctttaattaagtttgggaagcgctgattagactagacgtacgttacatgttgccccatgattgttgtatggcacgcccagcccaaaatggcagtaatcagttcatttcgacaattaacgtaagtgtaagtgtacgagtagtggtattcaaatgttttttaactgtatttttctagtacatttattttttgtacccataaatcatgttacacgtagtttcattggagggagcataaacatgttcctttgacagaaagcctaataaggctataaaacaaaaattactacacgtagtttcagcaacgcaaacaaaaaaccccgtgcctgcctaatgaattggtcattaggcatgggcttctgcttctctataaggcgactacgagctcccagctgctcagtagctagggtacatgcccatccttcctatggtgctcctgcagccgaagttgacagagcctcgaggctttctgctgccatttgccttcgtggtggatttcgcaatcctcttttccttgcccgtgaacttatcactgtctcgagctctttctttcgaccgtgccacttttgtcattgacgagagagagctttaagtcagtaccaggtcatggcaaaatcaaatggaaactaaatagtatagcaggttatctgaacacaaacaactctatttggaagatctgtgaaactagagtcataataatctggggctgtaggcattaccttagctagcctctccttaagctttggccttgcagatactaccactcttgctggttgacggtccg

SEQ ID NO: 60473 - DNA, 4691 bp, Zea Mays
cgaaaacttacaggagccgaaccaaacggccacggccacggacagtgttgccttctcctcccccttctccttctcccgtccactcagcgtgcctgactgcccgtgcgcgccctcgctcagtcgctctcgcgcgcggcgacaactgagccaccgccgacggtccaactcttcgtcggaccctttgccggcgacgagcacccaccaggggtttcatggtagcgtgacctgtctcggcctagaaaatgtatataaagaaggtcgtaatcgaagggtttaagagctacaaggaggagatatcaacagagcccttcagtcccaaagttaacgtagttgttggtgcaaatggatctggcaaatcaaatttctttcatgctatacgatttgtcctgagtgacatgtttcagaacctgcgaagtgaagataggggtgcccttctccatgaaggtgctggacactcggttgtatctgcttttgttgagatagtgtttgacaattcagacaatcgtattccagttgataaagaagaggtacgcttgcgcaggacaattgcttcaaagaaggatgaatactacttggatgggaagcatgtcagtaaaactgaagtcatgaatctgctagagagtgctggtttctctcgttctaatccatactacgttgtgcagcaaggaaagattgcatcccttaccttgatgaaagattctgaacgactggatcttctcaaagagattggtggtacacgtgtttatgaggatagacggaaggagagcttgaaaataatgaccgaaacagccaacaaaaggaagcagattgatcaagttgtccactacttagaggaaagactgagagaactcgatgaagagaaagaagaactaaagaagtaccagcagctggacaaacagagaagatcacttgagtatactatattggaccatgagcttaatgacgcaaggaatgaattagcttcgatggatgataaccgaagaaaaatttctgaaagtatgtcccttgcggacaatgaagtggtggatgtccgagagatgatcaagagttttgataaagaaataaaagtctcaactaaagggataaatgataccaaggcgcaaaaggaaggtgttgagaagaggcgtactgaagctctgaaggtagttgctaagattgaacttgatttgagagatataaaagataggattgtgaatgagaagcgagcaaaggatgaggcagcgagggatttgcagagtgtgaggagagagagtgaaaagtcaaagtctgaattggctgaaattagtaaggtgcatcaggccaaactaaaggaagaggaggatatatcgaagagcattatggatcgtgagaagcggctaagtatattgtaccaaaagcagggaagggcgacccaattcgcaaacaaagctgctagagataagtggcttcaaaaggaaattgaagatctcaagcctgtacttttatcaaataaaaagcaggaaggtttacttcaagaagaaatccagaagcttaaagatgaaatcaatgatttaactaactacatcgagtctcggaaaagcgaatcaagtaagttagaggaaacacttgcgaaaagacataatgactataacgatttgaggaagcagagagatgtgcttcaagaagaaaggaagtcatattggaaggaggaatctgaggtgacagctgaacttgataggctacaagaagatcttataaaggcacagaaaagcttggaccaagcaactcctggggatatcaggagaggcctgaattctgttagcagaatcattaaggaccatggtattactggtgtttttggtcctgtattagaactggttgattgtgaagagaagttctttacagctgttgaggtcactgctgcaaatagcttgttccatgtggttgtcgagaatgatgacatatcaacaaagatcattcaaatattaactagagaaaaaggtggaagggtgacatttataccattgaacagagtgaaagttccagatctcagctgtccgcaaagtcctgattttgttccattgttgaaaaaattgaaatatcgatctgaccatcgtcgtgctttcgaacaggtttttggcaggacagtcatatgccgagatctggaaactgcgactaaagttgcacgtagcaatggtctagattgcatcacacttgatggtagggaaaaaaggtgctatgacaggaggcttctatgattctagacgctcaaaactaaagtttgtgaagataataagggataacaagacagcaattgatagaaagacgggtcatctagagagtgtcgtaaacaagctaaaagatatagataagaaaattacagatttagttaccaaacagcagcaaatggatgctgaacgtgatcatgcgaagtcagagttggaacaatttaaggctgacattgccagggctatgaagcaaagggggtcacttgagaaagcccttgtcaagaaggaaaaatcacttaacaacatctgcaaccaaattgagcaagtccagtctagcattgcaatgaagaatgatgaaatgggcacagagcttattgatcagctaacttcagaagaaagagatctcctttcacgattgaatcctgaaattactgatttgaaggagagatttctaatgtgtaaaaacagtcggattgagatcgaagcacgaaaggaagaattggagaccaatttatcaacaaatcttatcaggcgtcagaaagagctagaagcgataatttcatctgcagattctagaaccttgcctttggaagctgaggcaaaggagcaagaactgaaaagttccaagagaaaccttgatgaactaacttcattattaaaggctaatgtcgatgccataaataatttcaccagaaagatggatgatctgaaaagaaaaagggatgatctgaaggctcgtgaagctattttagagcagactgtacaagatggtgccaaagacttagaacagttgatgaacagcaggaacacttatctagccaagcaagaagagtgcacgaagaagatccgagatttgggcttgttgcctgctgatgcttttgaagcgtacaagaggaaaaacaagaaacagctacataagatactctatgactgtaatgagcagttgaagcagtttagtcatgtgaaccaaaaggctcttgaccaatatgtgaacttcacagaacaacgcgaacaactgcagagaaggcgagctgaacttgatgccggtgatgtgaaaatcatggaactcatatcggttttagaccaaaggaaggatgaatccattgagcgcacatttaaaggggttgcaaggcacttccgtgaagtgttttctgagctggtgcaaggtggtcatggatatttggttatgatgaagaaaaaggatggggatgcagttgatgatgatgaggaggaggatggacctcgtgatccaggccctgatgggagaatagaaaagtatatcggtgtgaaagtcaaggtatcatttactggcaagggagaaactcagtctatgaaacaattgtcaggcggacagaagacggtggtcgcactaacactgattttcgctatccaacgatgtgacccagctccattttatctgttcgacgagatcgatgctgctctggatccacaataccgaacagcagttggaaatatgatccgccgtctagctgacatggctgacactcagttcattgcgaccacattccggccagagattgctaaagtggctgataagatatatgccgtgagacacaagaatagggtgagcaacatcgacgtggtgtccaaggaggaggccctggacttcatcgagcgtgatcagacttaggtagctattggaccagcttgtttggcgcatcaacgttgtgaatgtagcagctaccaccttggtttggtaccagctttaattaagtttgggaagcgctgattagactagacgtacgttacatgttgccccatgattgttgtatggcacgcccagcccaaaatggcagtaatcagttcatttcgacaattaacgtaagtgtaagtgtacgagtagtggtattcaaatgttttttaactgtatttttctagtacatttattttttgtacccataaatcatgttacacgtagtttcattggagggagcataaacatgttcctttgacagaaagcctaataaggctataaaacaaaaattactacacgtagtttcagcaacgcaaacaaaaaaccccgtgcctgcctaatgaattggtcattaggcatgggcttctgcttctctataaggcgactacgagctcccagctgctcagtagctagggtacatgcccatccttcctatggtgctcctgcagccgaagttgacagagcctcgaggctttctgctgccatttgccttcgtggtggatttcgcaatcctcttttccttgcccgtgaacttatcactgtctcgagctctttctttcgaccgtgccacttttgtcattgacgagagagagctttaagtcagtaccaggtcatggcaaaatcaaatggaaactaaatagtatagcaggttatctgaacacaaacaactctatttggaagatctgtgaaactagagtcataataatctggggctgtaggcattaccttagctagcctctccttaagctttggccttgcagatactaccactcttgctggttgacggtccg

SEQ ID NO: 60474 - DNA, 4815 bp, Zea Mays
caaacggccacggccacggacagtgttgccttctcctcccccttctccttctcccgtccactcagcgtgcctgactgcccgtgcgcgccctcgctcagtcgctctcgcgcgcggcgacaactgagccaccgccgacggtccaactcttcgtcggaccctttgccggcgacgagcacccaccaggggtttcatggtagcgtgacctgtctcggcctagaaaatgtatataaagaaggtcgtaatcgaagggtttaagagctacaaggaggagatatcaacagagcccttcagtcccaaagttaacgtagttgttggtgcaaatggatctggcaaatcaaatttctttcatgctatacgatttgtcctgagtgacatgtttcagaacctgcgaagtgaagataggggtgcccttctccatgaaggtgctggacactcggttgtatctgcttttgttgagatagtgtttgacaattcagacaatcgtattccagttgataaagaagaggtacgcttgcgcaggacaattgcttcaaagaaggatgaatactacttggatgggaagcatgtcagtaaaactgaagtcatgaatctgctagagagtgctggtttctctcgttctaatccatactacgttgtgcagcaaggaaagattgcatcccttaccttgatgaaagattctgaacgactggatcttctcaaagagattggtggtacacgtgtttatgaggatagacggaaggagagcttgaaaataatgaccgaaacagccaacaaaaggaagcagattgatcaagttgtccactacttagaggaaagactgagagaactcgatgaagagaaagaagaactaaagaagtaccagcagctggacaaacagagaagatcacttgagtatactatattggaccatgagcttaatgacgcaaggaatgaattagcttcgatggatgataaccgaagaaaaatttctgaaagtatgtcccttgcggacaatgaagtggtggatgtccgagagatgatcaagagttttgataaagaaataaaagtctcaactaaagggataaatgataccaaggcgcaaaaggaaggtgttgagaagaggcgtactgaagctctgaaggtagttgctaagattgaacttgatttgagagatataaaagataggattgtgaatgagaagcgagcaaaggatgaggcagcgagggatttgcagagtgtgaggagagagagtgaaaagtcaaagtctgaattggctgaaattagtaaggtgcatcaggccaaactaaaggaagaggaggatatatcgaagagcattatggatcgtgagaagcggctaagtatattgtaccaaaagcagggaagggcgacccaattcgcaaacaaagctgctagagataagtggcttcaaaaggaaattgaagatctcaagcctgtacttttatcaaataaaaagcaggaaggtttacttcaagaagaaatccagaagcttaaagatgaaatcaatgatttaactaactacatcgagtctcggaaaagcgaatcaagtaagttagaggaaacacttgcgaaaagacataatgactataacgatttgaggaagcagagagatgtgcttcaagaagaaaggaagtcatattggaaggaggaatctgaggtgacagctgaacttgataggctacaagaagatcttataaaggcacagaaaagcttggaccaagcaactcctggggatatcaggagaggcctgaattctgttagcagaatcattaaggaccatggtattactggtgtttttggtcctgtattagaactggttgattgtgaagagaagttctttacagctgttgaggtcactgctgcaaatagcttgttccatgtggttgtcgagaatgatgacatatcaacaaagatcattcaaatattaactagagaaaaaggtggaagggtgacatttataccattgaacagagtgaaagttccagatctcagctgtccgcaaagtcctgattttgttccattgttgaaaaaattgaaatatcgatctgaccatcgtcgtgctttcgaacaggtttttggcaggacagtcatatgccgagatctggaaactgcgactaaagttgcacgtagcaatggtctagattgcatcacacttgatggtagggaaaaaaggtgctatgacaggaggcttctatgattctagacgctcaaaactaaagtttgtgaagataataagggataacaagacagcaattgatagaaagacgggtcatctagagagtgtcgtaaacaagctaaaagatatagataagaaaattacagatttagttaccaaacagcagcaaatggatgctgaacgtgatcatgcgaagtcagagttggaacaatttaaggctgacattgccagggctatgaagcaaagggggtcacttgagaaagcccttgtcaagaaggaaaaatcacttaacaacatctgcaaccaaattgagcaagtccagtctagcattgcaatgaagaatgatgaaatgggcacagagcttattgatcagctaacttcagaagaaagagatctcctttcacgattgaatcctgaaattactgatttgaaggagagatttctaatgtgtaaaaacagtcggattgagatcgaagcacgaaaggaagaattggagaccaatttatcaacaaatcttatcaggcgtcagaaagagctagaagcgataatttcatctgcagattctagaaccttgcctttggaagctgaggcaaaggagcaagaactgaaaagttccaagagaaaccttgatgaactaacttcattattaaaggctaatgtcgatgccataaataatttcaccagaaagatggatgatctgaaaagaaaaagggatgatctgaaggctcgtgaagctattttagagcagactgtacaagatggtgccaaagacttagaacagttgatgaacagcaggaacacttatctagccaagcaagaagagtgcacgaagaagatccgagatttgggcttgttgcctgctgatgcttttgaagcgtacaagaggaaaaacaagaaacagctacataagatactctatgactgtaatgagcagttgaagcagtttagtcatgtgaaccaaaaggctcttgaccaatatgtgaacttcacagaacaacgcgaacaactgcagagaaggcgagctgaacttgatgccggtgatgtgaaaatcatggaactcatatcggttttagaccaaaggaaggatgaatccattgagcgcacatttaaaggggttgcaaggcacttccgtgaagtgttttctgagctggtgcaaggtggtcatggatatttggttatgatgaagaaaaaggatggggatgcagttgatgatgatgaggaggaggatggacctcgtgatccaggccctgatgggagaatagaaaagtatatcggtgtgaaagtcaaggtatcatttactggcaagggagaaactcagtctatgaaacaattgtcaggcggacagaagacggtggtcgcactaacactgattttcgctatccaacgatgtgacccagctccattttatctgttcgacgagatcgatgctgctctggatccacaataccgaacagcagttggaaatatgatccgccgtctagctgacatggctgacactcagttcattgcgaccacattccggccagagattgctaaagtggctgataagatatatgccgtgagacacaagaatagggtgagcaacatcgacgtggtgtccaaggaggaggccctggacttcatcgagcgtgatcagacgtacaatgctagctgaggctgctgctgctgctgctgctgctgtgtattgattgatctgcaggcagatgctaacgcagacaggatagttcttgttgtgttatggatattctggcctattgttgtagctgtgtatatgtgtgatgcagttaggtagctattggaccagcttgtttggcgcatcaacgttgtgaatgtagcagctaccaccttggtttggtaccagctttaattaagtttgggaagcgctgattagactagacgtacgttacatgttgccccatgattgttgtatggcacgcccagcccaaaatggcagtaatcagttcatttcgacaattaacgtaagtgtaagtgtacgagtagtggtattcaaatgttttttaactgtatttttctagtacatttattttttgtacccataaatcatgttacacgtagtttcattggagggagcataaacatgttcctttgacagaaagcctaataaggctataaaacaaaaattactacacgtagtttcagcaacgcaaacaaaaaaccccgtgcctgcctaatgaattggtcattaggcatgggcttctgcttctctataaggcgactacgagctcccagctgctcagtagctagggtacatgcccatccttcctatggtgctcctgcagccgaagttgacagagcctcgaggctttctgctgccatttgccttcgtggtggatttcgcaatcctcttttccttgcccgtgaacttatcactgtctcgagctctttctttcgaccgtgccacttttgtcattgacgagagagagctttaagtcagtaccaggtcatggcaaaatcaaatggaaactaaatagtatagcaggttatctgaacacaaacaactctatttggaagatctgtgaaactagagtcataataatctggggctgtaggcattaccttagctagcctctccttaagctttggccttgcagatactaccactcttgctggttgacggtccg

SEQ ID NO: 60475 - DNA, 4823 bp, Zea Mays
caaacggccacggccacggacagtgttgccttctcctcccccttctccttctcccgtccactcagcgtgcctgactgcccgtgcgcgccctcgctcagtcgctctcgcgcgcggcgacaactgagccaccgccgacggtccaactcttcgtcggaccctttgccggcgacgagcacccaccaggggtttcatggtagcgtgacctgtctcggcctagaaaatgtatataaagaaggtcgtaatcgaagggtttaagagctacaaggaggagatatcaacagagcccttcagtcccaaagttaacgtagttgttggtgcaaatggatctggcaaatcaaatttctttcatgctatacgatttgtcctgagtgacatgtttcagaacctgcgaagtgaagataggggtgcccttctccatgaaggtgctggacactcggttgtatctgcttttgttgagatagtgtttgacaattcagacaatcgtattccagttgataaagaagaggtacgcttgcgcaggacaattgcttcaaagaaggatgaatactacttggatgggaagcatgtcagtaaaactgaagtcatgaatctgctagagagtgctggtttctctcgttctaatccatactacgttgtgcagcaaggaaagattgcatcccttaccttgatgaaagattctgaacgactggatcttctcaaagagattggtggtacacgtgtttatgaggatagacggaaggagagcttgaaaataatgaccgaaacagccaacaaaaggaagcagattgatcaagttgtccactacttagaggaaagactgagagaactcgatgaagagaaagaagaactaaagaagtaccagcagctggacaaacagagaagatcacttgagtatactatattggaccatgagcttaatgacgcaaggaatgaattagcttcgatggatgataaccgaagaaaaatttctgaaagtatgtcccttgcggacaatgaagtggtggatgtccgagagatgatcaagagttttgataaagaaataaaagtctcaactaaagggataaatgataccaaggcgcaaaaggaaggtgttgagaagaggcgtactgaagctctgaaggtagttgctaagattgaacttgatttgagagatataaaagataggattgtgaatgagaagcgagcaaaggatgaggcagcgagggatttgcagagtgtgaggagagagagtgaaaagtcaaagtctgaattggctgaaattagtaaggtgcatcaggccaaactaaaggaagaggaggatatatcgaagagcattatggatcgtgagaagcggctaagtatattgtaccaaaagcagggaagggcgacccaattcgcaaacaaagctgctagagataagtggcttcaaaaggaaattgaagatctcaagcctgtacttttatcaaataaaaagcaggaaggtttacttcaagaagaaatccagaagcttaaagatgaaatcaatgatttaactaactacatcgagtctcggaaaagcgaatcaagtaagttagaggaaacacttgcgaaaagacataatgactataacgatttgaggaagcagagagatgtgcttcaagaagaaaggaagtcatattggaaggaggaatctgaggtgacagctgaacttgataggctacaagaagatcttataaaggcacagaaaagcttggaccaagcaactcctggggatatcaggagaggcctgaattctgttagcagaatcattaaggaccatggtattactggtgtttttggtcctgtattagaactggttgattgtgaagagaagttctttacagctgttgaggtcactgctgcaaatagcttgttccatgtggttgtcgagaatgatgacatatcaacaaagatcattcaaatattaactagagaaaaaggtggaagggtgacatttataccattgaacagagtgaaagttccagatctcagctgtccgcaaagtcctgattttgttccattgttgaaaaaattgaaatatcgatctgaccatcgtcgtgctttcgaacaggtttttggcaggacagtcatatgccgagatctggaaactgcgactaaagttgcacgtagcaatggtctagattgcatcacacttgatggtgatcaggtagggaaaaaaggtgctatgacaggaggcttctatgattctagacgctcaaaactaaagtttgtgaagataataagggataacaagacagcaattgatagaaagacgggtcatctagagagtgtcgtaaacaagctaaaagatatagataagaaaattacagatttagttaccaaacagcagcaaatggatgctgaacgtgatcatgcgaagtcagagttggaacaatttaaggctgacattgccagggctatgaagcaaagggggtcacttgagaaagcccttgtcaagaaggaaaaatcacttaacaacatctgcaaccaaattgagcaagtccagtctagcattgcaatgaagaatgatgaaatgggcacagagcttattgatcagctaacttcagaagaaagagatctcctttcacgattgaatcctgaaattactgatttgaaggagagatttctaatgtgtaaaaacagtcggattgagatcgaagcacgaaaggaagaattggagaccaatttatcaacaaatcttatcaggcgtcagaaagagctagaagcgataatttcatctgcagattctagaaccttgcctttggaagctgaggcaaaggagcaagaactgaaaagttccaagagaaaccttgatgaactaacttcattattaaaggctaatgtcgatgccataaataatttcaccagaaagatggatgatctgaaaagaaaaagggatgatctgaaggctcgtgaagctattttagagcagactgtacaagatggtgccaaagacttagaacagttgatgaacagcaggaacacttatctagccaagcaagaagagtgcacgaagaagatccgagatttgggcttgttgcctgctgatgcttttgaagcgtacaagaggaaaaacaagaaacagctacataagatactctatgactgtaatgagcagttgaagcagtttagtcatgtgaaccaaaaggctcttgaccaatatgtgaacttcacagaacaacgcgaacaactgcagagaaggcgagctgaacttgatgccggtgatgtgaaaatcatggaactcatatcggttttagaccaaaggaaggatgaatccattgagcgcacatttaaaggggttgcaaggcacttccgtgaagtgttttctgagctggtgcaaggtggtcatggatatttggttatgatgaagaaaaaggatggggatgcagttgatgatgatgaggaggaggatggacctcgtgatccaggccctgatgggagaatagaaaagtatatcggtgtgaaagtcaaggtatcatttactggcaagggagaaactcagtctatgaaacaattgtcaggcggacagaagacggtggtcgcactaacactgattttcgctatccaacgatgtgacccagctccattttatctgttcgacgagatcgatgctgctctggatccacaataccgaacagcagttggaaatatgatccgccgtctagctgacatggctgacactcagttcattgcgaccacattccggccagagattgctaaagtggctgataagatatatgccgtgagacacaagaatagggtgagcaacatcgacgtggtgtccaaggaggaggccctggacttcatcgagcgtgatcagacgtacaatgctagctgaggctgctgctgctgctgctgctgctgtgtattgattgatctgcaggcagatgctaacgcagacaggatagttcttgttgtgttatggatattctggcctattgttgtagctgtgtatatgtgtgatgcagttaggtagctattggaccagcttgtttggcgcatcaacgttgtgaatgtagcagctaccaccttggtttggtaccagctttaattaagtttgggaagcgctgattagactagacgtacgttacatgttgccccatgattgttgtatggcacgcccagcccaaaatggcagtaatcagttcatttcgacaattaacgtaagtgtaagtgtacgagtagtggtattcaaatgttttttaactgtatttttctagtacatttattttttgtacccataaatcatgttacacgtagtttcattggagggagcataaacatgttcctttgacagaaagcctaataaggctataaaacaaaaattactacacgtagtttcagcaacgcaaacaaaaaaccccgtgcctgcctaatgaattggtcattaggcatgggcttctgcttctctataaggcgactacgagctcccagctgctcagtagctagggtacatgcccatccttcctatggtgctcctgcagccgaagttgacagagcctcgaggctttctgctgccatttgccttcgtggtggatttcgcaatcctcttttccttgcccgtgaacttatcactgtctcgagctctttctttcgaccgtgccacttttgtcattgacgagagagagctttaagtcagtaccaggtcatggcaaaatcaaatggaaactaaatagtatagcaggttatctgaacacaaacaactctatttggaagatctgtgaaactagagtcataataatctggggctgtaggcattaccttagctagcctctccttaagctttggccttgcagatactaccactcttgctggttgacggtccg

SEQ ID NO: 60476 - DNA, 2229 bp, Zea Mays
ggaatggatcttgctacttctgaattctttatgaaggacaagacttatgatcttaatctccatgagccagtgataagaagaagggtggggagtgctgggcgcttctgtctcctcttcttcccccgcctcggagcgccagcggcttcatccgatctccttctcacctcctcacctcaggcgcacaccgatcactctcttccctcctccagcagtccagctcacacccaccgccccaccccttccactcaaatccagggacatcgcagatccaccggctctccgatccgctcgcctccgcacccgcccgatcggatcccgcagtgttgatggaacactgaattgtggatattcaagttttagaggaagaagggcaagcatggaagatttctatgatataaaagcatctaaaattgatgataaacaaataaatctcttcggaatttttgatggtcatggtggttcacgtgctgctgagtatttgaaggagcacttgtttgagaacctcatgaaacatccggagttcatgacaaatacaaaattagcattaagtgaaacatatagaaagaccgattcagagtttttggatgctgaaaggaatactcatagagatgatgggtcaacggcatcgacagcagtgatggttgctgatcatctttacgtggcaaatgttggagactcgagggctgttatatcaaaggctggcaaagctattgcgctctctgaagatcacaagccaaacagaagtgatgagaggaatcgaattgagagtgctggtgggatagttatgtgggcaggaacttggagggtaggtggtgtacttgcgatgtctcgggcatttggcaaccgtctcttaaaacaatttgttattgcagaccctgaaattcaggaacaagaaataaatgaggagttggagtttctaattatagctagtgatgggctgtgggatgtggtttcgaatgaggacgctgttacacttgtgaaaatggaggaggaaccagaggctgcagctcggaagctgacagagaccgcgttctctcgcgggagcggcgataacatcacgtgcatcgtggtgaagttccagcatgacaagccgcgcagtggcggtggcgattccccttcctcgcctcgtctctaggcgacaggagttgattccatttgtttttggttatacgtgttgtcggggtcctttttaccttgagccggattttgctggcccccgaggctgatacttgagaaaaggagtcggttcatgttcattgcctgtcttgtctatatatgcccccctccctaattttgcttctccggtggcagtgctgcccattggcatgcacatcgtcggcattgtcgtagacttgtagtttgctgttgtatcagtgagagagagagttaattctgtgaggtgttcattttgagatgtcactggaccgatcttcagtccagctagatccgtaagatgtgcagtgcataatctcgtagaggtgatgatattcgtcagaagaatcagtgagagattaccgtgtcacattactgtgtttttctaatgtaatgggtgtactgtttctatatatgtgtgtatatagtctctaccttaatcagggttagggtttaggggccggccgatgccagctcacacagacacaggccgactgtagaggatctgattccatcttgctacactccgttccgcttagacatagaaaccctcccctcctatagcaagcaagcaataaagatgatctgccatttaccagcgatcattgcaagagcatttcccatccgtaaaatggtgaaaccgatcggcgtctcgaagaatgatttggcgtccgcatagagcagatatgtgcttggccacctcatggcagtcactgcacatcctggtgttcttgatcaccctgatgggcgtcccgctcgcatctgagtggatcagcccataagtgatagctagcttctcggtgtggctgagcagcagcttctccttgtcttcttcggggacgttatacgctatgcagctagtgtccgccacataccctgccttccttatctgaagaaccagacgaaccagttgttggtatatctccgcggtgtctgggtgtggtggcttcccctcgacttggaacacatggatgctttgctcgatctgtatccagctccacccaggtcgagtgttcagcgctctcgctttcattgcatacttgaggctctcggcttcatcgaacatctgttcacgct

SEQ ID NO: 60477 - DNA, 2026 bp, Zea Mays
cttgtcaatccaagatcctggaccacttatgccaaaaccatttatgccaaactcagtgatgaaattggacaagtgtagattgtagaagatgatcttctcgttaattgatgccaccacgtgttgatggaacactgaattgtggatattcaagttttagaggaagaagggcaagcatggaagatttctatgatataaaagcatctaaaattgatgataaacaaataaatctcttcggaatttttgatggtcatggtggttcacgtgctgctgagtatttgaaggagcacttgtttgagaacctcatgaaacatccggagttcatgacaaatacaaaattagcattaagtgaaacatatagaaagaccgattcagagtttttggatgctgaaaggaatactcatagagatgatgggtcaacggcatcgacagcagtgatggttgctgatcatctttacgtggcaaatgttggagactcgagggctgttatatcaaaggctggcaaagctattgcgctctctgaagatcacaagccaaacagaagtgatgagaggaatcgaattgagagtgctggtgggatagttatgtgggcaggaacttggagggtaggtggtgtacttgcgatgtctcgggcatttggcaaccgtctcttaaaacaatttgttattgcagaccctgaaattcaggaacaagaaataaatgaggagttggagtttctaattatagctagtgatgggctgtgggatgtggtttcgaatgaggacgctgttacacttgtgaaaatggaggaggaaccagaggctgcagctcggaagctgacagagaccgcgttctctcgcgggagcggcgataacatcacgtgcatcgtggtgaagttccagcatgacaagccgcgcagtggcggtggcgattccccttcctcgcctcgtctctaggcgacaggagttgattccatttgtttttggttatacgtgttgtcggggtcctttttaccttgagccggattttgctggcccccgaggctgatacttgagaaaaggagtcggttcatgttcattgcctgtcttgtctatatatgcccccctccctaattttgcttctccggtggcagtgctgcccattggcatgcacatcgtcggcattgtcgtagacttgtagtttgctgttgtatcagtgagagagagagttaattctgtgaggtgttcattttgagatgtcactggaccgatcttcagtccagctagatccgtaagatgtgcagtgcataatctcgtagaggtgatgatattcgtcagaagaatcagtgagagattaccgtgtcacattactgtgtttttctaatgtaatgggtgtactgtttctatatatgtgtgtatatagtctctaccttaatcagggttagggtttaggggccggccgatgccagctcacacagacacaggccgactgtagaggatctgattccatcttgctacactccgttccgcttagacatagaaaccctcccctcctatagcaagcaagcaataaagatgatctgccatttaccagcgatcattgcaagagcatttcccatccgtaaaatggtgaaaccgatcggcgtctcgaagaatgatttggcgtccgcatagagcagatatgtgcttggccacctcatggcagtcactgcacatcctggtgttcttgatcaccctgatgggcgtcccgctcgcatctgagtggatcagcccataagtgatagctagcttctcggtgtggctgagcagcagcttctccttgtcttcttcggggacgttatacgctatgcagctagtgtccgccacataccctgccttccttatctgaagaaccagacgaaccagttgttggtatatctccgcggtgtctgggtgtggtggcttcccctcgacttggaacacatggatgctttgctcgatctgtatccagctccacccaggtcgagtgttcagcgctctcgctttcattgcatacttgaggctctcggcttcatcgaacatctgttcacgct

SEQ ID NO: 60478 - DNA, 2791 bp, Zea Mays
ctgggcgcttctgtctcctcttcttcccccgcctcggagcgccagcggcttcatccgatctccttctcacctcctcacctcaggcgcacaccgatcactctcttccctcctccagcagtccagctcacacccaccgccccaccccttccactcaaatccagggacatcgcagatccaccggctctccgatccgctcgcctccgcacccgcccgatcggatcccgcaggaccaggagaccgtggcggcgagcactgcatcggcggcatcggtggtggcggtgtcggaggcgtctcccgcgccggtggtggtggtggtcagtgcgaggccctcggcgaggccgccgcacgacaagcgcctcggcgtgcgccaccccttgaagcaccgctggtttcgtgctggtgggaagatgatgatggagcccggaggggtgctgcctgctcacgcgcatgaggaggaggaggagggagccagcgaggtggaagaggaggagttagtggaggcggaggcctcgtccgcggagacggtgacgtggggcgctgaagtggaggtgtcgtccgcgccggcggcaggggtgcaggagatgaacgcggaggtggagggtggcgaaatggaggtgtcgcctgagcctgcggtcgctgtggggggcaccgagttggagccccagcaggacgacgaggacgaggtctcgtccgtcgtgttggcgcgaggggagaggaagcaggaggcggctcctgcttctgcggtgctagctgtggaggcgcccatggaaatgggtcaggatgaggagagggcggagaaggagaagaggggcaaggagagggaaaggcagaaggagcgggagagggtggatgaggtcggctacatgagcggaggatggaagagtgttgatggaacactgaattgtggatattcaagttttagaggaagaagggcaagcatggaagatttctatgatataaaagcatctaaaattgatgataaacaaataaatctcttcggaatttttgatggtcatggtggttcacgtgctgctgagtatttgaaggagcacttgtttgagaacctcatgaaacatccggagttcatgacaaatacaaaattagcattaagtgaaacatatagaaagaccgattcagagtttttggatgctgaaaggaatactcatagagatgatgggtcaacggcatcgacagcagtgatggttgctgatcatctttacgtggcaaatgttggagactcgagggctgttatatcaaaggctggcaaagctattgcgctctctgaagatcacaagccaaacagaagtgatgagaggaatcgaattgagagtgctggtgggatagttatgtgggcaggaacttggagggtaggtggtgtacttgcgatgtctcgggcatttggcaaccgtctcttaaaacaatttgttattgcagaccctgaaattcaggaacaagaaataaatgaggagttggagtttctaattatagctagtgatgggctgtgggatgtggtttcgaatgaggacgctgttacacttgtgaaaatggaggaggaaccagaggctgcagctcggaagctgacagagaccgcgttctctcgcgggagcggcgataacatcacgtgcatcgtggtgaagttccagcatgacaagccgcgcagtggcggtggcgattccccttcctcgcctcgtctctaggcgacaggagttgattccatttgtttttggttatacgtgttgtcggggtcctttttaccttgagccggattttgctggcccccgaggctgatacttgagaaaaggagtcggttcatgttcattgcctgtcttgtctatatatgcccccctccctaattttgcttctccggtggcagtgctgcccattggcatgcacatcgtcggcattgtcgtagacttgtagtttgctgttgtatcagtgagagagagagttaattctgtgaggtgttcattttgagatgtcactggaccgatcttcagtccagctagatccgtaagatgtgcagtgcataatctcgtagaggtgatgatattcgtcagaagaatcagtgagagattaccgtgtcacattactgtgtttttctaatgtaatgggtgtactgtttctatatatgtgtgtatatagtctctaccttaatcagggttagggtttaggggccggccgatgccagctcacacagacacaggccgactgtagaggatctgattccatcttgctacactccgttccgcttagacatagaaaccctcccctcctatagcaagcaagcaataaagatgatctgccatttaccagcgatcattgcaagagcatttcccatccgtaaaatggtgaaaccgatcggcgtctcgaagaatgatttggcgtccgcatagagcagatatgtgcttggccacctcatggcagtcactgcacatcctggtgttcttgatcaccctgatgggcgtcccgctcgcatctgagtggatcagcccataagtgatagctagcttctcggtgtggctgagcagcagcttctccttgtcttcttcggggacgttatacgctatgcagctagtgtccgccacataccctgccttccttatctgaagaaccagacgaaccagttgttggtatatctccgcggtgtctgggtgtggtggcttcccctcgacttggaacacatggatgctttgctcgatctgtatccagctccacccaggtcgagtgttcagcgctctcgctttcattgcatacttgaggctctcggcttcatcgaacatctgttcacgct

SEQ ID NO: 60479 - DNA, 2110 bp, Zea Mays
gtctcctcttcttcccccgcctcggagcgccagcggcttcatccgatctccttctcacctcctcacctcaggcgcacaccgatcactctcttccctcctccagcagtccagctcacacccaccgccccaccccttccactcaaatccagggacatcgcagatccaccggctctccgatccgctcgcctccgcacccgcccgatcggatcccgcagtgttgatggaacactgaattgtggatattcaagttttagaggaagaagggcaagcatggaagatttctatgatataaaagcatctaaaattgatgataaacaaataaatctcttcggaatttttgatggtcatggtggttcacgtgctgctgagtatttgaaggagcacttgtttgagaacctcatgaaacatccggagttcatgacaaatacaaaattagcattaaaaagaccgattcagagtttttggatgctgaaaggaatactcatagagatgatgggtcaacggcatcgacagcagtgatggttgctgatcatctttacgtggcaaatgttggagactcgagggctgttatatcaaaggctggcaaagctattgcgctctctgaagatcacaagccaaacagaagtgatgagaggaatcgaattgagagtgctggtgggatagttatgtgggcaggaacttggagggtaggtggtgtacttgcgatgtctcgggcatttggcaaccgtctcttaaaacaatttgttattgcagaccctgaaattcaggaacaagaaataaatgaggagttggagtttctaattatagctagtgatgggctgtgggatgtggtttcgaatgaggacgctgttacacttgtgaaaatggaggaggaaccagaggctgcagctcggaagctgacagagaccgcgttctctcgcgggagcggcgataacatcacgtgcatcgtggtgaagttccagcatgacaagccgcgcagtggcggtggcgattccccttcctcgcctcgtctctaggcgacaggagttgattccatttgtttttggttatacgtgttgtcggggtcctttttaccttgagccggattttgctggcccccgaggctgatacttgagaaaaggagtcggttcatgttcattgcctgtcttgtctatatatgcccccctccctaattttgcttctccggtggcagtgctgcccattggcatgcacatcgtcggcattgtcgtagacttgtagtttgctgttgtatcagtgagagagagagttaattctgtgaggtgttcattttgagatgtcactggaccgatcttcagtccagctagatccgtaagatgtgcagtgcataatctcgtagaggtgatgatattcgtcagaagaatcagtgagagattaccgtgtcacattactgtgtttttctaatgtaatgggtgtactgtttctatatatgtgtgtatatagtctctaccttaatcagggttagggtttaggggccggccgatgccagctcacacagacacaggccgactgtagaggatctgattccatcttgctacactccgttccgcttagacatagaaaccctcccctcctatagcaagcaagcaataaagatgatctgccatttaccagcgatcattgcaagagcatttcccatccgtaaaatggtgaaaccgatcggcgtctcgaagaatgatttggcgtccgcatagagcagatatgtgcttggccacctcatggcagtcactgcacatcctggtgttcttgatcaccctgatgggcgtcccgctcgcatctgagtggatcagcccataagtgatagctagcttctcggtgtggctgagcagcagcttctccttgtcttcttcggggacgttatacgctatgcagctagtgtccgccacataccctgccttccttatctgaagaaccagacgaaccagttgttggtatatctccgcggtgtctgggtgtggtggcttcccctcgacttggaacacatggatgctttgctcgatctgtatccagctccacccaggtcgagtgttcagcgctctcgctttcattgcatacttgaggctctcggcttcatcgaacatctgttcacgct

SEQ ID NO: 60480 - DNA, 2785 bp, Zea Mays
gtctcctcttcttcccccgcctcggagcgccagcggcttcatccgatctccttctcacctcctcacctcaggcgcacaccgatcactctcttccctcctccagcagtccagctcacacccaccgccccaccccttccactcaaatccagggacatcgcagatccaccggctctccgatccgctcgcctccgcacccgcccgatcggatcccgcaggaccaggaccaggagaccgtggcggcgagcactgcatcggcggcatcggtggtggcggtgtcggaggcgtctcccgcgccggtggtggtggtggtcagtgcgaggccctcggcgaggccgccgcacgacaagcgcctcggcgtgcgccaccccttgaagcaccgctggtttcgtgctggtgggaagatgatgatggagcccggaggggtgctgcctgctcacgcgcatgaggaggaggaggagggagccagcgaggtggaagaggaggagttagtggaggcggaggcctcgtccgcggagacggtgacgtggggcgctgaagtggaggtgtcgtccgcgccggcggcaggggtgcaggagatgaacgcggaggtggagggtggcgaaatggaggtgtcgcctgagcctgcggtcgctgtggggggcaccgagttggagccccagcaggacgacgaggacgaggtctcgtccgtcgtgttggcgcgaggggagaggaagcaggaggcggctcctgcttctgcggtgctagctgtggaggcgcccatggaaatgggtcaggatgaggagagggcggagaaggagaagaggggcaaggagagggaaaggcagaaggagcgggagagggtggatgaggtcggctacatgagcggaggatggaagagtgttgatggaacactgaattgtggatattcaagttttagaggaagaagggcaagcatggaagatttctatgatataaaagcatctaaaattgatgataaacaaataaatctcttcggaatttttgatggtcatggtggttcacgtgctgctgagtatttgaaggagcacttgtttgagaacctcatgaaacatccggagttcatgacaaatacaaaattagcattaagtgaaacatatagaaagaccgattcagagtttttggatgctgaaaggaatactcatagagatgatgggtcaacggcatcgacagcagtgatggttgctgatcatctttacgtggcaaatgttggagactcgagggctgttatatcaaaggctggcaaagctattgcgctctctgaagatcacaagccaaacagaagtgatgagaggaatcgaattgagagtgctggtgggatagttatgtgggcaggaacttggagggtaggtggtgtacttgcgatgtctcgggcatttggcaaccgtctcttaaaacaatttgttattgcagaccctgaaattcaggaacaagaaataaatgaggagttggagtttctaattatagctagtgatgggctgtgggatgtggtttcgaatgaggacgctgttacacttgtgaaaatggaggaggaaccagaggctgcagctcggaagctgacagagaccgcgttctctcgcgggagcggcgataacatcacgtgcatcgtggtgaagttccagcatgacaagccgcgcagtggcggtggcgattccccttcctcgcctcgtctctaggcgacaggagttgattccatttgtttttggttatacgtgttgtcggggtcctttttaccttgagccggattttgctggcccccgaggctgatacttgagaaaaggagtcggttcatgttcattgcctgtcttgtctatatatgcccccctccctaattttgcttctccggtggcagtgctgcccattggcatgcacatcgtcggcattgtcgtagacttgtagtttgctgttgtatcagtgagagagagagttaattctgtgaggtgttcattttgagatgtcactggaccgatcttcagtccagctagatccgtaagatgtgcagtgcataatctcgtagaggtgatgatattcgtcagaagaatcagtgagagattaccgtgtcacattactgtgtttttctaatgtaatgggtgtactgtttctatatatgtgtgtatatagtctctaccttaatcagggttagggtttaggggccggccgatgccagctcacacagacacaggccgactgtagaggatctgattccatcttgctacactccgttccgcttagacatagaaaccctcccctcctatagcaagcaagcaataaagatgatctgccatttaccagcgatcattgcaagagcatttcccatccgtaaaatggtgaaaccgatcggcgtctcgaagaatgatttggcgtccgcatagagcagatatgtgcttggccacctcatggcagtcactgcacatcctggtgttcttgatcaccctgatgggcgtcccgctcgcatctgagtggatcagcccataagtgatagctagcttctcggtgtggctgagcagcagcttctccttgtcttcttcggggacgttatacgctatgcagctagtgtccgccacataccctgccttccttatctgaagaaccagacgaaccagttgttggtatatctccgcggtgtctgggtgtggtggcttcccctcgacttggaacacatggatgctttgctcgatctgtatccagctccacccaggtcgagtgttcagcgctctcgctttcattgcatacttgaggctctcggcttcatcgaacatctgttcacgct

SEQ ID NO: 60481 - DNA, 1037 bp, Zea Mays
tctccctgctgcctttgctcgctgtcatggaaacgacgtcatgcttcctggcctccaaagcatcgtccgccagcaggagcaccgcggtgctgccgcccaccgcccccggcttcgcaaagcctaagccttatctgcagctccttggtagcagccgccgccgtgcctgctgcggcagcatcagcgcgcggggggcgccggaggacggcgccgcgccaccacccatcggtcccgactggcgctcgttccgtgcgcagctctacttcaaagagcagctgccagcggtacagaccggcggcgacaggtgggcgcaccctctagcggagcccgagaaggggtgtctcttgatcgccacggagaagctggacggctcgcacatcttcgagcgcacggtgatcctgctgctgtcgtcgccgtcgtcgctgggccccgtcggcgtgatcctgaaccgcccctcgctcatgtcgatcaaagaggcgtcagggtccatcttcgcggacgacgccgacatcgcgcgcgccttcgcgggccggccactcttcttcggcgggccgctggaggagtgcttcttcgtcatagggccccgagcggcggccggaggcggaggcgacgacgcggtggcgcggacggggctgttcgaggaggtgatgcccggcctccactacggcacgcgggagacggtcgggtgcgcggcggagctggccaagcgcggcgtggtgggcgtccgggacttccgcttcttcgacggcttctgcgggtgggagcgcgagcagctgcgcgacgaggtgcgcgcggggctctggcatgtcgcggcctgcagcgccgccgtgctggagctcgccaccgtcgtcaagggcgggctctgggaggaggtgcaggggctcgtcggggagaggaggctctggtgacgacctcactctcactgctgccgtggggcgttcaatcttcaatcgcccgcctccctacggcgagctccaccacggcgagctccaccgacgttggtcggctccatacgatcgcggaggtgcttgccatcctcg

SEQ ID NO: 60482 - DNA, 913 bp, Zea Mays
ctctgctgctcaggccgggggcttgtcgtggaggggccatgccgcgagccccaaatgcgagaggcggcggccgcagcaccaacagcacatgggcaggcaactaaggcagaggcacggccacggccataggaggggttacttttactgccgcgctgcggattcgtcgcccaagtaccacccagggcagtcttgccggaagatcaagaggaaggagctgagatctcagacagaagaagaggagggcaacacagaagaagtggagggcaacgacaatgcagtggagaacacggaggatggacaggagagatcagattgtactgtttgcactgatctaccggctgatgttgatggcgaggtgaaccaagatgggcatggctcttctagtaatggaagagtggagggtcgtgatgatcttgccatggtatatcagaaggatggggagatggagagggtactcgagaagcaggctgagctaattggacagttcaaggctcaagaaaatgctcagagggagtgggaggagaaattcagcctgaggcgtgattcagttatggataatgttaacttattaaacaacaagctaaatcaggctgaaaatgcttgtgagaggagggaaactgctcgggagagcgaggcagagaggaggagcagagaggaggagatataaaagaaaacgagcgagagacataaaagaaaacgaagttgagctgtcatgatgtccagagagcagaggagagtagctgttttagtttatgggtaaaacagtccaatcagttgatattttgtcaaataaccccctaaatggtattttatcagtaagtcaatgtttgagaatgacgtaataacgaagcatgttctcataatagcattcgagcgaatccttagtttgataatggcagaattccaattttct

SEQ ID NO: 60483 - DNA, 803 bp, Zea Mays
gccgcgagccccaaatgcgagaggcggcggccgcagcaccaacagcacatgggcaggcaactaaggcagaggcacggccacggccataggaggggttacttttactgccgcgctgcggattcgtcgcccaagtaccacccagggcagtcttgccggaagatcaagaggaaggagctgaggtccgagcaagaagtggagggcaacgacaatgcagtggagaacacggaggatggacaggagagatcagattgtactgtttgcactgatctaccggctgatgttgatggcgaggtgaaccaagatgggcatggctcttctagtaatggaagagtggagggtcgtgatgatcttgccatggtatatcagaaggatggggagatggagagggtactcgagaagcaggctgagctaattggacagttcaaggctcaagaaaatgctcagagggagtgggaggagaaattcagcctgaggcgtgattcagttatggataatgttaacttattaaacaacaagctaaatcaggctgaaaatgcttcagagaggaggagatataaaagaaaacgagcgagagacataaaagaaaacgaagttgagctgtcatgatgtccagagagcagaggagagtagctgttttagtttatgggtaaaacagtccaatcagttgatattttgtcaaataaccccctaaatggtattttatcagtaagtcaatgtttgagaatgacgtaataacgaagcatgttctcataatagcattcgagcgaatccttagtttgataatggcagaattccaattttct

SEQ ID NO: 60484 - DNA, 1709 bp, Zea Mays
ccgtgaccccgctggcgtgcacacgtactagcgttttccggcgctaaagcagggagggctaatcgcgtccgtgatcaaacccccgccccagcagttgctttttattcacccgcctcccccttgtcgctcctccacaccgcacacgcacgcacgaacgcgctcccaccccctcccgccgccaccgccgccaaaaccccggcccgacttggcgtcctccgccaacctcctcctgggcagcgcgggcggggggatatggcatcggaggacgtggtgggcaagagcaggggcgacacggccgtcaccaccatcgtcaacctggcggaggaggccaagctcgcgcgcgagggcgtcaaggcgcccggccaccagatcctcaccatctgcaagtcgctcgtcgccggcggcgtagcaggcggagtgtctcgtactgctgttgctccacttgaacgattgaaaatattgcttcaggttcaaaatccgcacagcatcaagtacaatggtactgttcagggtctcaagtatatctggagaacagagggcctccgtggacttttcaagggcaatggtaccaattgtgcaaggattgttccaaattctgccgtgaagttttttagctacgagcaggcgtcaaagggaattctgtgggcctaccgtcaacagactggtgaagaggatgctcagcttactccgctcttgcgccttggagctggagcatgtgctggtatcatagctatgtctgctacttacccgatggatatggttaggggaaggatcactgttcagacaaatctccctaccagtaccgtggtatgtttcatgcactgggtacagtctaccgtgaagaaggctttcgtgctctatacaaagggtggcttccatctgtaatcggagttgttccatatgttggtctcaacttcgctgtatatgagtccctcaaagactggctactccagacaaattcatttggccttgcaaatgacaacgagctgcacgtagttacaaggcttgggtgtggagctgtggcgggaaccattgggcagactgttgcataccctcttgatgtcatcaggagaagaatgcagatggttggttggagccatgctgactctattgttactgggcaaggcaaagaagcactccagtacaatggcatgatcgatgcattcaggaagactgttcgtcatgaaggcgttggtgctctgtacaagggtcttgtgccgaactcagtcaaggtggtgccctcaattgccattgcatttgtgacttacgaggttgtgaaggatgtgctaggagtagagatgaggatatcagactgaggatggtcgttttcaactgctatttttgtaggctttgggaagttgtgttttttttttgtaggcagggcgggtagaagggtatgaccgcggctccattcagcatcaggccctctcagcccatgttggatatatatcatatatcctgccactggcttcagtcaggtcctagaattgttgctgggtcgtgcaaaaagtaataagtcggctgtaaagcttattaagcatctgcctaactcatcaaaagaaatctattccttattgatgatgtaccgagattttcgaacttaaagcggtactacgtgctgctaacagttgattaatgatttttctttgttgctggtgatttttcaacaaaaatataaataaattaaaaaaacaatagataaaagaaac

SEQ ID NO: 60485 - DNA, 1123 bp, Zea Mays
gggagatcccccctctcgacatggtgcgacagaggttcaagagttttctcgacctgcgtggggtggtcttgcccccatagaggatgctcagcttactccgctcttgcgccttggagctggagcatgtgctggtatcatagctatgtctgctacttacccgatggatatggttaggggaaggatcactgttcagacagacaaatctccctaccagtaccgtggtatgtttcatgcactgggtacagtctaccgtgaagaaggctttcgtgctctatacaaagggtggcttccatctgtaatcggagttgttccatatgttggtctcaacttcgctgtatatgagtccctcaaagactggctactccagacaaattcatttggccttgcaaatgacaacgagctgcacgtagttacaaggcttgggtgtggagctgtggcgggaaccattgggcagactgttgcataccctcttgatgtcatcaggagaagaatgcagatggttggttggagccatgctgactctattgttactgggcaaggcaaagaagcactccagtacaatggcatgatcgatgcattcaggaagactgttcgtcatgaaggcgttggtgctctgtacaagggtcttgtgccgaactcagtcaaggtggtgccctcaattgccattgcatttgtgacttacgaggttgtgaaggatgtgctaggagtagagatgaggatatcagactgaggatggtcgttttcaactgctatttttgtaggctttgggaagttgtgttttttttttgtaggcagggcgggtagaagggtatgaccgcggctccattcagcatcaggccctctcagcccatgttggatatatatcatatatcctgccactggcttcagtcaggtcctagaattgttgctgggtcgtgcaaaaagtaataagtcggctgtaaagcttattaagcatctgcctaactcatcaaaagaaatctattccttattgatgatgtaccgagattttcgaacttaaagcggtactacgtgctgctaacagttgattaatgatttttctttgttgctggtgatttttcaacaaaaatataaataaattaaaaaaacaatagataaaagaaac

SEQ ID NO: 60486 - DNA, 672 bp, Zea Mays
caaaatcctatttccctctcccacaccacgcgccgcgcctgtctgattctgcccgccagccacgcccgcagatctcgcttcggcgccctgattccgtcgtatgcaagtttacctctgcgcgtccctgctaaccgttccacatagtatcacaaaaaaatggcactaccttggcatcgtcttccccaattcgggtgtatggaattcttggagcaaaggaccagcacacggtcacctccaaagaaagacccaggctgcttctacaaggagctgtacaaagattttggatgagatgatggataatggttttccactcacaactgagccaaacatcttgaaagagatgatcaccccacctaatattgtgaacaaaatgttgaatgttgttactggcaagagttctacccttggcagcaaacttccagatgcagctgcttcttttgtaccttggcgaagaacaacagtcaaggatgcaagcaatgaagtctatgttaacatagtcgaggaacttgatgcatatgtgaacagagagggggttcttgtgaaatgcgaagcatacggtgaagtccaagtaaactgcagcctcccaggatgaccacatgtaagcaataggtgctgctaccagcaaaaaggagactgcagcagcagggaagggaagcaaacgatcaacctcgc

SEQ ID NO: 60487 - DNA, 1875 bp, Zea Mays
caaaatcctatttccctctcccacaccacgcgccgcgcctgtctgattctgcccgccagccacgcccgcagatctcgcttcggcgccctgattccgtcgtatgcaaggtcacagccctgccttccatcgtcgcccccatgccatggtccccttctatcctcgctcacttccagccgccaacggaaccccccgcgtacgtttggcagaaactgtagagaccgtcgaagacgggggcagtcctcgccgacgctgaagtgcttgagcgcgcggatctgatcctgctgcgtttcgggggtgacggaccggaggaaggagacgtaatcgtcggcgtggaagcggcagaggtcgcggtcgcgggcaggtttacctctgcgcgtccctgctaaccgttccacatagtatcacaaaaaaatggcactaccttggcatcgtcttccccaattcgggtgtatggaattcttggagcaaaggaccagcacacggtcacctccaaagaaagacccaggctgcttctacaaggagctgtacaaagtgcttcacgactgcagattttggatgagatgatggataatggttttccactcacaactgagccaaacatcttgaaagagatgatcaccccacctaatattgtgaacaaaatgttgaatgttgttactggcaagagttctacccttggcagcaaacttccagatgcagctgcttcttttgtaccttggcgaagaacaacagtcaaggatgcaagcaatgaagtctatgttaacatagtcgaggaacttgatgcatatgtgaacagagagggggttcttgtgaaatgcgaagcatacggtgaagtccaagtaaactgcagcctcccaggatgaccacatgtaagcaataggtgctgctaccagcaaaaaggaagccagaggccttgctgctggaccaagattagtccaaaggttatctggttttggggaccatcgatctgcagacaatgtggcaagagtggtagaggaggagcttgcacatgcctctatggtttgtattgatttctcaaagaatgccaagtgatgggtcgtgaaccaagcaatactttccaagacttgataaaggagtacgaagttgtactgaagggtccattcaactacacggctcgtgatgaagctggtataccccgagaatggttcatgatagattagcttgtattgttgagatggaaaaagagaatgcaagtttgggataagcagttgaagtctcatcctccaaagaacgttgaatcagaaatcttgtgtgagcatatcaagaaagagagggagacagcaaaggctggaaaacgaccatactatctgaagaaacctgaacttcgcgaaaggaagctaatgaacaagtacaacgagctcaaggaggcaggaaagcttgatgcattcatggaaaagcggcggaggaagaatgcctccaaagatcatcggttcatgccgtaccgacgcagtggagatgcataatagtttcctgattctggagacgagcgaaaggatgattttaggacggtgttctcatggtggctgggacactggacagtcagtgtctctgttactttgttgccctagccgtacaatcgtcagctccgtgcacaatctctactacttcttaagaatagagtgcaggcgtccacagtggttttttatgtttctcatttcactctctgcattttcagttacaactacactgcatatgctggcagatttgttcatatattactccagctgacattttcactatcgcaacagcatctctactactatttgtttttttgcatataaatgtattttaacatattgattctgtagcaacgcacgggcatattcctagtatataattatccatctaatcaac

SEQ ID NO: 60488 - DNA, 1620 bp, Zea Mays
caaaatcctatttccctctcccacaccacgcgccgcgcctgtctgattctgcccgccagccacgcccgcagatctcgcttcggcgccctgattccgtcgtatgcaagtttacctctgcgcgtccctgctaaccgttccacatagtatcacaaaaaaatggcactaccttggcatcgtcttccccaattcgggtgtatggaattcttggagcaaaggaccagcacacggtcacctccaaagaaagacccaggctgcttctacaaggagctgtacaaagtgcttcacgactgcagattttggatgagatgatggataatggttttccactcacaactgagccaaacatcttgaaagagatgatcaccccacctaatattgtgaacaaaatgttgaatgttgttactggcaagagttctacccttggcagcaaacttccagatgcagctgcttcttttgtaccttggcgaagaacaacagtcaaggatgcaagcaatgaagtctatgttaacatagtcgaggaacttgatgcatatgtgaacagagagggggttcttgtgaaatgcgaagcatacggtgaagtccaagtaaactgcagcctcccaggatgaccacatgtaagcaataggtgctgctaccagcaaaaaggaagccagaggccttgctgctggaccaagattagtccaaaggttatctggttttggggaccatcgatctgcagacaatgtggcaagagtggtagaggaggagcttgcacatgcctctatggtttgtattgatttctcaaagaatgccaagtgatgggtcgtgaaccaagcaatactttccaagacttgataaaggagtacgaagttgtactgaagggtccattcaactacacggctcgtgatgaagctggtataccccgagaatggttcatgatagattagcttgtattgttgagatggaaaaagagaatgcaagtttgggataagcagttgaagtctcatcctccaaagaacgttgaatcagaaatcttgtgtgagcatatcaagaaagagagggagacagcaaaggctggaaaacgaccatactatctgaagaaacctgaacttcgcgaaaggaagctaatgaacaagtacaacgagctcaaggaggcaggaaagcttgatgcattcatggaaaagcggcggaggaagaatgcctccaaagatcatcggttcatgccgtaccgacgcagtggagatgcataatagtttcctgattctggagacgagcgaaaggatgattttaggacggtgttctcatggtggctgggacactggacagtcagtgtctctgttactttgttgccctagccgtacaatcgtcagctccgtgcacaatctctactacttcttaagaatagagtgcaggcgtccacagtggttttttatgtttctcatttcactctctgcattttcagttacaactacactgcatatgctggcagatttgttcatatattactccagctgacattttcactatcgcaacagcatctctactactatttgtttttttgcatataaatgtattttaacatattgattctgtagcaacgcacgggcatattcctagtatataattatccatctaatcaac

SEQ ID NO: 60489 - DNA, 2420 bp, Zea Mays
caaaatcctatttccctctcccacaccacgcgccgcgcctgtctgattctgcccgccagccacgcccgcagatctcgcttcggcgccctgattccgtcgtatgcaaggtcacagccctgccttccatcgtcgcccccatgccatggtccccttctatcctcgctcacttccagccgccaacggaaccccccgcgtacgtttggcagaaactgtagagaccgtcgaagacgggggcagtcctcgccgacgctgaagtgcttgagcgcgcggatctgatcctgctgcgtttcgggggtgacggaccggaggaaggagacgtaatcgtcggcgtggaagcggcagaggtcgcggtcgcgggcagggtgagggcggaacacttgcatctggtcgaggaggccgtagcggccgagcagcgcgtgggtcatgcggatgcggtgcggcttcatcgggtggcaatgctcgtagtagcagttgcccacctccacgtcgtagaagtagcagacgcggcgcttcgacccgtccgcgccagtggtcggtagggagttgccgccaccgcacagcacgacagagggtgtgtcagtcggggcgcgagcaccaactttgcatccattaactgctctgctcagagcatcaggtgcgcttcagcgtctagccatttggcggcttgggctttctgcggttgggaggaacggagtcttaagattagcgctgtcggtgtcgtccttgaggtggacgtcaacggcgaggagctctttttcgttgataagtttacctctgcgcgtccctgctaaccgttccacatagtatcacaaaaaaatggcactaccttggcatcgtcttccccaattcgggtgtatggaattcttggagcaaaggaccagcacacggtcacctccaaagaaagacccaggctgcttctacaaggagctgtacaaagtgcttcacgactgcagattttggatgagatgatggataatggttttccactcacaactgagccaaacatcttgaaagagatgatcaccccacctaatattgtgaacaaaatgttgaatgttgttactggcaagagttctacccttggcagcaaacttccagatgcagctgcttcttttgtaccttggcgaagaacaacagtcaaggatgcaagcaatgaagtctatgttaacatagtcgaggaacttgatgcatatgtgaacagagagggggttcttgtgaaatgcgaagcatacggtgaagtccaagtaaactgcagcctcccaggatgaccacatgtaagcaataggtgctgctaccagcaaaaagggggactggataagcacaagtgaggtagaatttcaaggttctcattatactttattttttcctggtacacaatggtgaaaaagcagggccagtcctagagttccctatgggttaaatatcttgtgtagtcatttgttcaggaagccagaggccttgctgctggaccaagattagtccaaaggttatctggttttggggaccatcgatctgcagacaatgtggcaagagtggtagaggaggagcttgcacatgcctctatggtttgtattgatttctcaaagaatgccaagtgatgggtcgtgaaccaagcaatactttccaagacttgataaaggagtacgaagttgtactgaagggtccattcaactacacggctcgtgatgaagctggtataccccgagaatggttcatgatagattagcttgtattgttgagatggaaaaagagaatgcaagtttgggataagcagttgaagtctcatcctccaaagaacgttgaatcagaaatcttgtgtgagcatatcaagaaagagagggagacagcaaaggctggaaaacgaccatactatctgaagaaacctgaacttcgcgaaaggaagctaatgaacaagtacaacgagctcaaggaggcaggaaagcttgatgcattcatggaaaagcggcggaggaagaatgcctccaaagatcatcggttcatgccgtaccgacgcagtggagatgcataatagtttcctgattctggagacgagcgaaaggatgattttaggacggtgttctcatggtggctgggacactggacagtcagtgtctctgttactttgttgccctagccgtacaatcgtcagctccgtgcacaatctctactacttcttaagaatagagtgcaggcgtccacagtggttttttatgtttctcatttcactctctgcattttcagttacaactacactgcatatgctggcagatttgttcatatattactccagctgacattttcactatcgcaacagcatctctactactatttgtttttttgcatataaatgtattttaacatattgattctgtagcaacgcacgggcatattcctagtatataattatccatctaatcaac

SEQ ID NO: 60490 - DNA, 2147 bp, Zea Mays
caaaatcctatttccctctcccacaccacgcgccgcgcctgtctgattctgcccgccagccacgcccgcagatctcgcttcggcgccctgattccgtcgtatgcaaggtcacagccctgccttccatcgtcgcccccatgccatggtccccttctatcctcgctcacttccagccgccaacggaaccccccgcgtacgtttggcagaaactgtagagaccgtcgaagacgggggcagtcctcgccgacgctgaagtgcttgagcgcgcggatctgatcctgctgcgtttcgggggtgacggaccggaggaaggagacgtaatcgtcggcgtggaagcggcagaggtcgcggtcgcgggcagggtgagggcggaacacttgcatctggtcgaggaggccgtagcggccgagcagcgcgtgggtcatgcggatgcggtgcggcttcatcgggtggcaatgctcgtagtagcagttgcccacctccacgtcgtagaagtagcagacgcggcgcttcgacccgtccgcgccagtggtcggtagggagttgccgccaccgcacagcacgacagagggtgtgtcagtcggggcgcgagcaccaactttgcatccattaactgctctgctcagagcatcagtttacctctgcgcgtccctgctaaccgttccacatagtatcacaaaaaaatggcactaccttggcatcgtcttccccaattcgggtgtatggaattcttggagcaaaggaccagcacacggtcacctccaaagaaagacccaggctgcttctacaaggagctgtacaaagtgcttcacgactgcagattttggatgagatgatggataatggttttccactcacaactgagccaaacatcttgaaagagatgatcaccccacctaatattgtgaacaaaatgttgaatgttgttactggcaagagttctacccttggcagcaaacttccagatgcagctgcttcttttgtaccttggcgaagaacaacagtcaaggatgcaagcaatgaagtctatgttaacatagtcgaggaacttgatgcatatgtgaacagagagggggttcttgtgaaatgcgaagcatacggtgaagtccaagtaaactgcagcctcccaggatgaccacatgtaagcaataggtgctgctaccagcaaaaaggaagccagaggccttgctgctggaccaagattagtccaaaggttatctggttttggggaccatcgatctgcagacaatgtggcaagagtggtagaggaggagcttgcacatgcctctatggtttgtattgatttctcaaagaatgccaagtgatgggtcgtgaaccaagcaatactttccaagacttgataaaggagtacgaagttgtactgaagggtccattcaactacacggctcgtgatgaagctggtataccccgagaatggttcatgatagattagcttgtattgttgagatggaaaaagagaatgcaagtttgggataagcagttgaagtctcatcctccaaagaacgttgaatcagaaatcttgtgtgagcatatcaagaaagagagggagacagcaaaggctggaaaacgaccatactatctgaagaaacctgaacttcgcgaaaggaagctaatgaacaagtacaacgagctcaaggaggcaggaaagcttgatgcattcatggaaaagcggcggaggaagaatgcctccaaagatcatcggttcatgccgtaccgacgcagtggagatgcataatagtttcctgattctggagacgagcgaaaggatgattttaggacggtgttctcatggtggctgggacactggacagtcagtgtctctgttactttgttgccctagccgtacaatcgtcagctccgtgcacaatctctactacttcttaagaatagagtgcaggcgtccacagtggttttttatgtttctcatttcactctctgcattttcagttacaactacactgcatatgctggcagatttgttcatatattactccagctgacattttcactatcgcaacagcatctctactactatttgtttttttgcatataaatgtattttaacatattgattctgtagcaacgcacgggcatattcctagtatataattatccatctaatcaac

SEQ ID NO: 60491 - DNA, 1760 bp, Zea Mays
caaaatcctatttccctctcccacaccacgcgccgcgcctgtctgattctgcccgccagccacgcccgcagatctcgcttcggcgccctgattccgtcgtatgcaagtttacctctgcgcgtccctgctaaccgttccacatagtatcacaaaaaaatggcactaccttggcatcgtcttccccaattcgggtgtatggaattcttggagcaaaggaccagcacacggtcacctccaaagaaagacccaggctgcttctacaaggagctgtacaaagtgcttcacgactgcagattttggatgagatgatggataatggttttccactcacaactgagccaaacatcttgaaagagatgatcaccccacctaatattgtgaacaaaatgttgaatgttgttactggcaagagttctacccttggcagcaaacttccagatgcagctgcttcttttgtaccttggcgaagaacaacagtcaaggatgcaagcaatgaagtctatgttaacatagtcgaggaacttgatgcatatgtgaacagagagggggttcttgtgaaatgcgaagcatacggtgaagtccaagtaaactgcagcctcccaggatgaccacatgtaagcaataggtgctgctaccagcaaaaagggggactggataagcacaagtgaggtagaatttcaaggttctcattatactttattttttcctggtacacaatggtgaaaaagcagggccagtcctagagttccctatgggttaaatatcttgtgtagtcatttgttcaggaagccagaggccttgctgctggaccaagattagtccaaaggttatctggttttggggaccatcgatctgcagacaatgtggcaagagtggtagaggaggagcttgcacatgcctctatggtttgtattgatttctcaaagaatgccaagtgatgggtcgtgaaccaagcaatactttccaagacttgataaaggagtacgaagttgtactgaagggtccattcaactacacggctcgtgatgaagctggtataccccgagaatggttcatgatagattagcttgtattgttgagatggaaaaagagaatgcaagtttgggataagcagttgaagtctcatcctccaaagaacgttgaatcagaaatcttgtgtgagcatatcaagaaagagagggagacagcaaaggctggaaaacgaccatactatctgaagaaacctgaacttcgcgaaaggaagctaatgaacaagtacaacgagctcaaggaggcaggaaagcttgatgcattcatggaaaagcggcggaggaagaatgcctccaaagatcatcggttcatgccgtaccgacgcagtggagatgcataatagtttcctgattctggagacgagcgaaaggatgattttaggacggtgttctcatggtggctgggacactggacagtcagtgtctctgttactttgttgccctagccgtacaatcgtcagctccgtgcacaatctctactacttcttaagaatagagtgcaggcgtccacagtggttttttatgtttctcatttcactctctgcattttcagttacaactacactgcatatgctggcagatttgttcatatattactccagctgacattttcactatcgcaacagcatctctactactatttgtttttttgcatataaatgtattttaacatattgattctgtagcaacgcacgggcatattcctagtatataattatccatctaatcaac

SEQ ID NO: 60492 - DNA, 2113 bp, Zea Mays
caaaatcctatttccctctcccacaccacgcgccgcgcctgtctgattctgcccgccagccacgcccgcagatctcgcttcggcgccctgattccgtcgtatgcaagattggcagcttgctgcccacagcctagcggtcgactctctatttttggactcactgttgtctagccgcttgtttcttgtggacaccttaccttagccttggcgatgagtgatgcttggcagcttgccatatcatatcctgttggaatcgaacctgcttctgattcttccttcttgtagtttacctctgcgcgtccctgctaaccgttccacatagtatcacaaaaaaatggcactaccttggcatcgtcttccccaattcgggtgtatggaattcttggagcaaaggaccagcacacggtcacctccaaagaaagacccaggctgcttctacaaggagctgtacaaagattttggatgagatgatggataatggttttccactcacaactgagccaaacatcttgaaagagatgatcaccccacctaatattgtgaacaaaatgttgaatgttgttactggcaagagttctacccttggcagcaaacttccagatgcagctgcttcttttgtaccttggcgaagaacaacagtcaaggatgcaagcaatgaagtctatgttaacatagtcgaggaacttgatgcatatgtgaacagagagggggttcttgtgaaatgcgaagcatacggtgaagtccaagtaaactgcagcctcccaggatgaccacatgtaagcaataggtgctgctaccagcaaaaagggggactggataagcacaagtgaggtagaatttcaaggttctcattatactttattttttcctggtacacaatggtgaaaaagcagggccagtcctagagttccctatgggttaaatatcttgtgtagtcatttgttcaggaagccagaggccttgctgctggaccaagattagtccaaaggttatctggttttggggaccatcgatctgcagacaatgtggcaagagtggtagaggaggagcttgcacatgcctctatggtttgtattgatttctcaaagaatgccaagtgatgggtcgtgaaccaagcaatactttccaagacttgataaaggagtacgaagttgtactgaagggtccattcaactacacggctcgtgatgaagctggtataccccgagaatggtaacttctggctagcatggcataagtctgtaagcatttgcatctttaggaggttaatttttatattatttcatgtacgacaagaagttcaaacaagaagcagcacaaaaacttttagatgtgagagactgtcatagttttttatgataatggtttgctatggagctaaactggcaatatgttcttgacaggttcatgatagattagcttgtattgttgagatggaaaaagagaatgcaagtttgggataagcagttgaagtctcatcctccaaagaacgttgaatcagaaatcttgtgtgagcatatcaagaaagagagggagacagcaaaggctggaaaacgaccatactatctgaagaaacctgaacttcgcgaaaggaagctaatgaacaagtacaacgagctcaaggaggcaggaaagcttgatgcattcatggaaaagcggcggaggaagaatgcctccaaagatcatcggttcatgccgtaccgacgcagtggagatgcataatagtttcctgattctggagacgagcgaaaggatgattttaggacggtgttctcatggtggctgggacactggacagtcagtgtctctgttactttgttgccctagccgtacaatcgtcagctccgtgcacaatctctactacttcttaagaatagagtgcaggcgtccacagtggttttttatgtttctcatttcactctctgcattttcagttacaactacactgcatatgctggcagatttgttcatatattactccagctgacattttcactatcgcaacagcatctctactactatttgtttttttgcatataaatgtattttaacatattgattctgtagcaacgcacgggcatattcctagtatataattatccatctaatcaac

SEQ ID NO: 60493 - DNA, 1604 bp, Zea Mays
caaaatcctatttccctctcccacaccacgcgccgcgcctgtctgattctgcccgccagccacgcccgcagatctcgcttcggcgccctgattccgtcgtatgcaagtttacctctgcgcgtccctgctaaccgttccacatagtatcacaaaaaaatggcactaccttggcatcgtcttccccaattcgggtgtatggaattcttggagcaaaggaccagcacacggtcacctccaaagaaagacccaggctgcttctacaaggagctgtacaaagattttggatgagatgatggataatggttttccactcacaactgagccaaacatcttgaaagagatgatcaccccacctaatattgtgaacaaaatgttgaatgttgttactggcaagagttctacccttggcagcaaacttccagatgcagctgcttcttttgtaccttggcgaagaacaacagtcaaggatgcaagcaatgaagtctatgttaacatagtcgaggaacttgatgcatatgtgaacagagagggggttcttgtgaaatgcgaagcatacggtgaagtccaagtaaactgcagcctcccaggatgaccacatgtaagcaataggtgctgctaccagcaaaaaggaagccagaggccttgctgctggaccaagattagtccaaaggttatctggttttggggaccatcgatctgcagacaatgtggcaagagtggtagaggaggagcttgcacatgcctctatggtttgtattgatttctcaaagaatgccaagtgatgggtcgtgaaccaagcaatactttccaagacttgataaaggagtacgaagttgtactgaagggtccattcaactacacggctcgtgatgaagctggtataccccgagaatggttcatgatagattagcttgtattgttgagatggaaaaagagaatgcaagtttgggataagcagttgaagtctcatcctccaaagaacgttgaatcagaaatcttgtgtgagcatatcaagaaagagagggagacagcaaaggctggaaaacgaccatactatctgaagaaacctgaacttcgcgaaaggaagctaatgaacaagtacaacgagctcaaggaggcaggaaagcttgatgcattcatggaaaagcggcggaggaagaatgcctccaaagatcatcggttcatgccgtaccgacgcagtggagatgcataatagtttcctgattctggagacgagcgaaaggatgattttaggacggtgttctcatggtggctgggacactggacagtcagtgtctctgttactttgttgccctagccgtacaatcgtcagctccgtgcacaatctctactacttcttaagaatagagtgcaggcgtccacagtggttttttatgtttctcatttcactctctgcattttcagttacaactacactgcatatgctggcagatttgttcatatattactccagctgacattttcactatcgcaacagcatctctactactatttgtttttttgcatataaatgtattttaacatattgattctgtagcaacgcacgggcatattcctagtatataattatccatctaatcaac

SEQ ID NO: 60494 - DNA, 2442 bp, Zea Mays
caaaatcctatttccctctcccacaccacgcgccgcgcctgtctgattctgcccgccagccacgcccgcagatctcgcttcggcgccctgattccgtcgtatgcaaggtcacagccctgccttccatcgtcgcccccatgccatggtccccttctatcctcgctcacttccagccgccaacggaaccccccgcgtacgtttggcagaaactgtagagaccgtcgaagacgggggcagtcctcgccgacgctgaagtgcttgagcgcgcggatctgatcctgctgcgtttcgggggtgacggaccggaggaaggagacgtaatcgtcggcgtggaagcggcagaggtcgcggtcgcgggcagggtgagggcggaacacttgcatctggtcgaggaggccgtagcggccgagcagcgcgtgggtcatgcggatgcggtgcggcttcatcgggtggcaatgctcgtagtagcagttgcccacctccacgtcgtagaagtagcagacgcggcgcttcgacccgtccgcgccagtggtcggtagggagttgccgccaccgcacagcacgacagagggtgtgtcagtcggggcgcgagcaccaactttgcatccattaactgctctgctcagagcatcaggtgcgcttcagcgtctagccatttggcggcttgggctttctgcggttgggaggaacggagtcttaagattagcgctgtcggtgtcgtccttgaggtggacgtcaacggcgaggagctctttttcgttgataagattggcagcttgctgcccacagcctagcggtcgactctctatttttggactcactgttgtctagccgcttgtttcttgtggacaccttaccttagccttggcgatgagtgatgcttggcagcttgccatatcatatcctgttggaatcgaacctgcttctgattcttccttcttgtagtttacctctgcgcgtccctgctaaccgttccacatagtatcacaaaaaaatggcactaccttggcatcgtcttccccaattcgggtgtatggaattcttggagcaaaggaccagcacacggtcacctccaaagaaagacccaggctgcttctacaaggagctgtacaaagattttggatgagatgatggataatggttttccactcacaactgagccaaacatcttgaaagagatgatcaccccacctaatattgtgaacaaaatgttgaatgttgttactggcaagagttctacccttggcagcaaacttccagatgcagctgcttcttttgtaccttggcgaagaacaacagtcaaggatgcaagcaatgaagtctatgttaacatagtcgaggaacttgatgcatatgtgaacagagagggggttcttgtgaaatgcgaagcatacggtgaagtccaagtaaactgcagcctcccaggatgaccacatgtaagcaataggtgctgctaccagcaaaaaggaagccagaggccttgctgctggaccaagattagtccaaaggttatctggttttggggaccatcgatctgcagacaatgtggcaagagtggtagaggaggagcttgcacatgcctctatggtttgtattgatttctcaaagaatgccaagtgatgggtcgtgaaccaagcaatactttccaagacttgataaaggagtacgaagttgtactgaagggtccattcaactacacggctcgtgatgaagctggtataccccgagaatggttcatgatagattagcttgtattgttgagatggaaaaagagaatgcaagtttgggataagcagttgaagtctcatcctccaaagaacgttgaatcagaaatcttgtgtgagcatatcaagaaagagagggagacagcaaaggctggaaaacgaccatactatctgaagaaacctgaacttcgcgaaaggaagctaatgaacaagtacaacgagctcaaggaggcaggaaagcttgatgcattcatggaaaagcggcggaggaagaatgcctccaaagatcatcggttcatgccgtaccgacgcagtggagatgcataatagtttcctgattctggagacgagcgaaaggatgattttaggacggtgttctcatggtggctgggacactggacagtcagtgtctctgttactttgttgccctagccgtacaatcgtcagctccgtgcacaatctctactacttcttaagaatagagtgcaggcgtccacagtggttttttatgtttctcatttcactctctgcattttcagttacaactacactgcatatgctggcagatttgttcatatattactccagctgacattttcactatcgcaacagcatctctactactatttgtttttttgcatataaatgtattttaacatattgattctgtagcaacgcacgggcatattcctagtatataattatccatctaatcaac

SEQ ID NO: 60495 - DNA, 1744 bp, Zea Mays
caaaatcctatttccctctcccacaccacgcgccgcgcctgtctgattctgcccgccagccacgcccgcagatctcgcttcggcgccctgattccgtcgtatgcaagtttacctctgcgcgtccctgctaaccgttccacatagtatcacaaaaaaatggcactaccttggcatcgtcttccccaattcgggtgtatggaattcttggagcaaaggaccagcacacggtcacctccaaagaaagacccaggctgcttctacaaggagctgtacaaagattttggatgagatgatggataatggttttccactcacaactgagccaaacatcttgaaagagatgatcaccccacctaatattgtgaacaaaatgttgaatgttgttactggcaagagttctacccttggcagcaaacttccagatgcagctgcttcttttgtaccttggcgaagaacaacagtcaaggatgcaagcaatgaagtctatgttaacatagtcgaggaacttgatgcatatgtgaacagagagggggttcttgtgaaatgcgaagcatacggtgaagtccaagtaaactgcagcctcccaggatgaccacatgtaagcaataggtgctgctaccagcaaaaagggggactggataagcacaagtgaggtagaatttcaaggttctcattatactttattttttcctggtacacaatggtgaaaaagcagggccagtcctagagttccctatgggttaaatatcttgtgtagtcatttgttcaggaagccagaggccttgctgctggaccaagattagtccaaaggttatctggttttggggaccatcgatctgcagacaatgtggcaagagtggtagaggaggagcttgcacatgcctctatggtttgtattgatttctcaaagaatgccaagtgatgggtcgtgaaccaagcaatactttccaagacttgataaaggagtacgaagttgtactgaagggtccattcaactacacggctcgtgatgaagctggtataccccgagaatggttcatgatagattagcttgtattgttgagatggaaaaagagaatgcaagtttgggataagcagttgaagtctcatcctccaaagaacgttgaatcagaaatcttgtgtgagcatatcaagaaagagagggagacagcaaaggctggaaaacgaccatactatctgaagaaacctgaacttcgcgaaaggaagctaatgaacaagtacaacgagctcaaggaggcaggaaagcttgatgcattcatggaaaagcggcggaggaagaatgcctccaaagatcatcggttcatgccgtaccgacgcagtggagatgcataatagtttcctgattctggagacgagcgaaaggatgattttaggacggtgttctcatggtggctgggacactggacagtcagtgtctctgttactttgttgccctagccgtacaatcgtcagctccgtgcacaatctctactacttcttaagaatagagtgcaggcgtccacagtggttttttatgtttctcatttcactctctgcattttcagttacaactacactgcatatgctggcagatttgttcatatattactccagctgacattttcactatcgcaacagcatctctactactatttgtttttttgcatataaatgtattttaacatattgattctgtagcaacgcacgggcatattcctagtatataattatccatctaatcaac

SEQ ID NO: 60496 - DNA, 2264 bp, Zea Mays
caaaatcctatttccctctcccacaccacgcgccgcgcctgtctgattctgcccgccagccacgcccgcagatctcgcttcggcgccctgattccgtcgtatgcaaggtcacagccctgccttccatcgtcgcccccatgccatggtccccttctatcctcgctcacttccagccgccaacggaaccccccgcgtacgtttggcagaaactgtagagaccgtcgaagacgggggcagtcctcgccgacgctgaagtgcttgagcgcgcggatctgatcctgctgcgtttcgggggtgacggaccggaggaaggagacgtaatcgtcggcgtggaagcggcagaggtcgcggtcgcgggcagggtgagggcggaacacttgcatctggtcgaggaggccgtagcggccgagcagcgcgtgggtcatgcggatgcggtgcggcttcatcgggtggcaatgctcgtagtagcagttgcccacctccacgtcgtagaagtagcagacgcggcgcttcgacccgtccgcgccagtggtcggtagggagttgccgccaccgcacagcacgacagagggtgtgtcagtcggggcgcgagcaccaactttgcatccattaactgctctgctcagagcatcaggtgcgcttcagcgtctagccatttggcggcttgggctttctgcggttgggaggaacggagtcttaagattagcgctgtcggtgtcgtccttgaggtggacgtcaacggcgaggagctctttttcgttgataagtttacctctgcgcgtccctgctaaccgttccacatagtatcacaaaaaaatggcactaccttggcatcgtcttccccaattcgggtgtatggaattcttggagcaaaggaccagcacacggtcacctccaaagaaagacccaggctgcttctacaaggagctgtacaaagattttggatgagatgatggataatggttttccactcacaactgagccaaacatcttgaaagagatgatcaccccacctaatattgtgaacaaaatgttgaatgttgttactggcaagagttctacccttggcagcaaacttccagatgcagctgcttcttttgtaccttggcgaagaacaacagtcaaggatgcaagcaatgaagtctatgttaacatagtcgaggaacttgatgcatatgtgaacagagagggggttcttgtgaaatgcgaagcatacggtgaagtccaagtaaactgcagcctcccaggatgaccacatgtaagcaataggtgctgctaccagcaaaaaggaagccagaggccttgctgctggaccaagattagtccaaaggttatctggttttggggaccatcgatctgcagacaatgtggcaagagtggtagaggaggagcttgcacatgcctctatggtttgtattgatttctcaaagaatgccaagtgatgggtcgtgaaccaagcaatactttccaagacttgataaaggagtacgaagttgtactgaagggtccattcaactacacggctcgtgatgaagctggtataccccgagaatggttcatgatagattagcttgtattgttgagatggaaaaagagaatgcaagtttgggataagcagttgaagtctcatcctccaaagaacgttgaatcagaaatcttgtgtgagcatatcaagaaagagagggagacagcaaaggctggaaaacgaccatactatctgaagaaacctgaacttcgcgaaaggaagctaatgaacaagtacaacgagctcaaggaggcaggaaagcttgatgcattcatggaaaagcggcggaggaagaatgcctccaaagatcatcggttcatgccgtaccgacgcagtggagatgcataatagtttcctgattctggagacgagcgaaaggatgattttaggacggtgttctcatggtggctgggacactggacagtcagtgtctctgttactttgttgccctagccgtacaatcgtcagctccgtgcacaatctctactacttcttaagaatagagtgcaggcgtccacagtggttttttatgtttctcatttcactctctgcattttcagttacaactacactgcatatgctggcagatttgttcatatattactccagctgacattttcactatcgcaacagcatctctactactatttgtttttttgcatataaatgtattttaacatattgattctgtagcaacgcacgggcatattcctagtatataattatccatctaatcaac

SEQ ID NO: 60497 - DNA, 1141 bp, Zea Mays
acaacatcatacacatagtaggctttggggactggataagcacaagtgaggtagaatttcaaggttctcattatactttattttttcctggtacacaatggtgaaaaagcagggccagtcctagagttccctatgggttaaatatcttgtgtagtcatttgttcaggaagccagaggccttgctgctggaccaagattagtccaaaggttatctggttttggggaccatcgatctgcagacaatgtggcaagagtggtagaggaggagcttgcacatgcctctatggtttgtattgatttctcaaagaatgccaagtgatgggtcgtgaaccaagcaatactttccaagacttgataaaggagtacgaagttgtactgaagggtccattcaactacacggctcgtgatgaagctggtataccccgagaatggttcatgatagattagcttgtattgttgagatggaaaaagagaatgcaagtttgggataagcagttgaagtctcatcctccaaagaacgttgaatcagaaatcttgtgtgagcatatcaagaaagagagggagacagcaaaggctggaaaacgaccatactatctgaagaaacctgaacttcgcgaaaggaagctaatgaacaagtacaacgagctcaaggaggcaggaaagcttgatgcattcatggaaaagcggcggaggaagaatgcctccaaagatcatcggttcatgccgtaccgacgcagtggagatgcataatagtttcctgattctggagacgagcgaaaggatgattttaggacggtgttctcatggtggctgggacactggacagtcagtgtctctgttactttgttgccctagccgtacaatcgtcagctccgtgcacaatctctactacttcttaagaatagagtgcaggcgtccacagtggttttttatgtttctcatttcactctctgcattttcagttacaactacactgcatatgctggcagatttgttcatatattactccagctgacattttcactatcgcaacagcatctctactactatttgtttttttgcatataaatgtattttaacatattgattctgtagcaacgcacgggcatattcctagtatataattatccatctaatcaac

SEQ ID NO: 60498 - DNA, 1455 bp, Zea Mays
ctcacttcgcgtgctccattcccatctcccccctccctgcgcgcagccgcacaccaccaacacctttcaccagacgccgccgccgccaccccccatccctgtcccgtcccgcgcgcggccgccacatccgtccgggcatcctcgtctccccagccccgctgccgcagggttcatcagcagaagctgcttgcaccgccgccgccgccctcttcctgttctactggtacgctcgctcacttgcatcggtttcttctcttcccacgcttctattcagagcataacagttgctaatccccttgttgcgctagcttaatcttagattttgcttcgggttcggctaaatttcgtcggatggatatcgatgccagcgccagcgtcatgtgccagctgctgagccccgagggagaccctctaggctctgcgctctatctgccccagaacgtcgggcccccgcagctccaggagattgtcaatcagctcctccacaatgaggagaagttgccctatgcattctacgttggagacgaggagctctctgtctacctgggtgcttacatgcggcagaagaacgccaatgttgaggttactctgcgcatagtatgccaaccacaagcacttttccggatcaggccggtcaaccgatgctctgccacgattgctggccacacggaagctgtaattgctgtttcttttagccctgatggaaagagtttggcgagcggttcaggtgacaccactgttcgcttttgggacctgagtacacagactccactgttcacatgcaaaggacacaaaaattgggttctctgtattgcatggtcacctgatggaaaacatcttgttagtggtagcaagtcgggagaacttatattatgggacccaaaaactgggaaccaattgggcactccacttatgggacacaggaaatggattactgctgtatcatgggagccagttcatttgcagtctccgtgccgccgctttgtaagtgcaagcaaggacggtgatgctcgcatttgggacatcaccacaaggaaatgtgttatttcccttacaggtcacactagttcagtgacctgtgtcaagtggggtggagatggtttgatttatactggttcccaagattgtttaatcaaagtatgggaaacttctcagggaaagttggtcaaaacattgaagggtcatgggcactgggtgaattcgcttgctttgagcacggaatatgttctccgtactggagcatatgaccacactggcaagacattttcgactgcagaggaaatgaaagaggctgctcttgcgagatacaagaagatgaggggtaatgctccggagagactagtttctggttctgatgattttacaatgtttctttgggaaccaacaattagtaaacaacctaaagctcgcatgactggtcatcagaaggtgatgatttgtttgtttctttttgca

SEQ ID NO: 60499 - DNA, 2746 bp, Zea Mays
ctccattcccatctcccccctccctgcgcgcagccgcacaccaccaacacctttcaccagacgccgccgccgccaccccccatccctgtcccgtcccgcgcgcggccgccacatccgtccgggcatcctcgtctccccagccccgctgccgcagggttcatcagcagaagctgcttgcaccgccgccgccgccctcttcctgttctactgcttaatcttagattttgcttcgggttcggctaaatttcgtcggatggatatcgatgccagcgccagcgtcatgtgccagctgctgagccccgagggagaccctctaggctctgcgctctatctgccccagaacgtcgggcccccgcagctccaggagattgtcaatcagctcctccacaatgaggagaagttgccctatgcattctacgttggagacgaggagctctctgtctacctgggtgcttacatgcggcagaagaacgccaatgttgaggttactctgcgcatagtatgccaaccacaagcacttttccggatcaggccggtcaaccgatgctctgccacgattgctggccacacggaagctgtaattgctgtttcttttagccctgatggaaagagtttggcgagcggttcaggtgacaccactgttcgcttttgggacctgagtacacagactccactgttcacatgcaaagggacacaggaaatggattactgctgtatcatgggagccagttcatttgcagtctccgtgccgccgctttgtaagtgcaagcaaggacggtgatgctcgcatttgggacatcaccacaaggaaatgtgttatttcccttacaggtcacactagttcagtgacctgtgtcaagtggggtggagatggtttgatttatactggttcccaagattgtttaatcaaagtatgggaaacttctcagggaaagttggtcaaaacattgaagggtcatgggcactgggtgaattcgcttgctttgagcacggaatatgttctccgtactggagcatatgaccacactggcaagacattttcgactgcagaggaaatgaaagaggctgctcttgcgagatacaagaagatgaggggtaatgctccggagagactagtttctggttctgatgattttacaatgtttctttgggaaccaacaattagtaaacaacctaaagctcgcatgactggtcatcagaagcttgtaaaccatgtttacttttcccctgatggacaatggttggcaagtgcatcctttgataaatctgtcaagttgtggaatggtatcacaggtaaatttgttgcagcattcagagggcacgttgcagatgtctaccagatcagctggtctgccgacagtaggcttctactaagtggaagcaaggattccactctaaagatctgggatattcgaacacacaagttgaaaatggacttgccgggccacgcggatgaggtgtacaccgtggattggagccctgacggtgaaaaggtggcgtctggtggcaaggatcgggtcctcaagctatggatgaactgattgattattatatatctatgcttgggcgaattatatattgtagtgatgataattttgaaggtatactgagatcaattaattgtacaagatccatgcttggctcaaaactggaagaagctagctggaaatcatgagttcagttggtggtgctcttcttcttcttcttgttcttcttcttgaggtccgtggcatagtagttgcatgtgatgaagacgcctcccttgaagcactctgctcgtgcgcatcccaccttggtgctcctcttgccgaccatgagcgcgaagtggccgcactccttgtacgccctgccgcctgtgcactgctccgtgtccctgtcgtagatggactcctccttgccccaccagaagacggcctccttggcggtggcgttccagtcgtcgtggctcctgaacaggctctcgccgtacttgtggccgctgtggacgagctcgcagtccttgcgcatgcggttggaccagcgccgcgcctgccgcgccagcttcctgtcccacttcatgggcggcacgccgtagcgcgcgcggagctcgttgtgggcgtccacgaactcccgggcgatgcccttgtaccaccccgtgccgttggtcggtgacacgatgcccttctccttggcgtacttgagcagctcctgctgggcagccttctccgccgcgaccgccttctccatctcctgctccttctccttctccttctcgccggcctcttccgacgacgacgacgaagtagattctccgctgctactgtcggtctcagtctcactctcagacggagacgactggtgcagcagagacgacgacgaggaggccagggcgcccgaggaggggacgttggagaggacgacggcgacgacgaggagcagcagtactgctatgctgctgctgggcgccatgctggctagctatggttcaagatcgagctaggcacgccgacgccggccctcctctcttgccaacgtcgtcagtgttgggaaggagggtaagggctgccggcaggggccttttatgcatgcatgccaacagctagctagcggtcctccattcttggctctgctccaacgcacgcatgcatggccttttttcgcgcggtttcgctggttcgttggacggttcgtcttcatcgattgtcctgttgcttcaatcatcgtagctaggtgtctatatatagctgctaccttgcttctctagctt

SEQ ID NO: 60500 - DNA, 1971 bp, Zea Mays
cgtgttcccctttttgtatgaatataagatgaaggctgcccgagtgcgaattcttgatgtttttcttttgaggattgtggaaaaagaatatgattctgagtcaacaaaatcaagttcccaagattgtttaatcaaagtatgggaaacttctcagggaaagttggtcaaaacattgaagggtcatgggcactgggtgaattcgcttgctttgagcacggaatatgttctccgtactggagcatatgaccacactggcaagacattttcgactgcagaggaaatgaaagaggctgctcttgcgagatacaagaagatgaggggtaatgctccggagagactagtttctggttctgatgattttacaatgtttctttgggaaccaacaattagtaaacaacctaaagctcgcatgactggtcatcagaagcttgtaaaccatgtttacttttcccctgatggacaatggttggcaagtgcatcctttgataaatctgtcaagttgtggaatggtatcacaggtaaatttgttgcagcattcagagggcacgttgcagatgtctaccagatcagctggtctgccgacagtaggcttctactaagtggaagcaaggattccactctaaagatctgggatattcgaacacacaagttgaaaatggacttgccgggccacgcggatgaggtgtacaccgtggattggagccctgacggtgaaaaggtggcgtctggtggcaaggatcgggtcctcaagctatggatgaactgattgattattatatatctatgcttgggcgaattatatattgtagtgatgataattttgaaggtatactgagatcaattaattgtacaagatccatgcttggctcaaaactggaagaagctagctggaaatcatgagttcagttggtggtgctcttcttcttcttcttgttcttcttcttgaggtccgtggcatagtagttgcatgtgatgaagacgcctcccttgaagcactctgctcgtgcgcatcccaccttggtgctcctcttgccgaccatgagcgcgaagtggccgcactccttgtacgccctgccgcctgtgcactgctccgtgtccctgtcgtagatggactcctccttgccccaccagaagacggcctccttggcggtggcgttccagtcgtcgtggctcctgaacaggctctcgccgtacttgtggccgctgtggacgagctcgcagtccttgcgcatgcggttggaccagcgccgcgcctgccgcgccagcttcctgtcccacttcatgggcggcacgccgtagcgcgcgcggagctcgttgtgggcgtccacgaactcccgggcgatgcccttgtaccaccccgtgccgttggtcggtgacacgatgcccttctccttggcgtacttgagcagctcctgctgggcagccttctccgccgcgaccgccttctccatctcctgctccttctccttctccttctcgccggcctcttccgacgacgacgacgaagtagattctccgctgctactgtcggtctcagtctcactctcagacggagacgactggtgcagcagagacgacgacgaggaggccagggcgcccgaggaggggacgttggagaggacgacggcgacgacgaggagcagcagtactgctatgctgctgctgggcgccatgctggctagctatggttcaagatcgagctaggcacgccgacgccggccctcctctcttgccaacgtcgtcagtgttgggaaggagggtaagggctgccggcaggggccttttatgcatgcatgccaacagctagctagcggtcctccattcttggctctgctccaacgcacgcatgcatggccttttttcgcgcggtttcgctggttcgttggacggttcgtcttcatcgattgtcctgttgcttcaatcatcgtagctaggtgtctatatatagctgctaccttgcttctctagctt

SEQ ID NO: 60501 - DNA, 3938 bp, Zea Mays
tgcctttgcctttgcctgcttttatatttgtcgcgggtccttctcctatctgccaacggcagcagcagacacagctgagagctggatcacctctcgattccaggagcagtacgtcgtctcctattctactccatccatccaccgcccttgaaaagaagagaaaggtcaaaggagcaccgctgatcgcgatcgtacctcacttcgcgcgctctctctctctctccctctctctctaccgccgccattcacctaccaacaagtgcgtgtgtagtgagaaagaaaccttattggctagctcagctgagctcgccggccggcagcttcaccatccaatacagcgaggagcaagctctgctctccgaacccggccacccatggctctcgtcctcctcctcctcctgcccatcttccttctctcatcgtcttcctgcctcgtcctcgccattccaacgctagccagccaggctgccaccctgctctccctcaaggactctttctcgcctccgctcccgccgcagctgcgcagctggaccctcgccaactatgcctcgctctgctcctcatggcccggcgtcgcctgcagcaaccgcaccgtcgtctcgctcgacatctccggctacaacctctccggcacgctgccccccgctatcgccgacctcgctggcctccgtttcttctccgccgccgccaactccttctccggagacattccgcccgccatcgccgccctccgcgacctccgccacctcaacctctccaacaaccagttcaacggcaccctggacgccctcgacttctccgcgatgcacagcctccaggtgctcgacctctacgacaacgacctcgccggcgcacttcccaccctcctccccgcggccgcgggcctccgccacctcgacctcggcgggaacttcttctccggcaccattccacccagcttcggccgcttccccgccatccagttcctctccctcgccggcaacagcctctccggggacatcccgcccgacctcgccaacctctccacgctgcgccacctcttcctcggctacttcaaccgcttcgacggcggcatcccggcggagctcggcaggctcaccagcctcgtccacctcgacctcgccaactgtggcctgcagggccccatcccggcttcgctcggcgacctcaccgggctggacacgctctacctgcagacgaaccagctgaacggcaccatcccgccgtcgctgggcaacctcaccggccttaggttcctcgacgtctccaacaacgcgctcacgggggagatccctcccgagctcgccgcgctcagggaactcaggctgctgaacatgttcatcaaccggttccgcggcggcgtcccggacttcctgggcgacctccgctccctgcaggtcctcaagctgtggcagaacaacttcacgggcgccatccccgcggcgctcggccgcgccgcgccgctccgggaggtggacctgtccacgaaccggctgacgggggaggtgccccgctggctgtgcgcgcgcgggcagctggagatcctcatcctcctcgacaacttcctcttcgggccggtgccggaggggctgggcgcctgcccgacgctcacgcgggtgaggctgggccagaactacctcacggggccgctcccgcgcggcttcctctacctgccggcgctcaccaccgtggagctgcagggcaactacctgacgggacggctggaggaggacggcagcggcggcggcggcagcagcagcagcaggctgtcgctgctgaacctgtcgagcaaccgcttcaacggatcgctgccggcatccatgggcaacttctcgtggctgcagacgctcctcctcggtggcaaccagctgggcgggcagatcccgcggcaggtcgggcgcctgaagcggctgctgaagctggacctgagcggcaacaagctgacgggggcggtgcccggcgaggtgggcgagtgcacgtcgctgacgtacctggacctgagcggcaaccgtctgtccggcgcgatccccgtgcggctggtgcagatcaaggtgctcaactacctgaacgtgtcgtggaacatgctgagcggcagcatcccgcgggagctgggcggcatgaagagcctgaccgccgccgacttctcgcacaacgagctgtccgggcgcgtgccggagagcgggcagttcgcctacttgaacgggtcgtcgttcgtgggcaacccggggctggtggtggtgaatccgaagcagcaggtgatgggaggagggccggggatcctcggcggcgcggggacgcaggatgaacgtggctcttcttcgtcgtcggcggtgatggggcgcctgaagctgctgcttgcggcggtgggcctccttgggttctccgtggcgttcgcggcggctgccgtggcgacgacgcgttccgccgccatgctccggcgccggcgtcggtcttcgtcgtggcggtggcgcatgacggcgttccagcaggtgtctttcgggtgcgaggacgtggtgcggtgcgtgaaggagaactgcgtggtggggcgcggcggggccggggtggtgtaccgcgggacgatgcccggcggggagtgcgtggcggtgaagcggatcgtgtcggcggagggcggcgggttccaggcggaggtggagacgctgggtgggatccggcaccggcacatcgtgcggctgctggccttctgctcggggcccgaggcgaagctgctggtgtacgagtacatggtgaacggcagcctcggggaggcgctgcaccgcgctggcgctgatgatggcggcggcggtgtggtgctgtcgtgggcgtcgcgtctccgcgtggcgacggaggctgccaaggggctgtgctacctgcaccacgactgctcgccgccgatcctgcaccgggacgtcaagtccaacaacatcctgctggacgcgcgcatggaggcccacgtggcggacttcgggctggccaagttcctgggcggcagcggcgcctccgagtgcatgtccgccgtcgcaggatcatacggctacatcgcaccagagtacgcgtacacgctcaaggtggacgagaagagtgacgtgtacagcttcggcgtggtcctgctggagctcatcacggggctgaagccggtgggggagcacctcggcgacgacgcggtggacctggtgcagtgggcgcgcgcccggagctctgcagggggcggcgtcctggcgctgctggaccctcgcctcggcggcgacgtcccggtggcggaggcggcgcatgtgctgttcgtgtcgatgctatgcgtgcaggagcacagcgtggagcgccccaccatgcgcgaggtcgtccagatgctgcagcaggcacggcaccagcctagctaggacgacgactggagaaacgatgtgaaaatgtgatagatagacagaggtggtgttgtgtacgttgtcattgcattcggtaactatatatatttttagcagaaggtcagctgtaaattaaaaatatgacctgacagcggcagcccagccacccaacgcccagcccataatctcaacaaatagctcaattcccacgaacaagcacttaggtataatttatatattgttagctccttctcattcttctcccctcttcccatttctaaatgataaacttaagattcttcaaatacattatatcttcttttttcaatcaaaagtgtgccccattttgattgaaaatgacatcctaggattttggctttgaaattaaagtgcttcctaaaagacttactcgtaagggtttggtccccctaatgggagatctggtggcttattcgtagggtttgatgctgatatatttttatgtgagagaaaaagatttgggggaatttattattcgtattttggtggttcataaagaatcagactttatttagaacttcataaacgtgtatggagctgctc

SEQ ID NO: 60502 - DNA, 3363 bp, Zea Mays
tgcctttgcctttgcctgcttttatatttgtcgcgggtccttctcctatctgccaacggcagcagcagacacagctgagagctggatcacctctcgattccaggagcagtacgtcgtctcctattctactccatccatccaccgcccttgaaaagaagagaaaggtcaaaggagcaccgctgatcgcgatcgtacctcacttcgcgcgctctctctctctctccctctctctctaccgccgccattcacctaccaacaagtgcgtgtgtagtgagaaagaaaccttattggctagctcagctgagctcgccggccggcagcttcaccatccaatacagcgaggagcaagctctgctctccgaacccggccacccatggctctcgtcctcctcctcctcctgcccatcttccttctctcatcgtcttcctgcctcgtcctcgccattccaacgctagccagccaggctgccaccctgctctccctcaaggactctttctcgcctccgctcccgccgcagctgcgcagctggaccctcgccaactatgcctcgctctgctcctcatggcccggcgtcgcctgcagcaaccgcaccgtcgtctcgctcgacatctccggctacaacctctccggcacgctgccccccgctatcgccgacctcgctggcctccgtttcttctccgccgccgccaactccttctccggagacattccgcccgccatcgccgccctccgcgacctccgccacctcaacctctccaacaaccagttcaacggcaccctggacgccctcgacttctccgcgatgcacagcctccaggtgctcgacctctacgacaacgacctcgccggcgcacttcccaccctcctccccgcggccgcgggcctccgccacctcgacctcggcgggaacttcttctccggcaccattccacccagcttcggccgcttccccgccatccagttcctctccctcgccggcaacagcctctccggggacatcccgcccgacctcgccaacctctccacgctgcgccacctcttcctcggctacttcaaccgcttcgacggcggcatcccggcggagctcggcaggctcaccagcctcgtccacctcgacctcgccaactgtggcctgcagggccccatcccggcttcgctcggcgacctcaccgggctggacacgctctacctgcagacgaaccagctgaacggcaccatcccgccgtcgctgggcaacctcaccggccttaggttcctcgacgtctccaacaacgcgctcacgggggagatccctcccgagctcgccgcgctcagggaactcaggctgctgaacatgttcatcaaccggttccgcggcggcgtcccggacttcctgggcgacctccgctccctgcaggtcctcaagctgtggcagaacaacttcacgggcgccatccccgcggcgctcggccgcgccgcgccgctccgggaggtggacctgtccacgaaccggctgacgggggaggtgccccgctggctgtgcgcgcgcgggcagctggagatcctcatcctcctcgacaacttcctcttcgggccggtgccggaggggctgggcgcctgcccgacgctcacgcgggtgaggctgggccagaactacctcacggggccgctcccgcgcggcttcctctacctgccggcgctcaccaccgtggagctgcagggcaactacctgacgggacggctggaggaggacggcagcggcggcggcggcagcagcagcagcaggctgtcgctgctgaacctgtcgagcaaccgcttcaacggatcgctgccggcatccatgggcaacttctcgtggctgcagacgctcctcctcggtggcaaccagctgggcgggcagatcccgcggcaggtcgggcgcctgaagcggctgctgaagctggacctgagcggcaacaagctgacgggggcggtgcccggcgaggtgggcgagtgcacgtcgctgacgtacctggacctgagcggcaaccgtctgtccggcgcgatccccgtgcggctggtgcagatcaaggtgctcaactacctgaacgtgtcgtggaacatgctgagcggcagcatcccgcgggagctgggcggcatgaagagcctgaccgccgccgacttctcgcacaacgagctgtccgggcgcgtgccggagagcgggcagttcgcctacttgaacgggtcgtcgttcgtgggcaacccggggctggtggtggtgaatccgaagcagcaggtgatgggaggagggccggggatcctcggcggcgcggggacgcaggatgaacgtggctcttcttcgtcgtcggcggtgatggggcgcctgaagctgctgcttgcggcggtgggcctccttgggttctccgtggcgttcgcggcggctgccgtggcgacgacgcgttccgccgccatgctccggcgccggcgtcggtcttcgtcgtggcggtggcgcatgacggcgttccagcaggtgtctttcgggtgcgaggacgtggtgcggtgcgtgaaggagaactgcgtggtggggcgcggcggggccggggtggtgtaccgcgggacgatgcccggcggggagtgcgtggcggtgaagcggatcgtgtcggcggagggcggcgggttccaggcggaggtggagacgctgggtgggatccggcaccggcacatcgtgcggctgctggccttctgctcggggcccgaggcgaagctgctggtgtacgagtacatggtgaacggcagcctcggggaggcgctgcaccgcgctggcgctgatgatggcggcggcggtgtggtgctgtcgtgggcgtcgcgtctccgcgtggcgacggaggctgccaaggggctgtgctacctgcaccacgactgctcgccgccgatcctgcaccgggacgtcaagtccaacaacatcctgctggacgcgcgcatggaggcccacgtggcggacttcgggctggccaagttcctgggcggcagcggcgcctccgagtgcatgtccgccgtcgcaggatcatacggctacatcgcaccagagaaagagggaacgaaaaatggtgatccaaggaagcaagctaatcagaaagatatcaagtgaagcgtttggccgagcgtttgggtggtgtccgagggacaaacgaatttctgggtgatcaaggttgtggttcctggcgtatgtgatcgcctgtacttttggtgttgggttgcgctagtttctttagttgcgtctgtctgtcgtgaagtggttgtaataagaaatacttatgttcctggtagcaggtcgaactatgtcttctattttaggccctttacttatctagagtgatattgtaaggtgtctgaatagaggtcag

SEQ ID NO: 60503 - DNA, 1152 bp, Zea Mays
gtcaaaacggtcatcgcccttgtcttcttcttcttcttcttcatctcaccaacctttcccttcccgtcccaaccgccgtccgcctgctcccttccgctcacctgcttcatctgttttgaagaaaaaaaggaaaacagaaggaagagagtaaaagaggcctgcgctgccctgcgccccagagtatgcgcttctaacacttgcatatttggatggatgatgtatatggacggatagaggtcttcccccaacactttgtaccatcaaaagaagctatggagacacctgacggtctatcaacaagtaagaatagcctggatagtccaccaagttcatgtaagcgttcctggactccaagacgagttaagggagctgcatccattttgcatttattgtccattccccgcataagatggtctacaagcaatgaggatgatgacaagattgaattatctagagccgaagtagaaactttacgaaccgaaatagcgggtgccgaggaaagggaatctcacttaaaagctcggttggaaaacattgatgaagttttgagatatgcacggctttctggctatctctacattagaagtcgatggacccaactccctggtgaaccacctatattagatgatgctgatgtggatgactggcttcctcgctttgttgttctacaagggcagtgtttatactattatctgaaatgtacagatctgagcccacaggaatctacactcttatgtgatgttgttgaagtagggcagcttccagactttgtgccagaagatgaaaagacgagatatgcgttttacctgttgacccgtcaagggttgaggtttgaatgctccagtacctccgaaatacaggatggcgctggtgatgataagatgatgaatacgaggagtagccaagtagaagctgggtcatcatggtagacgatgtatggagtgctgtacagtacaatagtcaatgaaatgtacatacattacatgcatgtaaagggagcaacatagtagacgcattcaacacgagatgacatgttgctcgtggtatttttcaacttttagggagcacacaaatgatgtatttctgtagcaaaaaatccgtcgtccgtttgagtttgatagaccgtaagagcaactccagcagttctctaaa

SEQ ID NO: 60504 - DNA, 1111 bp, Zea Mays
aaaacggtcatcgcccttgtcttcttcttcttcttcttcatctcaccaacctttcccttcccgtcccaaccgccgtccgcctgctcccttccgctcacctgcttcatctgttttgaagaaaaaaaggaaaacagaaggaagagagtaaaagaggcctgcgctgccctgcgccccagaggtcttcccccaacactttgtaccatcaaaagaagctatggagacacctgacggtctatcaacaattcatgtaagcgttcctggactccaagacgagttaagggagctgcatccattttgcatttattgtccattccccgcataagatggtctacaagcaatgaggatgatgacaagattgaattatctagagccgaagtagaaactttacgaaccgaaatagcgggtgccgaggaaagggaatctcacttaaaagctcggttggaaaacattgatgaagttttgagatatgcacggctttctggctatctctacattagaagtcgatggacccaactccctggtgaaccacctatattagatgatgctgatgtggatgactggcttcctcgctttgttgttctacaagggcagtgtttatactattatctgaaatgtacagatctgagcccacaggaatctacactcttatgtgatgttgttgaagtagggcagcttccagactttgtgccagaagatgaaaagacgagatatgcgttttacctgttgacccgtcaagggttgaggtttgaatgctccagtacctccgaaatacaggttgattcatgggtaagagcactgtcaagtgactgcaaattgcaggatggcgctggtgatgataagatgatgaatacgaggagtagccaagtagaagctgggtcatcatggtagacgatgtatggagtgctgtacagtacaatagtcaatgaaatgtacatacattacatgcatgtaaagggagcaacatagtagacgcattcaacacgagatgacatgttgctcgtggtatttttcaacttttagggagcacacaaatgatgtatttctgtagcaaaaaatccgtcgtccgtttgagtttgatagaccgtaagagcaactccagcagttctctaaa

SEQ ID NO: 60505 - DNA, 1083 bp, Zea Mays
aaaacggtcatcgcccttgtcttcttcttcttcttcttcatctcaccaacctttcccttcccgtcccaaccgccgtccgcctgctcccttccgctcacctgcttcatctgttttgaagaaaaaaaggaaaacagaaggaagagagtaaaagaggcctgcgctgccctgcgccccagagtatgcgcttctaacacttgcatatttggatggatgatgtatatggacggatagaggtcttcccccaacactttgtaccatcaaaagaagctatggagacacctgacggtctatcaacaattcatgtaagcgttcctggactccaagacgagttaagggagctgcatccattttgcatttattgtccattccccgcataagatggtctacaagcaatgaggatgatgacaaggttggaaaacattgatgaagttttgagatatgcacggctttctggctatctctacattagaagtcgatggacccaactccctggtgaaccacctatattagatgatgctgatgtggatgactggcttcctcgctttgttgttctacaagggcagtgtttatactattatctgaaatgtacagatctgagcccacaggaatctacactcttatgtgatgttgttgaagtagggcagcttccagactttgtgccagaagatgaaaagacgagatatgcgttttacctgttgacccgtcaagggttgaggtttgaatgctccagtacctccgaaatacaggttgattcatgggtaagagcactgtcaagtgactgcaaattgcaggatggcgctggtgatgataagatgatgaatacgaggagtagccaagtagaagctgggtcatcatggtagacgatgtatggagtgctgtacagtacaatagtcaatgaaatgtacatacattacatgcatgtaaagggagcaacatagtagacgcattcaacacgagatgacatgttgctcgtggtatttttcaacttttagggagcacacaaatgatgtatttctgtagcaaaaaatccgtcgtccgtttgagtttgatagaccgtaagagcaactccagcagttctctaaa

SEQ ID NO: 60506 - DNA, 1166 bp, Zea Mays
aaaacggtcatcgcccttgtcttcttcttcttcttcttcatctcaccaacctttcccttcccgtcccaaccgccgtccgcctgctcccttccgctcacctgcttcatctgttttgaagaaaaaaaggaaaacagaaggaagagagtaaaagaggcctgcgctgccctgcgccccagagtatgcgcttctaacacttgcatatttggatggatgatgtatatggacggatagaggtcttcccccaacactttgtaccatcaaaagaagctatggagacacctgacggtctatcaacaattcatgtaagcgttcctggactccaagacgagttaagggagctgcatccattttgcatttattgtccattccccgcataagatggtctacaagcaatgaggatgatgacaagattgaattatctagagccgaagtagaaactttacgaaccgaaatagcgggtgccgaggaaagggaatctcacttaaaagctcggttggaaaacattgatgaagttttgagatatgcacggctttctggctatctctacattagaagtcgatggacccaactccctggtgaaccacctatattagatgatgctgatgtggatgactggcttcctcgctttgttgttctacaagggcagtgtttatactattatctgaaatgtacagatctgagcccacaggaatctacactcttatgtgatgttgttgaagtagggcagcttccagactttgtgccagaagatgaaaagacgagatatgcgttttacctgttgacccgtcaagggttgaggtttgaatgctccagtacctccgaaatacaggttgattcatgggtaagagcactgtcaagtgactgcaaattgcaggatggcgctggtgatgataagatgatgaatacgaggagtagccaagtagaagctgggtcatcatggtagacgatgtatggagtgctgtacagtacaatagtcaatgaaatgtacatacattacatgcatgtaaagggagcaacatagtagacgcattcaacacgagatgacatgttgctcgtggtatttttcaacttttagggagcacacaaatgatgtatttctgtagcaaaaaatccgtcgtccgtttgagtttgatagaccgtaagagcaactccagcagttctctaaa

SEQ ID NO: 60507 - DNA, 1111 bp, Zea Mays
aaaacggtcatcgcccttgtcttcttcttcttcttcttcatctcaccaacctttcccttcccgtcccaaccgccgtccgcctgctcccttccgctcacctgcttcatctgttttgaagaaaaaaaggaaaacagaaggaagagagtaaaagaggcctgcgctgccctgcgccccagagtatgcgcttctaacacttgcatatttggatggatgatgtatatggacggatagaggtcttcccccaacactttgtaccatcaaaagaagctatggagacacctgacggtctatcaacaagtaagaatagcctggatagtccaccaagttcatgtaagcgttcctggactccaagacgagttaagggagctgcatccattttgcatttattgtccattccccgcataagatggtctacaagcaatgaggatgatgacaaggttggaaaacattgatgaagttttgagatatgcacggctttctggctatctctacattagaagtcgatggacccaactccctggtgaaccacctatattagatgatgctgatgtggatgactggcttcctcgctttgttgttctacaagggcagtgtttatactattatctgaaatgtacagatctgagcccacaggaatctacactcttatgtgatgttgttgaagtagggcagcttccagactttgtgccagaagatgaaaagacgagatatgcgttttacctgttgacccgtcaagggttgaggtttgaatgctccagtacctccgaaatacaggttgattcatgggtaagagcactgtcaagtgactgcaaattgcaggatggcgctggtgatgataagatgatgaatacgaggagtagccaagtagaagctgggtcatcatggtagacgatgtatggagtgctgtacagtacaatagtcaatgaaatgtacatacattacatgcatgtaaagggagcaacatagtagacgcattcaacacgagatgacatgttgctcgtggtatttttcaacttttagggagcacacaaatgatgtatttctgtagcaaaaaatccgtcgtccgtttgagtttgatagaccgtaagagcaactccagcagttctctaaa

SEQ ID NO: 60508 - DNA, 1139 bp, Zea Mays
aaaacggtcatcgcccttgtcttcttcttcttcttcttcatctcaccaacctttcccttcccgtcccaaccgccgtccgcctgctcccttccgctcacctgcttcatctgttttgaagaaaaaaaggaaaacagaaggaagagagtaaaagaggcctgcgctgccctgcgccccagaggtcttcccccaacactttgtaccatcaaaagaagctatggagacacctgacggtctatcaacaagtaagaatagcctggatagtccaccaagttcatgtaagcgttcctggactccaagacgagttaagggagctgcatccattttgcatttattgtccattccccgcataagatggtctacaagcaatgaggatgatgacaagattgaattatctagagccgaagtagaaactttacgaaccgaaatagcgggtgccgaggaaagggaatctcacttaaaagctcggttggaaaacattgatgaagttttgagatatgcacggctttctggctatctctacattagaagtcgatggacccaactccctggtgaaccacctatattagatgatgctgatgtggatgactggcttcctcgctttgttgttctacaagggcagtgtttatactattatctgaaatgtacagatctgagcccacaggaatctacactcttatgtgatgttgttgaagtagggcagcttccagactttgtgccagaagatgaaaagacgagatatgcgttttacctgttgacccgtcaagggttgaggtttgaatgctccagtacctccgaaatacaggttgattcatgggtaagagcactgtcaagtgactgcaaattgcaggatggcgctggtgatgataagatgatgaatacgaggagtagccaagtagaagctgggtcatcatggtagacgatgtatggagtgctgtacagtacaatagtcaatgaaatgtacatacattacatgcatgtaaagggagcaacatagtagacgcattcaacacgagatgacatgttgctcgtggtatttttcaacttttagggagcacacaaatgatgtatttctgtagcaaaaaatccgtcgtccgtttgagtttgatagaccgtaagagcaactccagcagttctctaaa

SEQ ID NO: 60509 - DNA, 1121 bp, Zea Mays
aaaacggtcatcgcccttgtcttcttcttcttcttcttcatctcaccaacctttcccttcccgtcccaaccgccgtccgcctgctcccttccgctcacctgcttcatctgttttgaagaaaaaaaggaaaacagaaggaagagagtaaaagaggcctgcgctgccctgcgccccagagtatgcgcttctaacacttgcatatttggatggatgatgtatatggacggatagaggtcttcccccaacactttgtaccatcaaaagaagctatggagacacctgacggtctatcaacaattcatgtaagcgttcctggactccaagacgagttaagggagctgcatccattttgcatttattgtccattccccgcataagatggtctacaagcaatgaggatgatgacaagattgaattatctagagccgaagtagaaactttacgaaccgaaatagcgggtgccgaggaaagggaatctcacttaaaagctcggttggaaaacattgatgaagttttgagatatgcacggctttctggctatctctacattagaagtcgatggacccaactccctggtgaaccacctatattagatgatgctgatgtggatgactggcttcctcgctttgttgttctacaagggcagtgtttatactattatctgaaatgtacagatctgagcccacaggaatctacactcttatgtgatgttgttgaagtagggcagcttccagactttgtgccagaagatgaaaagacgagatatgcgttttacctgttgacccgtcaagggttgaggtttgaatgctccagtacctccgaaatacaggatggcgctggtgatgataagatgatgaatacgaggagtagccaagtagaagctgggtcatcatggtagacgatgtatggagtgctgtacagtacaatagtcaatgaaatgtacatacattacatgcatgtaaagggagcaacatagtagacgcattcaacacgagatgacatgttgctcgtggtatttttcaacttttagggagcacacaaatgatgtatttctgtagcaaaaaatccgtcgtccgtttgagtttgatagaccgtaagagcaactccagcagttctctaaa

SEQ ID NO: 60510 - DNA, 1257 bp, Zea Mays
ctgcgttgaaggaagaagagggagatggggactccgatctgttggtgtcagaaggagagacgagtctgcgaaggaaggagtgagatccgatccagtccagtccagtccagtccaacggaaacctttgcgttttttaagcgagccacgccaataacggagaggcatgcaccgacgatcggcatttccttccagtggcggtgagaagggaaagggaggacagcagagcagaggtcgagcatcgcatcgcatcgcatcgcgcgctttgcctgccgcagcggctaacgaacgcgtggatcatcccttctattattaattaattgggaggagtgggagtgatagctgcagcacccagcgcccatcactgagcccatccggaaccctagcctcctcgtcgttgaatccaccacaccatgagcgggagcgcctccaggaagctcttccaggccgccaggtccatcgtcctctccgcttctcaacgctcctccttctccgtcctcgccgccgagggccgcaccgccgcgctcgccaactttggcaggaagatcctccccagcgcctgctcctaccacaggcagggatcccacgccgcgtcgggatggggagccatcgctgccgcagtccccgccgcagtcctttcctcatgcagtttacatgctccaggaccaggaggctcatgctgcagagatggagcgcactttcatcgccatcaagcccgacggcgtccaaagaggcctgatttctgagattgtgaaccgattcgagagaaaaggctacaagcttgttgccatcaagctgattgtcccatccaaaggattcgctgagaagcactaccatgatctcaaggaaaggcctttcttcaacgggttgtgtgacttcctcagctctggccctgtacttgcaatggtttgggaaggagagggtgtcatcaagtatgggagaaaactaattggtgccacagacccacagaaatctgaaccaggaaccatcaggggcgatcttggtgttgttgtgggaagaaacatcattcatggaagtgatggcccggagacagcaaaggatgagatcgccttgtggtttgaacccaaggagctggtctcttataccagcaatgcggagaagtgggtctatggggtgaattaaccagcgactaaatctcttgagtaaggcacaaggagtgcagtgccaagcaagcagaggggagagctgagttttattgccatcttcattcaagcctttgtacaggggctagctaaccaa

SEQ ID NO: 60511 - DNA, 1171 bp, Zea Mays
ctgcgttgaaggaagaagagggagatggggactccgatctgttggtgtcagaaggagagacgagtctgcgaaggaaggagtgagatccgatccagtccagtccagtccagtccaacggaaacctttgcgttttttaagcgagccacgccaataacggagaggcatgcaccgacgatcggcatttccttccagtggcggtgagaagggaaagggaggacagcagagcagaggtcgagcatcgcatcgcatcgcatcgcgcgctttgcctgccgcagcggctaacgaacgcgtggatcatcccttctattattaattaattgggaggagtgggagtgatagctgcagcacccagcgcccatcactgagcccatccggaaccctagcctcctcgtcgttgaatccaccacaccatgagcgggagcgcctccaggaagctcttccaggccgccaggtccatcgtcctctccgcttctcaacgctcctccttctccgtcctcgccgccgagggccgcaccgccgcgctcgccaactttggcaggaagatcctccccagcgcctgctcctaccacaggcagggatcccacgccgcgtcgggatggggagccatcgctgccgcagtccccgccgcagtttacatgctccaggaccaggaggctcatgctgcagagatggagcgcactttcatcgccatcaagcccgacggcgtccaaagaggcctgatttctgagattgtgaaccgattcgagagaaaaggctacaagcttgttgccatcaagctgattgtcccatccaaaggattcgctgagaagcactaccatgatctcaaggaaaggcctttcttcaacgggttgtgtgacttcctcagctctggccctgtacttgcaatggtttgggaaggagagggtgtcatcaagtatgggagaaaactaattggtgccacagacccacagaaatctgaaccaggaaccatcaggggcgatcttggtgttgttgtgggaagaaacatcattcatggaagtgatggcccggagacagcaaaggatgagatcgccttgtggtttgaacccaaggagctggtctcttataccagcaatgcggagaagtgggtctatggggtgaattaaccagcgactaaatctcttgaggcagctgcgacaggatcaaggctgag

SEQ ID NO: 60512 - DNA, 1172 bp, Zea Mays
ctgcgttgaaggaagaagagggagatggggactccgatctgttggtgtcagaaggagagacgagtctgcgaaggaaggagtgagatccgatccagtccagtccagtccagtccaacggaaacctttgcgttttttaagcgagccacgccaataacggagaggcatgcaccgacgatcggcatttccttccagtggcggtgagaagggaaagggaggacagcagagcagaggtcgagcatcgcatcgcatcgcatcgcgcgctttgcctgccgcagcggctaacgaacgcgtggatcatcccttctattattaattaattgggaggagtgggagtgatagctgcagcacccagcgcccatcactgagcccatccggaaccctagcctcctcgtcgttgaatccaccacaccatgagcgggagcgcctccaggaagctcttccaggccgccaggtccatcgtcctctccgcttctcaacgctcctccttctccgtcctcgccgccgagggccgcaccgccgcgctcgccaactttggcaggaagatcctccccagcgcctgctcctaccacaggcagggatcccacgccgcgtcgggatggggagccatcgctgccgcagtccccgccgcagtttacatgctccaggaccaggaggctcatgctgcagagatggagcgcactttcatcgccatcaagcccgacggcgtccaaagaggcctgatttctgagattgtgaaccgattcgagagaaaaggctacaagcttgttgccatcaagctgattgtcccatccaaaggattcgctgagaagcactaccatgatctcaaggaaaggcctttcttcaacgggttgtgtgacttcctcagctctggccctgtacttgcaatggtttgggaaggagagggtgtcatcaagtatgggagaaaactaattggtgccacagacccacagaaatctgaaccaggaaccatcaggggcgatcttggtgttgttgtgggaagaaacatcattcatggaagtgatggcccggagacagcaaaggatgagatcgccttgtggtttgaacccaaggagctggtctcttataccagcaatgcggagaagtgggtctatggggtgaattaaccagcgactaaatctcttgagatttgctgatcagaagaaaagtccaac

SEQ ID NO: 60513 - DNA, 1727 bp, Zea Mays
cttcctgtaattacagctcgccttcatcgtctccccgaatgaccttttgtgttcgtcgtctccccaaaaggacctcccaagacctggcatctccagcgaatgcgacgccgggaaccaccgaccgtgcgtcctctctcctcgtgcgcttcgcccgtctccacagttggtgcagcttgcgacgcaacttggattctctcctctcctctcctctcgttgcaacaaggcagtccagtgaatgagacggatggccccagctgtgcctgtagctgatgcatgatggagctgagcctgtgggtgggaatctcttctctgctggtggccactcgcctagctccaaaaacacacacacacacactctctctctctctctctctctctctctctctctctctatctagtgggaagtttcacatcactagctccatcgcaattggtatgggtggtgcttctgcacaaaagaaaaaagatgtgcctgtctcactccccaaccaacttgtgaattgtcatgcatcgatcctagctagagcatctccgagagcaaaaacccttgttacagttttccaactcacattctactatatattaggatgtgttgggcacacatggaagtaaggcaaaatgatgcatcgacatgtgatacgtgagcacgtatttcagaacccgataggttggttggagtgggcttcttaaaattattactccgaagcgtgcaattgagattgtagtattataatacccacgtatttgtaaatttgttatcgtcgttgctttaaacacccatctatagctcactcactgctgctgttactggcatttctcccctcatcccgttcctgaaaacggatctgaggccgtcgtcttccactgggtcgcgctcctgttcgctccgtcgtcagaaatgcaggcagcgccagcaggtcttgcttcacgctcctcgcggatggtggcccctccggcccgcgccgatgcagttgaagctccttccgaagtgagtgaaaagtgttccttgctccttccaaagtttagagatcacagcagcgaggcacaaagattaaatagagtttggaatggtcttttagacgccattagacacatgcaagtctcagccgatgagttgaggaggttgaccagacgcaaccatgtgcctgagtatgtagagtacctacgcaaaaatagattatgaagcccatgtgagtgctgttactgaaattgcacaaggtctagaccacgtgagcacagatttggcggaagttcttattggtccgcaacctcttcttgaagattatgaagcccttggtttgtacgatgatttccaatgcgatggtgaagatagctctgtggactcggatgagatcaatgatcgtcgtctatcgcatatgaacgagcgtatatgagatatttgtttgcgagagagttcagtttgccattgatgtctgtagcttatgaagcccttagttagttgccactgttgttcctggtacttgtatgaattgggttatgaaaatgaagagttgtgttatgagttgtattttgtgatcatataatggcttcatgtgataattctgcacctgttgtcactgttgttatgagttgtatcttatgaagcccttagttagttgccactgttgttcctggtacctgttgatcatacaattgttagttgtcactgttgttcctggtgctcatgatttcaagatcattttgataattctacaccttgttgctca

SEQ ID NO: 60514 - DNA, 2292 bp, Zea Mays
cccgaatgaccttttgtgttcgtcgtctccccaaaaggacctcccaagacctggcatctccagcgaatgcgacgccgggaaccaccgaccgtgcgtcctctctcctcgtgcgcttcgcccgtctccacagttggtgcagacagagcttgcttctgaagtgctatagctcctaaaggaccaggtatcatcaacgaatgtatcaagttgaattaactgacactcctcgacatcgacgaaacatcttctgactaggtcgttcttaactattgaggggtgtttactctcttccatctactgcaaaattcaattggaaggatatctaatgtagagttaatttgaaaagactgtatctacttctagaacagactcttttactccgtatataccactacccacaaatgtcgcagaagcacggaaaacccgaagattgttatttaaccaaaatagacttggcagaagagactcaatgatgactacaacgacgacttcacaatgtgcctatttcacaaatgagtacatacagtcacttaaaggttcaaacatggacctctgctcatcaaagaaaagccggacaccagatcttccaagaactgaaaattttctcagattatcagcaacgttttagaaacagtgcaacagtgtttacggggtgaactgctggagttggcgttagatagtcgatggtctactgccgccgtgctctctcactgccagtgtcccaccaccgccatgcatgttttgcggcaattgccggctactatactcctccgtctccaatcatcaggcaccagcttgcgacgcaacttggattctctcctctcctctcctctcgttgcaacaaggcagtccagtgaatgagacggatggccccagctgtgcctgtagctgatgcatgatggagctgagcctgtgggtgggaatctcttctctgctggtggccactcgcctagctccaaaaacacacacacacacactctctctctctctctctctctctctctctctctctctatctagtgggaagtttcacatcactagctccatcgcaattggtatgggtggtgcttctgcacaaaagaaaaaagatgtgcctgtctcactccccaaccaacttgtgaattgtcatgcatcgatcctagctagagcatctccgagagcaaaaacccttgttacagttttccaactcacattctactatatattaggatgtgttgggcacacatggaagtaaggcaaaatgatgcatcgacatgtgatacgtgagcacgtatttcagaacccgataggttggttggagtgggcttcttaaaattattactccgaagcgtgcaattgagattgtagtattataatacccacgtatttgtaaatttgttatcgtcgttgctttaaacacccatctatagctcactcactgctgctgttactggcatttctcccctcatcccgttcctgaaaacggatctgaggccgtcgtcttccactgggtcgcgctcctgttcgctccgtcgtcagaaatgcaggcagcgccagcaggtcttgcttcacgctcctcgcggatggtggcccctccggcccgcgccgatgcagttgaagctccttccgaagcacaaagattaaatagagtttggaatggtcttttagacgccattagacacatgcaagtctcagccgatgagttgaggaggttgaccagacgcaaccatgtgcctgagtatgtagagtacctacgcaaaaatagattatgaagcccatgtgagtgctgttactgaaattgcacaaggtctagaccacgtgagcacagatttggcggaagttcttattggtccgcaacctcttcttgaagattatgaagcccttggtttgtacgatgatttccaatgcgatggtgaagatagctctgtggactcggatgagatcaatgatcgtcgtctatcgcatatgaacgagcgtatatgagatatttgtttgcgagagagttcagtttgccattgatgtctgtagcttatgaagcccttagttagttgccactgttgttcctggtacttgtatgaattgggttatgaaaatgaagagttgtgttatgagttgtattttgtgatcatataatggcttcatgtgataattctgcacctgttgtcactgttgttatgagttgtatcttatgaagcccttagttagttgccactgttgttcctggtacctgttgatcatacaattgttagttgtcactgttgttcctggtgctcatgatttcaagatcattttgataattctacaccttgttgctca

SEQ ID NO: 60515 - DNA, 2123 bp, Zea Mays
gaatgaccttttgtgttcgtcgtctccccaaaaggacctcccaagacctggcatctccagcgaatgcgacgccgggaaccaccgaccgtgcgtcctctctcctcgtgcgcttcgcccgtctccacagttggtgcagacagagcttgcttctgaagtgctatagctcctaaaggaccaggtatcatcaacgaatgtatcaagttgaattaactgacactcctcgacatcgacgaaacatcttctgactaggtcgttcttaactattgaggggtgtttactctcttccatctactgcaaaattcaattggaaggatatctaatgtagagttaatttgaaaagactgtatctacttctagaacagactcttttactccgtatataccactacccacaaatgtcgcagaagcacggaaaacccgaagattgttatttaaccaaaatagacttggcagaagagactcaatgatgactacaacgacgacttcacaatgtgcctatttcacaaatgagtacatacagtcacttaaaggttcaaacatggacctctgctcatcaaagaaaagccggacaccagatcttccaagaactgaaaattttctcagattatcagcaacgttttagcttgcgacgcaacttggattctctcctctcctctcctctcgttgcaacaaggcagtccagtgaatgagacggatggccccagctgtgcctgtagctgatgcatgatggagctgagcctgtgggtgggaatctcttctctgctggtggccactcgcctagctccaaaaacacacacacacacactctctctctctctctctctctctctctctctctctctatctagtgggaagtttcacatcactagctccatcgcaattggtatgggtggtgcttctgcacaaaagaaaaaagatgtgcctgtctcactccccaaccaacttgtgaattgtcatgcatcgatcctagctagagcatctccgagagcaaaaacccttgttacagttttccaactcacattctactatatattaggatgtgttgggcacacatggaagtaaggcaaaatgatgcatcgacatgtgatacgtgagcacgtatttcagaacccgataggttggttggagtgggcttcttaaaattattactccgaagcgtgcaattgagattgtagtattataatacccacgtatttgtaaatttgttatcgtcgttgctttaaacacccatctatagctcactcactgctgctgttactggcatttctcccctcatcccgttcctgaaaacggatctgaggccgtcgtcttccactgggtcgcgctcctgttcgctccgtcgtcagaaatgcaggcagcgccagcaggtcttgcttcacgctcctcgcggatggtggcccctccggcccgcgccgatgcagttgaagctccttccgaagcacaaagattaaatagagtttggaatggtcttttagacgccattagacacatgcaagtctcagccgatgagttgaggaggttgaccagacgcaaccatgtgcctgagtatgtagagtacctacgcaaaaatagattatgaagcccatgtgagtgctgttactgaaattgcacaaggtctagaccacgtgagcacagatttggcggaagttcttattggtccgcaacctcttcttgaagattatgaagcccttggtttgtacgatgatttccaatgcgatggtgaagatagctctgtggactcggatgagatcaatgatcgtcgtctatcgcatatgaacgagcgtatatgagatatttgtttgcgagagagttcagtttgccattgatgtctgtagcttatgaagcccttagttagttgccactgttgttcctggtacttgtatgaattgggttatgaaaatgaagagttgtgttatgagttgtattttgtgatcatataatggcttcatgtgataattctgcacctgttgtcactgttgttatgagttgtatcttatgaagcccttagttagttgccactgttgttcctggtacctgttgatcatacaattgttagttgtcactgttgttcctggtgctcatgatttcaagatcattttgataattctacaccttgttgctca

SEQ ID NO: 60516 - DNA, 1254 bp, Zea Mays
gaatgaccttttgtgttcgtcgtctccccaaaaggacctcccaagacctggcatctccagcgaatgcgacgccgggaaccaccgaccgtgcgtcctctctcctcgtgcgcttcgcccgtctccacagttggtgcagaaacagtgcaacagtgtttacggggtgaactgctggagttggcgttagatagtcgatggtctactgccgccgtgctctctcactgccagtgtcccaccaccgccatgcatgttttgcggcaattgccggctactatactcctccgtctccaatcatcaggcaccagcttgcgacgcaacttggattctctcctctcctctcctctcgttgcaacaaggcagtccagtgaatgagacggatggccccagctgtgcctgtagctgatgcatgatggagctgagcctgtggatctgaggccgtcgtcttccactgggtcgcgctcctgttcgctccgtcgtcagaaatgcaggcagcgccagcaggtcttgcttcacgctcctcgcggatggtggcccctccggcccgcgccgatgcagttgaagctccttccgaagcacaaagattaaatagagtttggaatggtcttttagacgccattagacacatgcaagtctcagccgatgagttgaggaggttgaccagacgcaaccatgtgcctgagtatgtagagtacctacgcaaaaatagattatgaagcccatgtgagtgctgttactgaaattgcacaaggtctagaccacgtgagcacagatttggcggaagttcttattggtccgcaacctcttcttgaagattatgaagcccttggtttgtacgatgatttccaatgcgatggtgaagatagctctgtggactcggatgagatcaatgatcgtcgtctatcgcatatgaacgagcgtatatgagatatttgtttgcgagagagttcagtttgccattgatgtctgtagcttatgaagcccttagttagttgccactgttgttcctggtacttgtatgaattgggttatgaaaatgaagagttgtgttatgagttgtattttgtgatcatataatggcttcatgtgataattctgcacctgttgtcactgttgttatgagttgtatcttatgaagcccttagttagttgccactgttgttcctggtacctgttgatcatacaattgttagttgtcactgttgttcctggtgctcatgatttcaagatcattttgataattctacaccttgttgctca

SEQ ID NO: 60517 - DNA, 1565 bp, Zea Mays
gaatgaccttttgtgttcgtcgtctccccaaaaggacctcccaagacctggcatctccagcgaatgcgacgccgggaaccaccgaccgtgcgtcctctctcctcgtgcgcttcgcccgtctccacagttggtgcagaaacagtgcaacagtgtttacggggtgaactgctggagttggcgttagatagtcgatggtctactgccgccgtgctctctcactgccagtgtcccaccaccgccatgcatgttttgcggcaattgccggctactatactcctccgtctccaatcatcaggcaccagcttgcgacgcaacttggattctctcctctcctctcctctcgttgcaacaaggcagtccagtgaatgagacggatggccccagctgtgcctgtagctgatgcatgatggagctgagcctgtgggatgtgttgggcacacatggaagtaaggcaaaatgatgcatcgacatgtgatacgtgagcacgtatttcagaacccgataggttggttggagtgggcttcttaaaattattactccgaagcgtgcaattgagattgtagtattataatacccacgtatttgtaaatttgttatcgtcgttgctttaaacacccatctatagctcactcactgctgctgttactggcatttctcccctcatcccgttcctgaaaacggatctgaggccgtcgtcttccactgggtcgcgctcctgttcgctccgtcgtcagaaatgcaggcagcgccagcaggtcttgcttcacgctcctcgcggatggtggcccctccggcccgcgccgatgcagttgaagctccttccgaagtgagtgaaaagtgttccttgctccttccaaagtttagagatcacagcagcgaggcacaaagattaaatagagtttggaatggtcttttagacgccattagacacatgcaagtctcagccgatgagttgaggaggttgaccagacgcaaccatgtgcctgagtatgtagagtacctacgcaaaaatagattatgaagcccatgtgagtgctgttactgaaattgcacaaggtctagaccacgtgagcacagatttggcggaagttcttattggtccgcaacctcttcttgaagattatgaagcccttggtttgtacgatgatttccaatgcgatggtgaagatagctctgtggactcggatgagatcaatgatcgtcgtctatcgcatatgaacgagcgtatatgagatatttgtttgcgagagagttcagtttgccattgatgtctgtagcttatgaagcccttagttagttgccactgttgttcctggtacttgtatgaattgggttatgaaaatgaagagttgtgttatgagttgtattttgtgatcatataatggcttcatgtgataattctgcacctgttgtcactgttgttatgagttgtatcttatgaagcccttagttagttgccactgttgttcctggtacctgttgatcatacaattgttagttgtcactgttgttcctggtgctcatgatttcaagatcattttgataattctacaccttgttgctca

SEQ ID NO: 60518 - DNA, 1142 bp, Zea Mays
gaatgaccttttgtgttcgtcgtctccccaaaaggacctcccaagacctggcatctccagcgaatgcgacgccgggaaccaccgaccgtgcgtcctctctcctcgtgcgcttcgcccgtctccacagttggtgcagcttgcgacgcaacttggattctctcctctcctctcctctcgttgcaacaaggcagtccagtgaatgagacggatggccccagctgtgcctgtagctgatgcatgatggagctgagcctgtggatctgaggccgtcgtcttccactgggtcgcgctcctgttcgctccgtcgtcagaaatgcaggcagcgccagcaggtcttgcttcacgctcctcgcggatggtggcccctccggcccgcgccgatgcagttgaagctccttccgaagtgagtgaaaagtgttccttgctccttccaaagtttagagatcacagcagcgaggcacaaagattaaatagagtttggaatggtcttttagacgccattagacacatgcaagtctcagccgatgagttgaggaggttgaccagacgcaaccatgtgcctgagtatgtagagtacctacgcaaaaatagattatgaagcccatgtgagtgctgttactgaaattgcacaaggtctagaccacgtgagcacagatttggcggaagttcttattggtccgcaacctcttcttgaagattatgaagcccttggtttgtacgatgatttccaatgcgatggtgaagatagctctgtggactcggatgagatcaatgatcgtcgtctatcgcatatgaacgagcgtatatgagatatttgtttgcgagagagttcagtttgccattgatgtctgtagcttatgaagcccttagttagttgccactgttgttcctggtacttgtatgaattgggttatgaaaatgaagagttgtgttatgagttgtattttgtgatcatataatggcttcatgtgataattctgcacctgttgtcactgttgttatgagttgtatcttatgaagcccttagttagttgccactgttgttcctggtacctgttgatcatacaattgttagttgtcactgttgttcctggtgctcatgatttcaagatcattttgataattctacaccttgttgctca

SEQ ID NO: 60519 - DNA, 1399 bp, Zea Mays
gaatgaccttttgtgttcgtcgtctccccaaaaggacctcccaagacctggcatctccagcgaatgcgacgccgggaaccaccgaccgtgcgtcctctctcctcgtgcgcttcgcccgtctccacagttggtgcagcttgcgacgcaacttggattctctcctctcctctcctctcgttgcaacaaggcagtccagtgaatgagacggatggccccagctgtgcctgtagctgatgcatgatggagctgagcctgtgggatgtgttgggcacacatggaagtaaggcaaaatgatgcatcgacatgtgatacgtgagcacgtatttcagaacccgataggttggttggagtgggcttcttaaaattattactccgaagcgtgcaattgagattgtagtattataatacccacgtatttgtaaatttgttatcgtcgttgctttaaacacccatctatagctcactcactgctgctgttactggcatttctcccctcatcccgttcctgaaaacggatctgaggccgtcgtcttccactgggtcgcgctcctgttcgctccgtcgtcagaaatgcaggcagcgccagcaggtcttgcttcacgctcctcgcggatggtggcccctccggcccgcgccgatgcagttgaagctccttccgaagtgagtgaaaagtgttccttgctccttccaaagtttagagatcacagcagcgaggcacaaagattaaatagagtttggaatggtcttttagacgccattagacacatgcaagtctcagccgatgagttgaggaggttgaccagacgcaaccatgtgcctgagtatgtagagtacctacgcaaaaatagattatgaagcccatgtgagtgctgttactgaaattgcacaaggtctagaccacgtgagcacagatttggcggaagttcttattggtccgcaacctcttcttgaagattatgaagcccttggtttgtacgatgatttccaatgcgatggtgaagatagctctgtggactcggatgagatcaatgatcgtcgtctatcgcatatgaacgagcgtatatgagatatttgtttgcgagagagttcagtttgccattgatgtctgtagcttatgaagcccttagttagttgccactgttgttcctggtacttgtatgaattgggttatgaaaatgaagagttgtgttatgagttgtattttgtgatcatataatggcttcatgtgataattctgcacctgttgtcactgttgttatgagttgtatcttatgaagcccttagttagttgccactgttgttcctggtacctgttgatcatacaattgttagttgtcactgttgttcctggtgctcatgatttcaagatcattttgataattctacaccttgttgctca

SEQ ID NO: 60520 - DNA, 1895 bp, Zea Mays
gaatgaccttttgtgttcgtcgtctccccaaaaggacctcccaagacctggcatctccagcgaatgcgacgccgggaaccaccgaccgtgcgtcctctctcctcgtgcgcttcgcccgtctccacagttggtgcaggttcaaacatggacctctgctcatcaaagaaaagccggacaccagatcttccaagaactgaaaattttctcagattatcagcaacgttttagaaacagtgcaacagtgtttacggggtgaactgctggagttggcgttagatagtcgatggtctactgccgccgtgctctctcactgccagtgtcccaccaccgccatgcatgttttgcggcaattgccggctactatactcctccgtctccaatcatcaggcaccagcttgcgacgcaacttggattctctcctctcctctcctctcgttgcaacaaggcagtccagtgaatgagacggatggccccagctgtgcctgtagctgatgcatgatggagctgagcctgtgggtgggaatctcttctctgctggtggccactcgcctagctccaaaaacacacacacacacactctctctctctctctctctctctctctctctctctctatctagtgggaagtttcacatcactagctccatcgcaattggtatgggtggtgcttctgcacaaaagaaaaaagatgtgcctgtctcactccccaaccaacttgtgaattgtcatgcatcgatcctagctagagcatctccgagagcaaaaacccttgttacagttttccaactcacattctactatatattaggatgtgttgggcacacatggaagtaaggcaaaatgatgcatcgacatgtgatacgtgagcacgtatttcagaacccgataggttggttggagtgggcttcttaaaattattactccgaagcgtgcaattgagattgtagtattataatacccacgtatttgtaaatttgttatcgtcgttgctttaaacacccatctatagctcactcactgctgctgttactggcatttctcccctcatcccgttcctgaaaacggatctgaggccgtcgtcttccactgggtcgcgctcctgttcgctccgtcgtcagaaatgcaggcagcgccagcaggtcttgcttcacgctcctcgcggatggtggcccctccggcccgcgccgatgcagttgaagctccttccgaagcacaaagattaaatagagtttggaatggtcttttagacgccattagacacatgcaagtctcagccgatgagttgaggaggttgaccagacgcaaccatgtgcctgagtatgtagagtacctacgcaaaaatagattatgaagcccatgtgagtgctgttactgaaattgcacaaggtctagaccacgtgagcacagatttggcggaagttcttattggtccgcaacctcttcttgaagattatgaagcccttggtttgtacgatgatttccaatgcgatggtgaagatagctctgtggactcggatgagatcaatgatcgtcgtctatcgcatatgaacgagcgtatatgagatatttgtttgcgagagagttcagtttgccattgatgtctgtagcttatgaagcccttagttagttgccactgttgttcctggtacttgtatgaattgggttatgaaaatgaagagttgtgttatgagttgtattttgtgatcatataatggcttcatgtgataattctgcacctgttgtcactgttgttatgagttgtatcttatgaagcccttagttagttgccactgttgttcctggtacctgttgatcatacaattgttagttgtcactgttgttcctggtgctcatgatttcaagatcattttgataattctacaccttgttgctca

SEQ ID NO: 60521 - DNA, 1857 bp, Zea Mays
gaatgaccttttgtgttcgtcgtctccccaaaaggacctcccaagacctggcatctccagcgaatgcgacgccgggaaccaccgaccgtgcgtcctctctcctcgtgcgcttcgcccgtctccacagttggtgcagaaacagtgcaacagtgtttacggggtgaactgctggagttggcgttagatagtcgatggtctactgccgccgtgctctctcactgccagtgtcccaccaccgccatgcatgttttgcggcaattgccggctactatactcctccgtctccaatcatcaggcaccagcttgcgacgcaacttggattctctcctctcctctcctctcgttgcaacaaggcagtccagtgaatgagacggatggccccagctgtgcctgtagctgatgcatgatggagctgagcctgtgggtgggaatctcttctctgctggtggccactcgcctagctccaaaaacacacacacacacactctctctctctctctctctctctctctctctctctctatctagtgggaagtttcacatcactagctccatcgcaattggtatgggtggtgcttctgcacaaaagaaaaaagatgtgcctgtctcactccccaaccaacttgtgaattgtcatgcatcgatcctagctagagcatctccgagagcaaaaacccttgttacagttttccaactcacattctactatatattaggatgtgttgggcacacatggaagtaaggcaaaatgatgcatcgacatgtgatacgtgagcacgtatttcagaacccgataggttggttggagtgggcttcttaaaattattactccgaagcgtgcaattgagattgtagtattataatacccacgtatttgtaaatttgttatcgtcgttgctttaaacacccatctatagctcactcactgctgctgttactggcatttctcccctcatcccgttcctgaaaacggatctgaggccgtcgtcttccactgggtcgcgctcctgttcgctccgtcgtcagaaatgcaggcagcgccagcaggtcttgcttcacgctcctcgcggatggtggcccctccggcccgcgccgatgcagttgaagctccttccgaagtgagtgaaaagtgttccttgctccttccaaagtttagagatcacagcagcgaggcacaaagattaaatagagtttggaatggtcttttagacgccattagacacatgcaagtctcagccgatgagttgaggaggttgaccagacgcaaccatgtgcctgagtatgtagagtacctacgcaaaaatagattatgaagcccatgtgagtgctgttactgaaattgcacaaggtctagaccacgtgagcacagatttggcggaagttcttattggtccgcaacctcttcttgaagattatgaagcccttggtttgtacgatgatttccaatgcgatggtgaagatagctctgtggactcggatgagatcaatgatcgtcgtctatcgcatatgaacgagcgtatatgagatatttgtttgcgagagagttcagtttgccattgatgtctgtagcttatgaagcccttagttagttgccactgttgttcctggtacttgtatgaattgggttatgaaaatgaagagttgtgttatgagttgtattttgtgatcatataatggcttcatgtgataattctgcacctgttgtcactgttgttatgagttgtatcttatgaagcccttagttagttgccactgttgttcctggtacctgttgatcatacaattgttagttgtcactgttgttcctggtgctcatgatttcaagatcattttgataattctacaccttgttgctca

SEQ ID NO: 60522 - DNA, 1758 bp, Zea Mays
gaagattgttatttaaccaaaatagacttggcagaagagactcaatgatgactacaacgacgacttcacaatgtgcctatttcacaaatgagtacatacagtcacttaaaggttcaaacatggacctctgctcatcaaagaaaagccggacaccagatcttccaagaactgaaaattttctcagattatcagcaacgttttagcttgcgacgcaacttggattctctcctctcctctcctctcgttgcaacaaggcagtccagtgaatgagacggatggccccagctgtgcctgtagctgatgcatgatggagctgagcctgtgggtgggaatctcttctctgctggtggccactcgcctagctccaaaaacacacacacacacactctctctctctctctctctctctctctctctctctctatctagtgggaagtttcacatcactagctccatcgcaattggtatgggtggtgcttctgcacaaaagaaaaaagatgtgcctgtctcactccccaaccaacttgtgaattgtcatgcatcgatcctagctagagcatctccgagagcaaaaacccttgttacagttttccaactcacattctactatatattaggatgtgttgggcacacatggaagtaaggcaaaatgatgcatcgacatgtgatacgtgagcacgtatttcagaacccgataggttggttggagtgggcttcttaaaattattactccgaagcgtgcaattgagattgtagtattataatacccacgtatttgtaaatttgttatcgtcgttgctttaaacacccatctatagctcactcactgctgctgttactggcatttctcccctcatcccgttcctgaaaacggatctgaggccgtcgtcttccactgggtcgcgctcctgttcgctccgtcgtcagaaatgcaggcagcgccagcaggtcttgcttcacgctcctcgcggatggtggcccctccggcccgcgccgatgcagttgaagctccttccgaagtgagtgaaaagtgttccttgctccttccaaagtttagagatcacagcagcgaggcacaaagattaaatagagtttggaatggtcttttagacgccattagacacatgcaagtctcagccgatgagttgaggaggttgaccagacgcaaccatgtgcctgagtatgtagagtacctacgcaaaaatagattatgaagcccatgtgagtgctgttactgaaattgcacaaggtctagaccacgtgagcacagatttggcggaagttcttattggtccgcaacctcttcttgaagattatgaagcccttggtttgtacgatgatttccaatgcgatggtgaagatagctctgtggactcggatgagatcaatgatcgtcgtctatcgcatatgaacgagcgtatatgagatatttgtttgcgagagagttcagtttgccattgatgtctgtagcttatgaagcccttagttagttgccactgttgttcctggtacttgtatgaattgggttatgaaaatgaagagttgtgttatgagttgtattttgtgatcatataatggcttcatgtgataattctgcacctgttgtcactgttgttatgagttgtatcttatgaagcccttagttagttgccactgttgttcctggtacctgttgatcatacaattgttagttgtcactgttgttcctggtgctcatgatttcaagatcattttgataattctacaccttgttgctca

SEQ ID NO: 60523 - DNA, 1749 bp, Zea Mays
ttttctcagattatcagcaacgttttagaaacagtgcaacagtgtttacggggtgaactgctggagttggcgttagatagtcgatggtctactgccgccgtgctctctcactgccagtgtcccaccaccgccatgcatgttttgcggcaattgccggctactatactcctccgtctccaatcatcaggcaccagcttgcgacgcaacttggattctctcctctcctctcctctcgttgcaacaaggcagtccagtgaatgagacggatggccccagctgtgcctgtagctgatgcatgatggagctgagcctgtgggtgggaatctcttctctgctggtggccactcgcctagctccaaaaacacacacacacacactctctctctctctctctctctctctctctctctctctatctagtgggaagtttcacatcactagctccatcgcaattggtatgggtggtgcttctgcacaaaagaaaaaagatgtgcctgtctcactccccaaccaacttgtgaattgtcatgcatcgatcctagctagagcatctccgagagcaaaaacccttgttacagttttccaactcacattctactatatattaggatgtgttgggcacacatggaagtaaggcaaaatgatgcatcgacatgtgatacgtgagcacgtatttcagaacccgataggttggttggagtgggcttcttaaaattattactccgaagcgtgcaattgagattgtagtattataatacccacgtatttgtaaatttgttatcgtcgttgctttaaacacccatctatagctcactcactgctgctgttactggcatttctcccctcatcccgttcctgaaaacggatctgaggccgtcgtcttccactgggtcgcgctcctgttcgctccgtcgtcagaaatgcaggcagcgccagcaggtcttgcttcacgctcctcgcggatggtggcccctccggcccgcgccgatgcagttgaagctccttccgaagtgagtgaaaagtgttccttgctccttccaaagtttagagatcacagcagcgaggcacaaagattaaatagagtttggaatggtcttttagacgccattagacacatgcaagtctcagccgatgagttgaggaggttgaccagacgcaaccatgtgcctgagtatgtagagtacctacgcaaaaatagattatgaagcccatgtgagtgctgttactgaaattgcacaaggtctagaccacgtgagcacagatttggcggaagttcttattggtccgcaacctcttcttgaagattatgaagcccttggtttgtacgatgatttccaatgcgatggtgaagatagctctgtggactcggatgagatcaatgatcgtcgtctatcgcatatgaacgagcgtatatgagatatttgtttgcgagagagttcagtttgccattgatgtctgtagcttatgaagcccttagttagttgccactgttgttcctggtacttgtatgaattgggttatgaaaatgaagagttgtgttatgagttgtattttgtgatcatataatggcttcatgtgataattctgcacctgttgtcactgttgttatgagttgtatcttatgaagcccttagttagttgccactgttgttcctggtacctgttgatcatacaattgttagttgtcactgttgttcctggtgctcatgatttcaagatcattttgataattctacaccttgttgctca

SEQ ID NO: 60524 - DNA, 9071 bp, Zea Mays
gggtagcgctctttgatttttttagccaccgctttgcacttctgcattatcccccgacgccgctttaatcccagttccatctcccgtagctgtacttggtcttatccgcgtacagagttcgttcatctctccaacacgacatccctctccagctcattccagcgcactgcaccttttgctcgatgtcatccccagctccttcaagcagctgacatctagattcttttcctcactcggccatggtgtccaattcctcaccgtgtgtttcctcccgaccacgcacttccggcaagctgctagagccatctccccttcgagctcctctttcatggtgtcgagccctcttcactcgctatctctgctcagagtgtcgcagtccttggttgggctccaccctcgctggagcccggcggtcgtcgagcatgaagccacgcccagcgcctacgtcgaccatctccctggcgcacctccctgctccatccatcagacgccagtactcatgccaagccatcctcctctctcagttcatcggacgtcgatctccgttgcacttgtctccctcaatgctctccactgtacgcccagttgtctcgaacctcatcgtcgtttctcatctacaatctcgtcagcctctgctcgacatgtgtttggtgaagagcctgagccaagtgttgttgctgcttccagggattcataattaaattggtaatagtactctagctcgctactcctactaattaattcgatgaatagattactaattaattcgatgaatagattggatggatattaattgcgatgctcgaatcagatacttataatgtgctatagtaattatctgtattttattgtatatgtttgctgttaggttatttctctacgggataggatattgtgtttcgcttatttaatcacgttcggtacgtagacttgttaggtgttcgaggaattgtcggaattagaaatcgttgctgttaacgggtgttgagtgaaatatggtcgcaatgagccgtgtcgtttttgctgctattagaattgatgaatggatgtgtctagtattattgaattagttcgatgaatgtgatgggattattttcatgatttagagtagtcgcgttgagtgctattgttaggtttgagatgctaattatgtgacgcacggtaaattagtgaatgaagtttaaatttagtattttaaaaatgtctaatcggggaaccgtcgtcgccctcaaggttatcgggtcgattcgatcagggtaagctgatctattattcctgctagttaaatctagtaaaactagaaaaatcatgattgttgtgtttagtgagttatagatgtctagtgcttacgtaggattatgtcgatgtcttgccgctaaataagtgattctcttttttgtatcatccggttactttatgctcatacatgtgcattgtgtatctcatgaggtacgataattaatcccgtgaggcgaaggaaaagagttaagtcgaccccaagcgcgggctaatccgcaggatgatgctgatgaacgaactggaagatggataatctgaacgagtgccaagccaaaggatgctcgccaagtggtcgccatctaacaaacactaacctagtgttcttccaggcaagccccagtgcatttgccccttccttgtgttttaaatgctttttcaccttatctgatgcattaggtgataggagttgtgtgatgaacaattgatgcattaccattccttggaaactccttaatcccgcttttataaaaaagaactgataatgcttagccctgcttagaaactaaaaatcatttgttttcaaaaagaatgattgtggaacattggttatgggcctttcgtttcaaaaatcaaagcaaacttatggtgatgattccacttcggccggagtgggttcatcattcggaaaagagtacccctgccgggtaccaaaaatgggaaaatggtttgaatacatctagaccagacgctgagcggacaaggtcgcctgtctgtgtcgattaaggaccgttcgatgtaggcctgttgtggtggagactttgcaactagccacatgctccggtaagcctgaacccggctattccatacgtgaaaagacaaccgcgcactgggcgtgggagatggtgggagtagcatgtaccctcctagctagaggctggatggaggagtactgtgctcccgggtagcgcggaccagttcacgttgtggaggatctgtgggaacggttgacatatgcaagggttaagtgctacatatgtcgtgtggttagggatccccagctgggtataatcggttcgaatcgtcgttgctccgcggtcatggagactctaccctccgaccactcatcgtagttgacaagtgaaatatgaattagctaaaagaaagctagaccaggacaagtggatgctctagattaggcaaatctagattcagggaaagtacttaacttgtgaagtaaaattttggcataaggattcactactagtaagctcttctgcaaaatgagtccttgaaatttgataagccttaccttgattcctaatgagccatcatatccttgagagtcttttctttagtcgggtaagtcttgctgagtaattccatactcagggttttattccctgttgttttttcaggtcatagttttgtgctgctgatggtggtgttaagtgccggtgggctcggccttcttataagtctaagtaacccttctatacttcttattgagggtggtcacttgagctaccatatatttcaaacttatactttcgtaatcactccgatgaatataatgtaaaatttttgtaacttgtaaactttggtaataagatttccgctgcaaaaatattgatgtgtgtgatttgtgttacttaatcctgtggtcctggttgtaagtggtttatccgatgtccttggggcaatcggacggatcctattaagttatctggtgcacatgcagagccgtctgaggtctttgagacaaggacaggtgcatgtgggcccgataacttgggaggttctgccacagctggtatcggagcgggattaagtatatacggtcacatacgtattttcaaaacaaaagttttggttttagaaaacctattttcaactaaacacattgtttggctttgaaaaacagttttgaaaaactataatgctagcgacatcctctgttaagccctatattaaggactatcaggtggcttagttcaaaaccagtaacccacaaccgggggtattgcatacatgtgtattgttatttttgaggccattcagtcttgaatggatcgacgctcaggtaaggtgagatgtgagagcatgaccgaacaaccgtcggtctagggaagtgcttaattgtggcgcttgattatatacatgttacacatatgtatatatgaaggctgcgatgtggagtatttaatttttttggaattcagtaccccatggaggtgtatgggtatacagacatgggaatactgagaagtgtaatgtacttgtaacgacgcacctacgctcaggtaagaaagtgagttaccataatgagttgccctatggttaaagtgtggcaacggcgcctatgcgtggctcggcgcttaatgatgagctagcctccatatagcaatatatggagtataaactgtgataaactgtcatgtctgaactgcatcatgggaaattgggctgtgatgaaaattttctgcaggtacactaacctcgaaaacgtatgtgtagctgacgactagcaaaataccgtgagagtcgtaagtatgccaccgatatagaacgttattgcacagtaagttggcgaaactcgtgaggacgcataagacgagcatgcatcctgattgttgcattatgtttgtcacctatacacccaagatgcttctctcatctttattccagtaactagtgattgtagatagtgttgtgttatgaaccccaatgaaataggtgtcctccattctttaggtaataagtttaggtgctatatgtgtttgctcttgtgcttgatgtgtcgatagaaggttagtgacttgtttgcctaaacccaaagttaggccatgttcttatttagtgaaccacaacccaaatttgaaattgttcatgaccaaactcatacaaataaatgcgtagataatttccttattggacgtaaagtgtacccaagcttaaaacaagaatctcaagtcatgtttccaaccaaaaccattcccttgtttagttggtgcaagctgatgtaccttatccagtttgcgtgttcttgaatattgtcgtgttgttttaccatcttaatttaggaaagcatgtccgaccattttcttaagtttgatgcctttggtttccctatacttatcgaaggcataccaacttaatcttatgattgtttttcccccgtatctaatcagatactgatccttgaccttctaatctctatgatgggcatacaaatatgcttggggctgaattaacagtctcccatcgtactcctttcattaacaagtttaggttatggccatgtcttgttcatttcatcgggccataatctatttggctctctacttgtaaccatacttacaggtggagtatttctttgtatattatcaccttgctcaatccatttgtgtggcgcgagatttcttattggttacgtctggtaatggtgttatgactaaaaccgatggtgccgcgacgagaccgagggcctcctgtgaatgtacacacatggttgtgctgctcggcgcacgctagtatcatggttagtagttgtaatccattatgagactatatcaatgtgttatcttagcacaatctgtttttgctacgtgagattcattattggtgccagttttgtaatggtgtcatggttaggaacttatggtaccgcggcgaaactaagagccccttgtgaatgtacacgcaaggttctactgcttggcgcatgccgatatcgaagtctctagtcatgatccgttatagaattacactggtgtgttatcttccgtggatatcttctttgaaacgatttgtatgttgtttgtcaagtgatcaagcaacatctatcatctctgttggatcaaaaggtaatacccctttcatgtgtggtctcttttccttgactttgatggtgacttcacacatacactttccctttgcatcctttgtgtaaaggtgaagccttgaagctttttagtgttggaagacaactgattagctctcaaaatggagatctattttccctgtcgttgagatgcaggagtttgatcattcactctcttattaatccctatattctttaaccaagtggataattcatctcgcatgaagaaatggatgaacaacctgaccaaatggatttctacccaaatgcttgatctcctgctagtaaatgtgaactctcaacccttggcttaccgatggtactgagaggacctgctcaatgtaaaaagtagttcaacaagttggttttactaacttgtaactgccttgtgaacaaaggtggagtttagagatcgttttatcgagttgtctaaactcactttgactcaacccaccctaaagaaagtaattacaagaattgagattaagtcggccagtaaccacctaatcatctctctagtcatgtctcgatcgcctcacgtatggttttccgatgtgtgtgatcaggtcgagccatgcctagtgctcgataaaatggattggttgcgaagtcaacatcaacggatctcttcattgatattttccgagtctccatcattttcttggacttggattctctggctaacacgagttaacggtgatgttactcgacattcacacccgtctcgtgtgctatgaacttatcgcgaccacttgttggtaaacctccttctgtgtgttttacccaagatggtgcatctgagtctgtttaggtaaagttgcagatctatcgctcgctcagcagactcagatagtacagtgtcatcagaaaaagcaaactgcacacatggaaccttatgtgttcccagggcagacatcgtctctattggtggacatctctaaattagcttgtgatgatacatgctatatccactaaaggaaccctattctgagatactcgccttcgctggagactgccttatgattgtcgctggtatagacatgggttacatgcttctctactcttaaaagtctttcgctccgaatctcgggacgagattcttttaaggggagagggctgtaacaccccagatgttactgtacgtcaacagcgattatggatttaagcgcgggatatcagtaaataaagtggacactgcatttttatcatctcgcaaaggttcgagcttggtgtcgtatttaattccgtaatctacgcaattaaaaaggggttgagaaactcttggattatcaaatctttgtttgctagcaaattttgaactgttcggatcacgctcgtaagtgaatacaaaaatcagaaggcttctgattttatgtaaaatctggaacccacgctatccgaaaagaacaatgcgccagcacattaagtgaatcgttcctctcaacatgtgatcattggtgtttaatcaaatgatcgaccgctggtgaggatcgtaaaaattagacgaaactaattaacagtctctctgtcttaatctgtttcgtctgtcgttagttcgacgtcatttttatctatccgggcttttccaaaattttcgtgatgttcggaacataattgttccgaaaatcagcgagtctagtgattattcaaaattcattgatcgcgcacatacgaatttggaaatatagttcagccctttgagttcattccaaataaattaattaggactcgatgataaaagtattaatgtaaaattaaattggaccgagataatcagagccgaaatcgaataattcttaatcaatttggtttcaactgagatcaaccacagactaaaatattgaaggcaatgtcgtttagtatggtctataaacacctcacctgaaccaatttctaggacacatatttatccacatgtttttataaaaaaagagaagaaaaattctatttttctttcaccattttatatccccagcattatctcttctcatcatcactcctctcatctaatgggtagcgctctttgattttttagccaccgctttgcacttctgcattatcccccgacgccgctttaatcccagttccatctctcgtagctgtacttggtcttatccgtgtacagagttcgttcatctctccaacacgacatccctctccagctcattccagcgcactgcaccttttgctcgatgtcgtccccagctccttcaagcagctgacatctagattcttttcctcactcggccatggtgtccaatacctccacccatgtgtttgctcccgaccacgcacttcctgcaagctgctaagccatatccccttcgagctcctctttcatggtgccgagccctcttcactcgctatctctctgctcagagtgtcgcagtccctggttgggctccgccctcgctggagcccggcggtcgccgtggtctcggatgctgtctttatcttccatggtgtttgtcgtgagctccacgtacggctccggccatcgttcctctcgtcgtgatccttttctgctcgtcctcagcatgaagccacgcccagcgcctacgtcgaccatctccctggcgcacctccctgctccatccatcagacgccagtactcatgccaagccatcctcctctctcagttcatcggacgtcgatctccattgcacttgtctccctcagtgctctccactgtacgcccagtcgtctcgaacctcatcgtcgtttctcatctacaatctcgtcagcctctgctcgacatgtgtttggtgaagctgagccaagtgttgttgctgcttccagggatttataattaaattggtaatagtactctagctcgctactcctactaattaattcgatgaatagattactaattaattcgatgaatagattggatggatattaatcgcgacgctcgaatcagatacttataatgtgctatagtaattatctgtcttttattgtatatgtttgctgttaggttatttctctacgggataggatattgtgtttcgcttatttaatcacgtccggtacgtagacttgttaggtgttcgaggaattgtcggaattagaaatcgttgctgttaacgggtgtcgagtcaaatatggtcgcaatgagctgtgtcgtttttgctgctattagaattgatgaatggatgtgtctagtattattgaattagttcgatgaatgtgatgtgattattttcatgatttagagtagtcgcgttgagtgctattgttaggtttgagatgttaattatgtgacacacggtaaattagtgaatgaagtttaaatttagtattttaaaatgtctaatcggggaaccatcgtcgccctcaaggttatcgggtcgattcgatcagggtaagctgatctattattcctgctagttaaatctagtaaaactagaaaaatcatgattgttgtgtttagtgagttatagatgtctagtgcttacgtaggattatgtcgatgtcttgccgctaaataagtgattctcttttatgtatcatccggttactttatgctcatacatgtgcattgtgcatctcatgaggtacgataattaatcacgtgaggcgaaggaaaagagttaagtcgaccccaagcgcgggctaatccgcaggatgatgctgatgaacgaaccggaagatggataatatgaacgagtgccaagccaaaggatgctcgccaagtggtcgccatctaacaaacactaacctagtgttcttccaggcaagcaccggtgcatttgcctcttccttgtgttttaaatgctttttcaccttatctgatgcattaggtgataggagttgtgtgatgaacaattgatgcattaccattccttggaaactccttaatccgggttttataaaaagaactgataatgcttagccctgcttagaaactaaaaaatcatttgttttcaaaaagaatgattgtggaaca

SEQ ID NO: 60525 - DNA, 1057 bp, Zea Mays
gttcgatgtaggcctgttgaggtggagactttgcaactagccacatgctccggtaagcctgaacccagctattccatacgtgaaaagacaaccgcgcactgggcgtgggagatggtgggagtagcatgtaccctcctggctagaggctggatggagtagtactgtgctcccgggtagcgcggaccggttcacgttgtggaggttctgtgggaacggttgacatatgcaagggttaagtgctacatttgtcgtgtggttagggatccccagctgggtataatcggttcgaatcgtcgttgctccgtggtcatggagactctaccctccgaccactcatcgtagttgacaagtgaaatatgaattagctaaaagaaagctagaccaggacaagtggatgctctagattaggcaaatctagatccagggaaagtacttaacttgtgaagtaaaattttggcataaggattcactactagtaagctcttctgcaaaatgagtccttgaaatttgataagccttaccttgattcctaatcagccagcatatccttgagagtcttttctttagtcgggtaagtcttgctgagtaattccatactcagggttttattccctgttgttttttcaggtcatagttttgtgctgctgatggtggtgttaagtgccggtgggctcggccttcttataagtctaagtaacccttctatacttcttattgagggtggtcacttgagctagcatatatttcgaacttatactttcgtaatcactccgatgaatataatgtaaaatttttgtaacttgtaaaatttggtaataagatttcctctgcaaaaatattgatgtgtgtgatttgtgttacttaatcctgcggtcctggttgtaagtggtttatccggtgtccttggggcaatcggacggatcctgttaagttatctggtgcacatgcatagccgtctgaggtctttgagacaaggacaggtgcatgtgggcccgataacttgggaggttctgccacaccgggcgtaccgagggaagttggtgatcattccttaaac

SEQ ID NO: 60526 - DNA, 4818 bp, Zea Mays
aggaggaagaagcaggcaaacaaagcagaagctccgtcccatccccggcagtcccctccatccaagtgatttcagtgcttttgtaccgctggcagatcttgaggaatttactgagaagacaaagaatgatctgttagaccgagctccaaatatgaaagttaaaagaaaatatgttcaagtatttaatgatgctgtggagcagatctgcaaggcctacaatgagttgccaaaaacatctgaagctgcaaatggagcattgcctgatcagagtgaaaagccttcagagcaccttgtgaggtcacaggatgttggtgagattccaggattgggacaaatggaaggtgatagccctactgattactcgcatacttcagcgaaaaggccagggaccgaggaggatgtcaaagatgatggtcatgaaatatgtgatcattctttagcagtttatcaaaagaaaacatctttactagaggatcctaagcatcccatgacaaagaagtctgctgcatccaagtcttctcttgacatttacatggaacaggagcattcaccaacatctgtccgtgctgaaagggaggctgaagaggtgaaaattgaaaaagagagctgtcccctagatggttttattttggaacctaacttggaggtagtttgtgcccttgaagtgccaaagaaatctaaatccaacaagccgttgaggaatgctgaaaggaaggaaaacaaacgtgctggtattggtagccctattgaaaggattgttgctgaggctgcatctgatgttgtattaaacatgagtgctgacaaagagagcagagaatttaagaagtcaaaaatcatgacaaaacaatcactaactactgattcagagaaaatggattataataaaattgtgcatggcgggcctgacgagcaattgactggaaaatcatctgcagggttttcttccaataagaaatcgctgccagatagtgggcagcacaagatggacagtagtgctgatacacgtccgggaaaaaagccaaggcttatggacagggctggtgaaacagataagacagttgacaagagtgagatgaagtcaaacattgattatggaaagcattatgctgtgaaacatgagcggcctacctctatggaaacgtgtaaaaacacgattcttaagaccagtaccagcgatgatagggcactgagatcaggtggtgttgtatcacccatatcaaggcttcattctgaggtcatggaaccagcatgtggttctgtgacactgtcaactgttgctgattctgttaaaaagggttccagcatgaaggaggatgcctcacgtgttgataggcaattggtgaaacctaagagaagagcatgtcgttttgatgaagatgaggatgaaggacagcgaacaccacttcatagaacttctgctaaatctctctctacacatatagtcccaactgagaaagcaggtattcggggaaaattttcttctcatgttggcaatgtttttggaaaaaagttaggccctgcaagagaagagaaatcaaggagtgttaggatgtcacctgtgaagcatgagccaattttttcttcaccgagtcaggataaagtgcatgctagacaccaggtagtcgagaaaagactgatcacagggttggttgagactcctgctgtcattggtaacaaaatgagcctggttgatggcaaatcctctgctcaagtaaaaatgccggcatcctctgaggtgaagaaacttcgtagtagttcttctaaaccatcacacctaacatctgggaactcccattcccgaaactatcctgccccagaaaagatccccttgctgccccaaccagaagaaacaaaggctaaatctaagctagctacgtctgttgagcataaggtgggcaccactttgtcaactgaacagagtgggaagcgggatcacttgaaagaggaaagatccagttatgttgataaagcagtttcttctgaacctaaccctggctcggccaagtcaataaaacatcttattgcagctgcccaagcaaggaggaaccttatggcttctgttcatgcaaaatttgatgggtcttcgactgataatgctgatattacgtccacaccatatggtttgccgggactaagccctagtcctgttttccgcattccatccccacccagaattgcttttcccgggagtcctggtcaacgtattctgaaaagcccaatagagtttgacaatggtcatggaaagagtcccaaatctaggcaggccagcggttcacctagtggtggtactgatgcagctattgctcgtgatgctttggagggaatgatagagactttatcgaggacaaaggatagtataggacgtgcaacacgccatgcaattgagtgctctaaatatggcattgctggagagattgtcgagcttctcatacagaaattgcagagcgagcctaattttcatcgcagaattgacctcctttttcttgtagattccataacacagtgttctcattctcagagaggagttgccagggcttcatatgttcccactgttcaagcggcattgcctcgtcttctcggtgctgctgctccacctggagctggtgctcgtgaaaaccggcgccagtgccttaaagttttaagattgtggcttgagagaaagattatgccagaagacatactccggaagtacatgggcgacattgaggtgccaaatgatgatactagcactactttaatgttgaagcgaccatcccgtgctgaacgttctgtagacgatcctattagggagatggatgacatgcttgttgatgaatatggaagcaatgcaacttttgagctttctggaattttatcatcaaaagtgtttgaagatgatgaagacttccctaaaaataatgggtcatcaccatttgtttcacaggcacggcctgttgaaaatgatgtcatacgaaaaactgaagatactattgctccagtatatgttgaggaacacattattatagtagagaatgtaactactgatgctgctatggaagatgctttagagttaccaggcaacaaacaacagactgatggagctgtccttattgaacacgactctattcaagatccaggttcagagcaggcaattgaccagaatgactttccctctctacccgatggccctccaccgcttccgtcagattcaccaccacctccacctcctttgcctccttcaccaccacctgttacaccgccgcctccgccaccacctccactttctccagcttcaccacctccgccaccacctcccccactgccatctggaccacctcctcagcctgctccaccacctctggcaacccaggtcacacctcttccttctattcctccgcctgttccttcatctccaccatcattgagttatcagcctccagctcctgagtactttgtgacggccaatggtgatcaattaacccagatgacaggaaatatattgattcaagctattggaaatgcaacaaccttcattcctagtggaccagttaatggacaagctgcggttaattttgttacttcgatgcaggcagaatatggaaacaataacatatttatggcaccacaagcttctaatggtaattaccagtttcggcccactggtgtaccttttcagcaagggaatttcagtgcctttccatctgcacaaacacatccagttcaacctcactctcacatggcacacatgaatcccatgggccaacaagctgtaccacccacgctcaatccttatgctgtgcagtcatttccaaacagtcagagccattatccatccgaggaacattggcggatggcatctggtaacttcagcccagatggccagcataattggctagccggtggcggagcattaccttgctcagaagggccatatgtgcaggatggatattcaaggtcaaacattgacagatcttcaattaatcctatgaaccatcaacatactgttctgaatcatttgccgtatggagcaccactaccaggccatgttccgcagatgctaccagccaggtctgatgtccacactcttaattgctggaggccctcttgatagagttgtaaactgaacttctttatggttttaacgtggaaagctcagaacactggaggcaatttgaattgagtgcaacaattcatggctttgttagtctgtgagatgcacttgcctcattgcctgggtgtaacgatgagatctgccatagtatatggaatggacattttacaatgtctgaagaacgatagccgaacgatgacagggtttgatttgttgatgcgtcgttttggttctcacccgagccagtttttgaagtgaaagcaataataatgttgttggtgcaccgctgaggtgtttaggttttactgctggtttggtgttgggtgatggttcctatcatctcactaaacaagattgttgactgtacatctgggagggaggtgatctgggatattgaggtgggtatcatcatgtgacggcgaggcacttggtgccaaatcgtactgaattttgttatctgggtctcagtctgctgcttttgtcccgcccgtattcgtttattcccgcaggggcaggggcaggaccctgttggctggccaggccacatatcctttttagtcccaagcaagttggagagccacacagtatatattatataaataatagtgagacatatttttttatgagattacttaaaagcaaatcatctctcgtcgtcgtgatacatggtttgttttcctcttttcgtcgtcctactcctgccttaccacaagcaggcacggaaggct

SEQ ID NO: 60527 - DNA, 5208 bp, Zea Mays
cgcgccgcgctgttgagaggagggagacgcgaggaggaagaagcaggcaaacaaagcagaagctccgtcccatccccggcagtcccctccatccaagtgatttcaggtatcagctaccgagaaacggagaaggtgaccgcacctcacgcaattcgcccccgccccgccgtcctttccctcctctagggttgtcttgtgggtgcctctgcttcccaccctaggggcaggtccagggccggtccttcttctcgccccgcccccgctgctctcttctctgctgctagagttaggttagtgttcggcgctggggggaggggcgtcctcctccctcgccgtcgccgccaatgcctcccggcggtaggcgcggcgccaagcagcggcccaactggaccagggaaccccagctaggtgacctcgtcctcgccaagatcaaggggtacccgcgttggccagctaagatcagcaggcccgaggaatttaatcatgagccaacgccaaaaaagttctttgtctacttctatggcaccgatgagattgcttttgtaccgctggcagatcttgaggaatttactgagaagacaaagaatgatctgttagaccgagctccaaatatgaaagttaaaagaaaatatgttcaagtatttaatgatgctgtggagcagatctgcaaggcctacaatgagttgccaaaaacatctgaagctgcaaatggagcattgcctgatcagagtgaaaagccttcagagcaccttgtgaggtcacaggatgttggtgagattccaggattgggacaaatggaaggtgatagccctactgattactcgcatacttcagcgaaaaggccagggaccgaggaggatgtcaaagatgatggtcatgaaataggagcattcaccaacatctgtccgtgctgaaagggaggctgaagaggtgaaaattgaaaaagagagctgtcccctagatggttttattttggaacctaacttggaggtagtttgtgcccttgaagtgccaaagaaatctaaatccaacaagccgttgaggaatgctgaaaggaaggaaaacaaacgtgctggtattggtagccctattgaaaggattgttgctgaggctgcatctgatgttgtattaaacatgagtgctgacaaagagagcagagaatttaagaagtcaaaaatcatgacaaaacaatcactaactactgattcagagaaaatggattataataaaattgtgcatggcgggcctgacgagcaattgactggaaaatcatctgcagggttttcttccaataagaaatcgctgccagatagtgggcagcacaagatggacagtagtgctgatacacgtccgggaaaaaagccaaggcttatggacagggctggtgaaacagataagacagttgacaagagtgagatgaagtcaaacattgattatggaaagcattatgctgtgaaacatgagcggcctacctctatggaaacgtgtaaaaacacgattcttaagaccagtaccagcgatgatagggcactgagatcaggtggtgttgtatcacccatatcaaggcttcattctgaggtcatggaaccagcatgtggttctgtgacactgtcaactgttgctgattctgttaaaaagggttccagcatgaaggaggatgcctcacgtgttgataggcaattggtgaaacctaagagaagagcatgtcgttttgatgaagatgaggatgaaggacagcgaacaccacttcatagaacttctgctaaatctctctctacacatatagtcccaactgagaaagcaggtattcggggaaaattttcttctcatgttggcaatgtttttggaaaaaagttaggccctgcaagagaagagaaatcaaggagtgttaggatgtcacctgtgaagcatgagccaattttttcttcaccgagtcaggataaagtgcatgctagacaccaggtagtcgagaaaagactgatcacagggttggttgagactcctgctgtcattggtaacaaaatgagcctggttgatggcaaatcctctgctcaagtaaaaatgccggcatcctctgaggtgaagaaacttcgtagtagttcttctaaaccatcacacctaacatctgggaactcccattcccgaaactatcctgccccagaaaagatccccttgctgccccaaccagaagaaacaaaggctaaatctaagctagctacgtctgttgagcataaggtgggcaccactttgtcaactgaacagagtgggaagcgggatcacttgaaagaggaaagatccagttatgttgataaagcagtttcttctgaacctaaccctggctcggccaagtcaataaaacatcttattgcagctgcccaagcaaggaggaaccttatggcttctgttcatgcaaaatttgatgggtcttcgactgataatgctgatattacgtccacaccatatggtttgccgggactaagccctagtcctgttttccgcattccatccccacccagaattgcttttcccgggagtcctggtcaacgtattctgaaaagcccaatagagtttgacaatggtcatggaaagagtcccaaatctaggcaggccagcggttcacctagtggtggtactgatgcagctattgctcgtgatgctttggagggaatgatagagactttatcgaggacaaaggatagtataggacgtgcaacacgccatgcaattgagtgctctaaatatggcattgctggagagattgtcgagcttctcatacagaaattgcagagcgagcctaattttcatcgcagaattgacctcctttttcttgtagattccataacacagtgttctcattctcagagaggagttgccagggcttcatatgttcccactgttcaagcggcattgcctcgtcttctcggtgctgctgctccacctggagctggtgctcgtgaaaaccggcgccagtgccttaaagttttaagattgtggcttgagagaaagattatgccagaagacatactccggaagtacatgggcgacattgaggtgccaaatgatgatactagcactactttaatgttgaagcgaccatcccgtgctgaacgttctgtagacgatcctattagggagatggatgacatgcttgttgatgaatatggaagcaatgcaacttttgagctttctggaattttatcatcaaaagtgtttgaagatgatgaagacttccctaaaaataatgggtcatcaccatttgtttcacaggcacggcctgttgaaaatgatgtcatacgaaaaactgaagatactattgctccagtatatgttgaggaacacattattatagtagagaatgtaactactgatgctgctatggaagatgctttagagttaccaggcaacaaacaacagactgatggagctgtccttattgaacacgactctattcaagatccaggttcagagcaggcaattgaccagaatgactttccctctctacccgatggccctccaccgcttccgtcagattcaccaccacctccacctcctttgcctccttcaccaccacctgttacaccgccgcctccgccaccacctccactttctccagcttcaccacctccgccaccacctcccccactgccatctggaccacctcctcagcctgctccaccacctctggcaacccaggtcacacctcttccttctattcctccgcctgttccttcatctccaccatcattgagttatcagcctccagctcctgagtactttgtgacggccaatggtgatcaattaacccagatgacaggaaatatattgattcaagctattggaaatgcaacaaccttcattcctagtggaccagttaatggacaagctgcggttaattttgttacttcgatgcaggcagaatatggaaacaataacatatttatggcaccacaagcttctaatggtaattaccagtttcggcccactggtgtaccttttcagcaagggaatttcagtgcctttccatctgcacaaacacatccagttcaacctcactctcacatggcacacatgaatcccatgggccaacaagctgtaccacccacgctcaatccttatgctgtgcagtcatttccaaacagtcagagccattatccatccgaggaacattggcggatggcatctggtaacttcagcccagatggccagcataattggctagccggtggcggagcattaccttgctcagaagggccatatgtgcaggatggatattcaaggtcaaacattgacagatcttcaattaatcctatgaaccatcaacatactgttctgaatcatttgccgtatggagcaccactaccaggccatgttccgcagatgctaccagccaggtctgatgtccacactcttaattgctggaggccctcttgatagagttgtaaactgaacttctttatggttttaacgtggaaagctcagaacactggaggcaatttgaattgagtgcaacaattcatggctttgttagtctgtgagatgcacttgcctcattgcctgggtgtaacgatgagatctgccatagtatatggaatggacattttacaatgtaactagtcttggcaacagcatccagcagactaatctctcttagtgtctgaagaacgatagccgaacgatgacagggtttgatttgttgatgcgtcgttttggttctcacccgagccagtttttgaagtgaaagcaataataatgttgttggtgcaccgctgaggtgtttaggttttactgctggtttggtgttgggtgatggttcctatcatctcactaaacaagattgttgactgtacatctgggagggaggtgatctgggatattgaggtgggtatcatcatgtgacggcgaggcacttggtgccaaatcgtactgaattttgttatctgggtctcagtctgctgcttttgtcccgcccgtattcgtttattcccgcaggggcaggggcaggaccctgttggctggccaggccacatatcctttttagtcccaagcaagttggagagccacacagtatatattatataaataatagtgagacatatttttttatgagattacttaaaagcaaatcatctctcgtcgtcgtgatacatggtttgttttcctcttttcgtcgtcctactcctgccttaccacaagcaggcacggaaggct

SEQ ID NO: 60528 - DNA, 856 bp, Zea Mays
  misc_feature (856)..(856): n is a, c, g, or t
gaccagcaccagcgtccggttcgctgcaccactctggagccagcactgcaggaccaggacccagacctggagctgatgctgatgcctcctccacgcataatgccaatgccactccccactctcagcctccaagagctttcactgattggagcgcgtccaacagtgcctttgccgcacagcccgcccctgctaccaccaatacacccttccactacaacctctcccagtcttatgccctatggacccattacatgctcaacaagaatgtatcctactctacttactctacaccacatgagccgttgcgccatacccacatcccggataagtattcaggttgtgcattcagccttgggtttgactctttcactacgatgtcccttggaccaaatatttgtgccaacatgacgcccatggaaagatctatatctgccaaagaacctgagaattcagaggatttgcctacagtagttagaagcagtgatgaaatggacactagaaacagtggcgacgttcgtcgtgacacagttgacactcttcctgagtcgaagcagagccatgaaagttgcgcttctaagttcgactctggagagtaccaagtcattttgcgcaaggagttgactaagagtgacgttgcaaattccgggcgaattgtgcttcccaagaaggatgctgaggctggtcttccaccattggtgcaaggagatcctctgatactacagatggatgacatggtgcttccgattatatggaaatttaagtatagattttggccaaacaacaaaagcagaatgtatattctggaagctgcaggtgaattcgtgaagacacatggccttcaggcaggggatacacn

SEQ ID NO: 60529 - DNA, 1641 bp, Zea Mays
  misc_feature (1641)..(1641): n is a, c, g, or t
tccctttttctggcgatcgaatccaacagaaggcaaggaaaggagaagaggcttcaccatccatgcggcgtgtgtagagagagagagagagagagagagaggggtagcagtagcaagcaagggcaggccaggccattgcaggaccagcaccagcgtccggttcgctgcaccactctggagccagcactgcaggtgggcgccgtgggtgtggttggggtgagagagagagagagggagggcgtctgcgtctggccctttcaccttctcgcgtagtccgtagagatagagtgccgccgccgccgcctgcatcctgctaccacgggtcgagacgggtagatgaggaggaggaggagaacagctcgtcactgacgctgtgagttgcggggcgaccacatccatccgttccccctttcccttctccatttcccctttccggagccagggtaatggggcagatgggaggaccagacggcgacggcccgcaccaccagtaccactaccaggcgctcctcgccgccgtgcagaaccccagccagggcctgcacgtgcctctccacgcaggagcgggagcgcccgccgccggtcagtcactctcttccccttccccccctccgcattcccttccttcctcaccggatgtataatattggccggtgtttggatggattagggacgacacctggaataaatatatacatacaagtaccattcgattttgcaatccggccacacacctcactggtgcttaatctgttcctccaccactgtccactgctgctgatctatactttattacagtagggtagttatcagaatccaagcctattccatcgaatgaccaggacccagacctggagctgatgctgatgcctcctccacgcataatgccaatgccactccccactctcagcctccaagagctttcactgattggagcgcgtccaacagtgcctttgccgcacagcccgcccctgctaccaccaatacacccttccactacaacctctcccagtcttatgccctatggacccattacatgctcaacaagaatgtatcctactctacttactctacaccacatgagccgttgcgccatacccacatcccggataagtattcaggttgtgcattcagccttgggtttgactctttcactacgatgtcccttggaccaaatatttgtgccaacatgacgcccatggaaagatctatatctgccaaagaacctgagaattcagaggatttgcctacagtagttagaagcagtgatgaaatggacactagaaacagtggcgacgttcgtcgtgacacagttgacactcttcctgagtcgaagcagagccatgaaagttgcgcttctaagttcgactctggagagtaccaagtcattttgcgcaaggagttgactaagagtgacgttgcaaattccgggcgaattgtgcttcccaagaaggatgctgaggctggtcttccaccattggtgcaaggagatcctctgatactacagatggatgacatggtgcttccgattatatggaaatttaagtatagattttggccaaacaacaaaagcagaatgtatattctggaagctgcaggtgaattcgtgaagacacatggccttcaggcaggggatacacn

SEQ ID NO: 60530 - DNA, 1610 bp, Zea Mays
attcattctaacatcagccgtaggattcggatccagtgaacaaccggattcttccaggcgcttcctcccactccaaatttctctcctcgcgctctcctcaccaccacccgcctctcccccacgcttgcccacgccgcctcctctccctccccgtctcccctacgagggtgctactaccaccttaccggcgttcgagaccgaggtggcggctttgccggacaaggacgatcctccgcgggcgccgccgccacagagtagatggacgcggagaggatgaatgccctggaatatatgttcacgcgactgtccctcgccgacgacacgtgcctgaagccgttcgctcatcgacctcatcaacattgtgcttgattcacattgcaatagctcctgcgtggtaacctgatatccagatgtccacttagtcaaatccgagtgcttaagtattaacagtgattggatctggacttgtgcacaccggtaaacacatgaacagaggagattaaggattaccgtcatgtagatcttggcacggcaatggtagctggtcgccgtaggtgtagccactgtccgtcctgcagaaaaggaagggctcggatccagttgctggcgcagagatccgaagccgccatgggaagaactcttccagtcactccgacttataggcgatgagtccttctgtggattagggtttagggcgaggtacttttctgctaccctttaatactttatatagcgttgtgtgaccggtgcctccaaccgaggtcagcgtggaccctcccaatcaatgacccgtttaaagagatggatggttgggtttagcccaatccggtcactcagctgtcagttggttgttagaccttcgttgctttgcacgtgaaattgtagttttccacgtcttgcatgacatatacatttatattcatctttaggtcaactcagctaattatatggatacaattatatggatactgttatattcttttgtttctttatacttttttgctgacgactacatcaactaccttgcatattttataaatacataaactgttgttcatgactaacaaaacttaccaatcataattttacagctctctcattcgcctgaccgacatcgtgattggttcacacttcaaaaccttctgttgcctgatctattacattttcagatgacaacaacactacgaataaaaggagtgacgcctacagttagccatagcatctgatgcttttgttaaatgcagctcagactgatgatatggttaactagatgtaatatataactactacttttgatttgatgcccactgcggttctaggacacccatagcaagaaacgaccctctttttgcatgtatacatgtcagtatctcatactaccaaaacaaacacttgatgaagacatagatgtgtagccttgcaatgtcatactttaaatctacaaatatcccctccctatgtaaatgtaccaaatttattggcacatcatatttgccgcttatactgtaatctacaaccgtattttaatatcgcgcgtaggggcgcgacatgcaatagttaatgaaatcggacggggaattggggatgggaaggagctatttgccattaca

SEQ ID NO: 60531 - DNA, 1218 bp, Zea Mays
attcattctaacatcagccgtaggattcggatccagtgaacaaccggattcttccaggcgcttcctcccactccaaatttctctcctcgcgctctcctcaccaccacccgcctctcccccacgcttgcccacgccgcctcctctccctccccgtctcccctacgagggtgctactaccaccttaccggcgttcgagaccgaggtggcggctttgccggacaaggacgatcctccgcgggcgccgccgccacagagtagatggacgcggagaggatgaatgccctggaatatatgttcacgcgactgtccctcgccgacgacacgtgcctgaagccgttcgctcatcgacctcatcaacattgtgcttgattcacattgcaatagctcctgcgtggtaacctgatatccagatgtccacttagtcaaatccgagtgcttaagtattaacagtgattggatctggacttgtgcacaccggtaaacacatgaacagaggagattaaggattaccgtcatgtagatcttggcacggcaatggtagctggtcgccgtaggtgtagccactgtccgtcctgcagaaaaggaagggctcggatccagttgctggcgcagagatccgaagccgccatgggaagaactcttccagtcactccgacttataggcgatgagtccttctgtggattagggtttagggcgagctctctcattcgcctgaccgacatcgtgattggttcacacttcaaaaccttctgttgcctgatctattacattttcagatgacaacaacactacgaataaaaggagtgacgcctacagttagccatagcatctgatgcttttgttaaatgcagctcagactgatgatatggttaactagatgtaatatataactactacttttgatttgatgcccactgcggttctaggacacccatagcaagaaacgaccctctttttgcatgtatacatgtcagtatctcatactaccaaaacaaacacttgatgaagacatagatgtgtagccttgcaatgtcatactttaaatctacaaatatcccctccctatgtaaatgtaccaaatttattggcacatcatatttgccgcttatactgtaatctacaaccgtattttaatatcgcgcgtaggggcgcgacatgcaatagttaatgaaatcggacggggaattggggatgggaaggagctatttgccattaca

SEQ ID NO: 60532 - DNA, 1366 bp, Zea Mays
cgaggcccacctgggaatttccagtcattcattctaacatcagccgtaggattcggatccagtgaacaaccggattcttccaggcgcttcctcccactccaaatttctctcctcgcgctctcctcaccaccacccgcctctcccccacgcttgcccacgccgcctcctctccctccccgtctcccctacgagggtgctactaccaccttaccggcgttcgagaccgaggtggcggctttgccggacaaggacgatcctccgcgggcgccgccgccacagagtagatggacgcggagaggatgaatgccctggaatatatgttcacgcgactgtccctcgccgacgacacgtgcctgaagccgttcgctcatcgacctcatcaacattgtgcttgattcacattgcaatagctcctgcgtggtaacctgatatccagactctctcattcgcctgaccgacatcgtgattggttcacacttcaaaaccttctgtacggtgaactgctatccacaatgcaaacttcattattacagccacaaattacatggtcaaatatgtattttcatattcatctttaagtcagctcagctaattagctaattatatggtcattgttatattcttttgttcctggttattttatcaatatttcatgacgaattgtgacgattcatttcccaaccttcaaattactcccacaaaataatcatttcgtatcgacacaaaagtattccaaatgttatcaatactccaatcacatgaccaccaaaaaacattacccaaaatattcatgaacaacgaaggaatataatgtccactcgagcaaagtactcaactccattgcttgaggattcaccaacaaatgctataccaaaaactcatacatttgcacgttcccatgttgcctgatctattacattttcagatgacaacaacactacgaataaaaggagtgacgcctacagttagccatagcatctgatgcttttgttaaatgcagctcagactgatgatatggttaactagatgtaatatataactactacttttgatttgatgcccactgcggttctaggacacccatagcaagaaacgaccctctttttgcatgtatacatgtcagtatctcatactaccaaaacaaacacttgatgaagacatagatgtgtagccttgcaatgtcatactttaaatctacaaatatcccctccctatgtaaatgtaccaaatttattggcacatcatatttgccgcttatactgtaatctacaaccgtattttaatatcgcgcgtaggggcgcgacatgcaatagttaatgaaatcggacggggaattggggatgggaaggagctatttgccattaca

SEQ ID NO: 60533 - DNA, 990 bp, Zea Mays
gaacgatcggagaaagcgctgagcttgccgacgccgaggcccacctgggaatttccagtcattcattctaacatcagccgtaggattcggatccagtgaacaaccggattcttccaggcgcttcctcccactccaaatttctctcctcgcgctctcctcaccaccacccgcctctcccccacgcttgcccacgccgcctcctctccctccccgtctcccctacgagggtgctactaccaccttaccggcgttcgagaccgaggtggcggctttgccggacaaggacgatcctccgcgggcgccgccgccacagagtagatggacgcggagaggatgaatgccctggaatatatgttcacgcgactgtccctcgccgacgacacgtgcctgaagccgttcgctcatcgacctcatcaacattgtgcttgattcacattgcaatagctcctgcgtggtaacctgatatccagactctctcattcgcctgaccgacatcgtgattggttcacacttcaaaaccttctgttgcctgatctattacattttcagatgacaacaacactacgaataaaaggagtgacgcctacagttagccatagcatctgatgcttttgttaaatgcagctcagactgatgatatggttaactagatgtaatatataactactacttttgatttgatgcccactgcggttctaggacacccatagcaagaaacgaccctctttttgcatgtatacatgtcagtatctcatactaccaaaacaaacacttgatgaagacatagatgtgtagccttgcaatgtcatactttaaatctacaaatatcccctccctatgtaaatgtaccaaatttattggcacatcatatttgccgcttatactgtaatctacaaccgtattttaatatcgcgcgtaggggcgcgacatgcaatagttaatgaaatcggacggggaattggggatgggaaggagctatttgccattaca

SEQ ID NO: 60534 - DNA, 1814 bp, Zea Mays
ctggacttgggggcggcggcgtcagtgagcggagacgagagaacgatcggagaaagcgctgagcttgccgacgccgaggcccacctgggaatttccagtcattcattctaacatcagccgtaggattcggatccagtgaacaaccggattcttccaggcgcttcctcccactccaaatttctctcctcgcgctctcctcaccaccacccgcctctcccccacgcttgcccacgccgcctcctctccctccccgtctcccctacgagggtgctactaccaccttaccggcgttcgagaccgaggtggcggctttgccggacaaggacgatcctccgcgggcgccgccgccacagagtagatggacgcggagaggatgaatgccctggaatatatgttcacgcgactgtccctcgccgacgacacgtgcctgaagccgttcgctcatcgacctcatcaacattgtgcttgattcacattgcaatagctcctgcgtggtaacctgatatccagatgtccacttagtcaaatccgagtgcttaagtattaacagtgattggatctggacttgtgcacaccggtaaacacatgaacagaggagattaaggattaccgtcatgtagatcttggcacggcaatggtagctggtcgccgtaggtgtagccactgtccgtcctgcagaaaaggaagggctcggatccagttgctggcgcagagatccgaagccgccatgggaagaactcttccagtcactccgacttataggcgatgagtccttctgtggattagggtttagggcgagctctctcattcgcctgaccgacatcgtgattggttcacacttcaaaaccttctgtacggtgaactgctatccacaatgcaaacttcattattacagccacaaattacatggtcaaatatgtattttcatattcatctttaagtcagctcagctaattagctaattatatggtcattgttatattcttttgttcctggttattttatcaatatttcatgacgaattgtgacgattcatttcccaaccttcaaattactcccacaaaataatcatttcgtatcgacacaaaagtattccaaatgttatcaatactccaatcacatgaccaccaaaaaacattacccaaaatattcatgaacaacgaaggaatataatgtccactcgagcaaagtactcaactccattgcttgaggattcaccaacaaatgctataccaaaaactcatacatttgcacgttcccatgtaagatttctctcgcaaaagagtattaaattttcaaccatgtaaatttctaactcctttttcacttccattgatttatatcgcaggttgcctgatctattacattttcagatgacaacaacactacgaataaaaggagtgacgcctacagttagccatagcatctgatgcttttgttaaatgcagctcagactgatgatatggttaactagatgtaatatataactactacttttgatttgatgcccactgcggttctaggacacccatagcaagaaacgaccctctttttgcatgtatacatgtcagtatctcatactaccaaaacaaacacttgatgaagacatagatgtgtagccttgcaatgtcatactttaaatctacaaatatcccctccctatgtaaatgtaccaaatttattggcacatcatatttgccgcttatactgtaatctacaaccgtattttaatatcgcgcgtaggggcgcgacatgcaatagttaatgaaatcggacggggaattggggatgggaaggagctatttgccattaca

SEQ ID NO: 60535 - DNA, 3038 bp, Zea Mays
cacagaagcaaacgaatccgcgaccctccgacagtgctgttttccgttagaggcttctcgtcttccccggctcaggcaacctccagctgcagcggcggcgatgggggtgaagaacctctgggacatccttgactcctgcaagaagaagctcccgctccagcacctccacatggaagaagccgaagcacagtgtgcattgcttaatttttcttccttgtgtgatggctgttttacatcggattcagattcattcttgtttggtgcaaagacagtttatagagatgttttcataggagagggtggttatgtaatttgctatgaaatggaagacattcagaataagcttggtttcggcaggaactcactgatatcacttgcagtccttcttggtagtgactattctaatggagtccatggctttggcccagaagcagcatgccgccttgttaagtctttaggggatgacaccgttcttggtcaaattttgtccgatggagttaaacctgcaagaaaatgtaaaggaaaaggcagtggcgccaatgcagggacggttggtggaacgtgcccaaaagcaagtacctgtgaggttgggattaaccaagattctggtagtcaatttcgtgacataataaatgcatatctggagccaaaatgtcattcaccagattcagaagctgtgcagagggcatgcagccagcggccatttcttcgttcacaactccatcagatatgcgagcaatactttgcgtggagccctgtgaaaactgatgaatatatccttccaaagattgctgagagagaacttcgaagattttcaaatctccgctccacgtcttcagatctaggaatgaaaccttcgctgaatgagattcctgtaccgtgtcctgtactggcgattgtgaagcagcgaaaagttcaaggaagtgaatattatgaggtttcatggagaaacatagatgggctccaagtttcagttgttccaggggaacttgttagaagtgcttgcccagaaaaaataactgaatttttggaaagcaaggatgctcagaagaaacaaaagaggagagctaggccaaagaaatctggtcaagctgccgtaaaagacgtggatgcgcagctccaagaattgctacttggaattgaatctgaaagtggtagctttccatgtacggccaatggccctcagacagcagctatacagatggttgcaccgctccaggaatttgttgatctatcttctccatcaccacctatacgatcttgtaagattgccaggtccagaaagttgagtgattcagacacagtaacaatggatgggattcatctgcagcaccaaagtctgcagattggatcgatggagtcaaattcggcactgggtcttgagccaattgatctgtcatcaccctcgccttgtgctgctcataaaccccaggctgctccagaagcaccaccactgtgtatggaggcagaaagaagagccctttgggatataagcaatttggtcgagaaagaaccctcctgttgcaagcatgaacctggaacaaatgtgcaggtggaagagtcaccattgttcaggcatgggactgggatggcaggcgaagctgattcttcacggagaggcgatgcgcagagtagggaagtagtagaagctgccatgatcgacctctcttctccatcaccagttaaagtcgataatagtagaaggaatggtaagaaggattgtgaggctggcagcagcagtcagtctccagaacacgagaggaaagcgagggagctcagattgttcctagacagtataagagacgagttgtattaacattcgattggattgtatgtaaaccgatatgtgcaatgatgatgtgtgttctccatttcaatggtatctcatctactggtggtacaacagtaaccaatgaattgtgcaggtattggaaccagcagagaatgtgaatagcaatccagctatcagagcaaccagtagcacaatcagagcatctatgatgctgaaattcccaccaccttgtcttttgcttgaatcatccttcttctgtaaagacgagacgaacgactgtccgctgcgagatccaggcaccatatcccaaagggattctaatgtgctacaagctgatgcactttctggttccaggattgaagagctctccgcggctgtttccagtgcggatgcacggccatagcaggcttgggaaatcgcgtgaataacctgaaagatggtaaagagttcacatccaagccctcgaaagcatggtatggtatcagcaagtggagcctggcatttttttgcataaataagagggaaccattgaaaagaagaagctgacagtgctaacctgcgacaaggcagcaggggatgtggccttgaatgatgcctcggaagcccatatgtaagtaagcgtgcaacaacagattgctgaagaataagaattcatggtgtgaaccgtgagtagggatggcaatggatgtgatttatccgcgtacccgcggataaaaaacccgttgggcacggttttgggtacgagtttgtacccatggatacggatacgggtagcacttgatatccgtggatatttttaaaacggatatgaaaaatcaatatccatacccaaatacccgaatatccattaaaatatcttgtagtctcgtcccacaagtggcaggcttttaagtgaccatcgcagtcgtctcactcctaaaatggtggaagctttgatgtgcattcaaagttggcttcgtcacactcttaaagatgctggtgatggaagattcaatagtttttggtcttgccttgaagataatgaagaagacatgaaaggagaatcttgtgtgttggctgctgattctgaataaccagctggtctttggtgttgattcttatggcttgtgtgtttgtaattttatcaatttgaataattcagatttgattttgctagacaattttatattgctcgctgtatgccttaatacatgtatcagatttcattgctggacaaattctgtatggttgtatgtttttatcatat

SEQ ID NO: 60536 - DNA, 3160 bp, Zea Mays
cacagaagcaaacgaatccgcgaccctccgacagtgctgttttccgttagaggcttctcgtcttccccggctcaggcaacctccagctgcagcggcggcgatgggggtgaagaacctctgggacatccttgactcctgcaagaagaagctcccgctccagcacctccagaacaagaaggtgtgcgtggatctttcctgctggctcgtgcagttctgcagcgccaaccgctccccggccttcctcagggacaaggtgtacctcaagaacctcttccaccgcatccgagccctcatcgccctcaactgcagcctcattttcgtctcagcatggaagaagccgaagcacagtgtgcattgcttaatttttcttccttgtgtgatggctgttttacatcggattcagattcattcttgtttggtgcaaagacagtttatagagatgttttcataggagagggtggttatgtaatttgctatgaaatggaagacattcagaataagcttggtttcggcaggaactcactgatatcacttgcagtccttcttggtagtgactattctaatggagtccatggctttggcccagaagcagcatgccgccttgttaagtctttaggggatgacaccgttcttggtcaaattttgtccgatggagttaaacctgcaagaaaatgtaaaggaaaaggcagtggcgccaatgcagggacggttggtggaacgtgcccaaaagcaagtacctgtgaggttgggattaaccaagattctggtagtcaatttcgtgacataataaatgcatatctggagccaaaatgtcattcaccagattcagaagctgtgcagagggcatgcagccagcggccatttcttcgttcacaactccatcagatatgcgagcaatactttgcgtggagccctgtgaaaactgatgaatatatccttccaaagattgctgagagagaacttcgaagattttcaaatctccgctccacgtcttcagatctaggaatgaaaccttcgctgaatgagcagcgaaaagttcaaggaagtgaatattatgaggtttcatggagaaacatagatgggctccaagtttcagttgttccaggggaacttgttagaagtgcttgcccagaaaaaataactgaatttttggaaagcaaggatgctcagaagaaacaaaagaggagagctaggccaaagaaatctggtcaagctgccgtaaaagacgtggatgcgcagctccaagaattgctacttggaattgaatctgaaagtggtagctttccatgtacggccaatggccctcagacagcagctatacagatggttgcaccgctccaggaatttgttgatctatcttctccatcaccacctatacgatcttgtaagattgccaggtccagaaagttgagtgattcagacacagtaacaatggatgggattcatctgcagcaccaaagtctgcagattggatcgatggagtcaaattcggcactgggtcttgagccaattgatctgtcatcaccctcgccttgtgctgctcataaaccccaggctgctccagaagcaccaccactgtgtatggaggcagaaagaagagccctttgggatataagcaatttggtcgagaaagaaccctcctgttgcaagcatgaacctggaacaaatgtgcaggtggaagagtcaccattgttcaggcatgggactgggatggcaggcgaagctgattcttcacggagaggcgatgcgcagagtagggaagtagtagaagctgccatgatcgacctctcttctccatcaccagttaaagtcgataatagtagaaggaatggtaagaaggattgtgaggctggcagcagcagtcagtctccagaacacgagaggaaagcgagggagctcagattgttcctagacagtataagagacgagttgtattaacattcgattggattgtatgtaaaccgatatgtgcaatgatgatgtgtgttctccatttcaatggtatctcatctactggtggtacaacagtaaccaatgaattgtgcaggtattggaaccagcagagaatgtgaatagcaatccagctatcagagcaaccagtagcacaatcagagcatctatgatgctgaaattcccaccaccttgtcttttgcttgaatcatccttcttctgtaaagacgagacgaacgactgtccgctgcgagatccaggcaccatatcccaaagggattctaatgtgctacaagctgatgcactttctggttccaggattgaagagctctccgcggctgtttccagtgcggatgcacggccatagcaggcttgggaaatcgcgtgaataacctgaaagatggtaaagagttcacatccaagccctcgaaagcatggtatggtatcagcaagtggagcctggcatttttttgcataaataagagggaaccattgaaaagaagaagctgacagtgctaacctgcgacaaggcagcaggggatgtggccttgaatgatgcctcggaagcccatatgtaagtaagcgtgcaacaacagattgctgaagaataagaattcatggtgtgaaccgtgagtagggatggcaatggatgtgatttatccgcgtacccgcggataaaaaacccgttgggcacggttttgggtacgagtttgtacccatggatacggatacgggtagcacttgatatccgtggatatttttaaaacggatatgaaaaatcaatatccatacccaaatacccgaatatccattaaaatatcttgtagtctcgtcccacaagtggcaggcttttaagtgaccatcgcagtcgtctcactcctaaaatggtggaagctttgatgtgcattcaaagttggcttcgtcacactcttaaagatgctggtgatggaagattcaatagtttttggtcttgccttgaagataatgaagaagacatgaaaggagaatcttgtgtgttggctgctgattctgaataaccagctggtctttggtgttgattcttatggcttgtgtgtttgtaattttatcaatttgaataattcagatttgattttgctagacaattttatattgctcgctgtatgccttaatacatgtatcagatttcattgctggacaaattctgtatggttgtatgtttttatcatat

SEQ ID NO: 60537 - DNA, 3346 bp, Zea Mays
cacagaagcaaacgaatccgcgaccctccgacagtgctgttttccgttagaggcttctcgtcttccccggctcaggcaacctccagctgcagcggcggcgatgggggtgaagaacctctgggacatccttgactcctgcaagaagaagctcccgctccagcacctccattctgcagcgccaaccgctccccggccttcctcagggacaaggtgtacctcaagaacctcttccaccgcatccgagccctcatcgccctcaactgcagcctcattttcgtctcagatggggcgattccttcagtcaaattggctacttataggcgccgactgggattaaatgctgctgaggctactcgagaggaggccaactcacaacctctgacttctttgcgtcggaacaagagctcagagttctcacgcatgatcaaagaagccaagcatctcgggttggcccttggcatcccttgcttggatggcatggaagaagccgaagcacagtgtgcattgcttaatttttcttccttgtgtgatggctgttttacatcggattcagattcattcttgtttggtgcaaagacagtttatagagatgttttcataggagagggtggttatgtaatttgctatgaaatggaagacattcagaataagcttggtttcggcaggaactcactgatatcacttgcagtccttcttggtagtgactattctaatggagtccatggctttggcccagaagcagcatgccgccttgttaagtctttaggggatgacaccgttcttggtcaaattttgtccgatggagttaaacctgcaagaaaatgtaaaggaaaaggcagtggcgccaatgcagggacggttggtggaacgtgcccaaaagcaagtacctgtgaggttgggattaaccaagattctggtagtcaatttcgtgacataataaatgcatatctggagccaaaatgtcattcaccagattcagaagctgtgcagagggcatgcagccagcggccatttcttcgttcacaactccatcagatatgcgagcaatactttgcgtggagccctgtgaaaactgatgaatatatccttccaaagattgctgagagagaacttcgaagattttcaaatctccgctccacgtcttcagatctaggaatgaaaccttcgctgaatgagattcctgtaccgtgtcctgtactggcgattgtgaagcagcgaaaagttcaaggaagtgaatattatgaggtttcatggagaaacatagatgggctccaagtttcagttgttccaggggaacttgttagaagtgcttgcccagaaaaaataactgaatttttggaaagcaaggatgctcagaagaaacaaaagaggagagctaggccaaagaaatctggtcaagctgccgtaaaagacgtggatgcgcagctccaagaattgctacttggaattgaatctgaaagtggtagctttccatgtacggccaatggccctcagacagcagctatacagatggttgcaccgctccaggaatttgttgatctatcttctccatcaccacctatacgatcttgtaagattgccaggtccagaaagttgagtgattcagacacagtaacaatggatgggattcatctgcagcaccaaagtctgcagattggatcgatggagtcaaattcggcactgggtcttgagccaattgatctgtcatcaccctcgccttgtgctgctcataaaccccaggctgctccagaagcaccaccactgtgtatggaggcagaaagaagagccctttgggatataagcaatttggtcgagaaagaaccctcctgttgcaagcatgaacctggaacaaatgtgcaggtggaagagtcaccattgttcaggcatgggactgggatggcaggcgaagctgattcttcacggagaggcgatgcgcagagtagggaagtagtagaagctgccatgatcgacctctcttctccatcaccagttaaagtcgataatagtagaaggaatggtaagaaggattgtgaggctggcagcagcagtcagtctccagaacacgagaggaaagcgagggagctcagattgttcctagacagtataagagacgagttgtattaacattcgattggattgtatgtaaaccgatatgtgcaatgatgatgtgtgttctccatttcaatggtatctcatctactggtggtacaacagtaaccaatgaattgtgcaggtattggaaccagcagagaatgtgaatagcaatccagctatcagagcaaccagtagcacaatcagagcatctatgatgctgaaattcccaccaccttgtcttttgcttgaatcatccttcttctgtaaagacgagacgaacgactgtccgctgcgagatccaggcaccatatcccaaagggattctaatgtgctacaagctgatgcactttctggttccaggattgaagagctctccgcggctgtttccagtgcggatgcacggccatagcaggcttgggaaatcgcgtgaataacctgaaagatggtaaagagttcacatccaagccctcgaaagcatggtatggtatcagcaagtggagcctggcatttttttgcataaataagagggaaccattgaaaagaagaagctgacagtgctaacctgcgacaaggcagcaggggatgtggccttgaatgatgcctcggaagcccatatgtaagtaagcgtgcaacaacagattgctgaagaataagaattcatggtgtgaaccgtgagtagggatggcaatggatgtgatttatccgcgtacccgcggataaaaaacccgttgggcacggttttgggtacgagtttgtacccatggatacggatacgggtagcacttgatatccgtggatatttttaaaacggatatgaaaaatcaatatccatacccaaatacccgaatatccattaaaatatcttgtagtctcgtcccacaagtggcaggcttttaagtgaccatcgcagtcgtctcactcctaaaatggtggaagctttgatgtgcattcaaagttggcttcgtcacactcttaaagatgctggtgatggaagattcaatagtttttggtcttgccttgaagataatgaagaagacatgaaaggagaatcttgtgtgttggctgctgattctgaataaccagctggtctttggtgttgattcttatggcttgtgtgtttgtaattttatcaatttgaataattcagatttgattttgctagacaattttatattgctcgctgtatgccttaatacatgtatcagatttcattgctggacaaattctgtatggttgtatgtttttatcatat

SEQ ID NO: 60538 - DNA, 3269 bp, Zea Mays
gtttgaaccacagaagcaaacgaatccgcgaccctccgacagtgctgttttccgttagaggcttctcgtcttccccggctcaggcaacctccagctgcagcggcggcgatgggggtgaagaacctctgggacatccttgactcctgcaagaagaagctcccgctccagcacctccagaacaagaaggtgtgcgtggatctttcctgctggctcgtgcagttctgcagcgccaaccgctccccggccttcctcagggacaaggtgtacctcaagaacctcttccaccgcatccgagccctcatcgccctcaactgcagcctcattttcgtctcagatggggcgattccttcagtcaaattggctacttataggcgccgactgggattaaatgctgctgagcatggaagaagccgaagcacagtgtgcattgcttaatttttcttccttgtgtgatggctgttttacatcggattcagattcattcttgtttggtgcaaagacagtttatagagatgttttcataggagagggtggttatgtaatttgctatgaaatggaagacattcagaataagcttggtttcggcaggaactcactgatatcacttgcagtccttcttggtagtgactattctaatggagtccatggctttggcccagaagcagcatgccgccttgttaagtctttaggggatgacaccgttcttggtcaaattttgtccgatggagttaaacctgcaagaaaatgtaaaggaaaaggcagtggcgccaatgcagggacggttggtggaacgtgcccaaaagcaagtacctgtgaggttgggattaaccaagattctggtagtcaatttcgtgacataataaatgcatatctggagccaaaatgtcattcaccagattcagaagctgtgcagagggcatgcagccagcggccatttcttcgttcacaactccatcagatatgcgagcaatactttgcgtggagccctgtgaaaactgatgaatatatccttccaaagattgctgagagagaacttcgaagattttcaaatctccgctccacgtcttcagatctaggaatgaaaccttcgctgaatgagattcctgtaccgtgtcctgtactggcgattgtgaagcagcgaaaagttcaaggaagtgaatattatgaggtttcatggagaaacatagatgggctccaagtttcagttgttccaggggaacttgttagaagtgcttgcccagaaaaaataactgaatttttggaaagcaaggatgctcagaagaaacaaaagaggagagctaggccaaagaaatctggtcaagctgccgtaaaagacgtggatgcgcagctccaagaattgctacttggaattgaatctgaaagtggtagctttccatgtacggccaatggccctcagacagcagctatacagatggttgcaccgctccaggaatttgttgatctatcttctccatcaccacctatacgatcttgtaagattgccaggtccagaaagttgagtgattcagacacagtaacaatggatgggattcatctgcagcaccaaagtctgcagattggatcgatggagtcaaattcggcactgggtcttgagccaattgatctgtcatcaccctcgccttgtgctgctcataaaccccaggctgctccagaagcaccaccactgtgtatggaggcagaaagaagagccctttgggatataagcaatttggtcgagaaagaaccctcctgttgcaagcatgaacctggaacaaatgtgcaggtggaagagtcaccattgttcaggcatgggactgggatggcaggcgaagctgattcttcacggagaggcgatgcgcagagtagggaagtagtagaagctgccatgatcgacctctcttctccatcaccagttaaagtcgataatagtagaaggaatggtaagaaggattgtgaggctggcagcagcagtcagtctccagaacacgagaggaaagcgagggagctcagattgttcctagacagtataagagacgagttgtattaacattcgattggattgtatgtaaaccgatatgtgcaatgatgatgtgtgttctccatttcaatggtatctcatctactggtggtacaacagtaaccaatgaattgtgcaggtattggaaccagcagagaatgtgaatagcaatccagctatcagagcaaccagtagcacaatcagagcatctatgatgctgaaattcccaccaccttgtcttttgcttgaatcatccttcttctgtaaagacgagacgaacgactgtccgctgcgagatccaggcaccatatcccaaagggattctaatgtgctacaagctgatgcactttctggttccaggattgaagagctctccgcggctgtttccagtgcggatgcacggccatagcaggcttgggaaatcgcgtgaataacctgaaagatggtaaagagttcacatccaagccctcgaaagcatggtatggtatcagcaagtggagcctggcatttttttgcataaataagagggaaccattgaaaagaagaagctgacagtgctaacctgcgacaaggcagcaggggatgtggccttgaatgatgcctcggaagcccatatgtaagtaagcgtgcaacaacagattgctgaagaataagaattcatggtgtgaaccgtgagtagggatggcaatggatgtgatttatccgcgtacccgcggataaaaaacccgttgggcacggttttgggtacgagtttgtacccatggatacggatacgggtagcacttgatatccgtggatatttttaaaacggatatgaaaaatcaatatccatacccaaatacccgaatatccattaaaatatcttgtagtctcgtcccacaagtggcaggcttttaagtgaccatcgcagtcgtctcactcctaaaatggtggaagctttgatgtgcattcaaagttggcttcgtcacactcttaaagatgctggtgatggaagattcaatagtttttggtcttgccttgaagataatgaagaagacatgaaaggagaatcttgtgtgttggctgctgattctgaataaccagctggtctttggtgttgattcttatggcttgtgtgtttgtaattttatcaatttgaataattcagatttgattttgctagacaattttatattgctcgctgtatgccttaatacatgtatcagatttcattgctggacaaattctgtatggttgtatgtttttatcatat

SEQ ID NO: 60539 - DNA, 3425 bp, Zea Mays
attttccgcaatcagggtgtaaaagcgtgtttgaaccacagaagcaaacgaatccgcgaccctccgacagtgctgttttccgttagaggcttctcgtcttccccggctcaggcaacctccagctgcagcggcggcgatgggggtgaagaacctctgggacatccttgactcctgcaagaagaagctcccgctccagcacctccagaacaagaaggtgtgcgtggatctttcctgctggctcgtgcagttctgcagcgccaaccgctccccggccttcctcagggacaaggtgtacctcaagaacctcttccaccgcatccgagccctcatcgccctcaactgcagcctcattttcgtctcagatggggcgattccttcagtcaaattggctacttataggcgccgactgggattaaatgctgctgaggctactcgagaggaggccaactcacaacctctgacttctttgcgtcggaacaagagctcagagttctcacgcatgatcaaagaagccaagcatctcgggttggcccttggcatcccttgcttggatggcatggaagaagccgaagcacagtgtgcattgcttaatttttcttccttgtgtgatggctgttttacatcggattcagattcattcttgtttggtgcaaagacagtttatagagatgttttcataggagagggtggttatgtaatttgctatgaaatggaagacattcagaataagcttggtttcggcaggaactcactgatatcacttgcagtccttcttggtagtgactattctaatggagtccatggctttggcccagaagcagcatgccgccttgttaagtctttaggggatgacaccgttcttggtcaaattttgtccgatggagttaaacctgcaagaaaatgtaaaggaaaaggcagtggcgccaatgcagggacggttggtggaacgtgcccaaaagcaagtacctgtgaggttgggattaaccaagattctggtagtcaatttcgtgacataataaatgcatatctggagccaaaatgtcattcaccagattcagaagctgtgcagagggcatgcagccagcggccatttcttcgttcacaactccatcagatatgcgagcaatactttgcgtggagccctgtgaaaactgatgaatatatccttccaaagattgctgagagagaacttcgaagattttcaaatctccgctccacgtcttcagatctaggaatgaaaccttcgctgaatgagattcctgtaccgtgtcctgtactggcgattgtgaagcagcgaaaagttcaaggaagtgaatattatgaggtttcatggagaaacatagatgggctccaagtttcagttgttccaggggaacttgttagaagtgcttgcccagaaaaaataactgaatttttggaaagcaaggatgctcagaagaaacaaaagaggagagctaggccaaagaaatctggtcaagctgccgtaaaagacgtggatgcgcagctccaagaattgctacttggaattgaatctgaaagtggtagctttccatgtacggccaatggccctcagacagcagctatacagatggttgcaccgctccaggaatttgttgatctatcttctccatcaccacctatacgatcttgtaagattgccaggtccagaaagttgagtgattcagacacagtaacaatggatgggattcatctgcagcaccaaagtctgcagattggatcgatggagtcaaattcggcactgggtcttgagccaattgatctgtcatcaccctcgccttgtgctgctcataaaccccaggctgctccagaagcaccaccactgtgtatggaggcagaaagaagagccctttgggatataagcaatttggtcgagaaagaaccctcctgttgcaagcatgaacctggaacaaatgtgcaggtggaagagtcaccattgttcaggcatgggactgggatggcaggcgaagctgattcttcacggagaggcgatgcgcagagtagggaagtagtagaagctgccatgatcgacctctcttctccatcaccagttaaagtcgataatagtagaaggaatggtaagaaggattgtgaggctggcagcagcagtcagtctccagaacacgagaggaaagcgagggagctcagattgttcctagacagtataagagacgagttgtattaacattcgattggattgtatgtaaaccgatatgtgcaatgatgatgtgtgttctccatttcaatggtatctcatctactggtggtacaacagtaaccaatgaattgtgcaggtattggaaccagcagagaatgtgaatagcaatccagctatcagagcaaccagtagcacaatcagagcatctatgatgctgaaattcccaccaccttgtcttttgcttgaatcatccttcttctgtaaagacgagacgaacgactgtccgctgcgagatccaggcaccatatcccaaagggattctaatgtgctacaagctgatgcactttctggttccaggattgaagagctctccgcggctgtttccagtgcggatgcacggccatagcaggcttgggaaatcgcgtgaataacctgaaagatggtaaagagttcacatccaagccctcgaaagcatggtatggtatcagcaagtggagcctggcatttttttgcataaataagagggaaccattgaaaagaagaagctgacagtgctaacctgcgacaaggcagcaggggatgtggccttgaatgatgcctcggaagcccatatgtaagtaagcgtgcaacaacagattgctgaagaataagaattcatggtgtgaaccgtgagtagggatggcaatggatgtgatttatccgcgtacccgcggataaaaaacccgttgggcacggttttgggtacgagtttgtacccatggatacggatacgggtagcacttgatatccgtggatatttttaaaacggatatgaaaaatcaatatccatacccaaatacccgaatatccattaaaatatcttgtagtctcgtcccacaagtggcaggcttttaagtgaccatcgcagtcgtctcactcctaaaatggtggaagctttgatgtgcattcaaagttggcttcgtcacactcttaaagatgctggtgatggaagattcaatagtttttggtcttgccttgaagataatgaagaagacatgaaaggagaatcttgtgtgttggctgctgattctgaataaccagctggtctttggtgttgattcttatggcttgtgtgtttgtaattttatcaatttgaataattcagatttgattttgctagacaattttatattgctcgctgtatgccttaatacatgtatcagatttcattgctggacaaattctgtatggttgtatgtttttatcatat

SEQ ID NO: 60540 - DNA, 3227 bp, Zea Mays
atggcatctgcattgcagttgcagccacgccaacaactgggcagcggcgacatctgcatctcccacctcgtctccctcccgtatctgcaagccttgatcccgccgccagccatccatccaagggagccatgtctccatccggcgagctgctggcttccatctcctccgtcttcactgtcgccttcgtcctcctcgcctgcgtcgagctcggcgacgccgccgccgccgccgtcggcgtctaccgcctcatccagtacgacctcgccggcgctccgctcggctcccgcgccgcggtcctcaaccaccacgctgccgcgctcccgctccccgccggcgcagacctctcccgctccgccctcgtcgcgccgctcctcgacctcccgctctctttcctcagagagtacctggtggagaaaaaacatctggggggattactcattctgctcccgacaaataatgacagtgtggatgacaaggggcaattcaaaggtgtactgactgagctggagaagttgcttctgcatgaacaagttccatatccagtgtactttgctttgcatgacgacaatcttgataacctgctggcagatatccatagaattgcctccacaggtcaaccagcctctgcaacaacaggaggggatggttacctggatttaaaggagagggtgatagcgaacagcttccgactattgccatagttgcaaactatgacaccttcggtgctgtacctgcactttctgtgggaagcgacagcaatggaagtggagttgtggctcttctagagattgcgagactattttcacgtctgtattcaaatcctaagacaaggggcaagtacaatattctctttgggttaacatctggtggaccctacaattacaatggaactagcaagtggcttaggagttttgatcagcgtgtacgcgagagcattgactacgcaatttgcttgaacaatgttggttcctggggcaatgacctctggatgcatgtatcaaagcctccagaaaatccctatatcaagcaaatctttaaagaattttcagatgtttctaaagaaatgggtgtttcagttggaatcaagcacaagaagattaatgtctcaaatcccagagtagcatgggaacacgaacagttctcaaggtttagggtgactgcacttactctttcagaaatgtctacccctcctgattttttggaaagcactggcggtcttcatgacactagagaatctacagatgctgagtcagtaatccgagctgccagattagtttctgagagtcttgcgagacgcatctatggactgaagggaaggaacatagatgtttttgcagagaatagcagcttagccattaatcctcactatatccggtcctggttggatctgttgtcacggacaccacgggttgcaccttttctgcagaaaaatgaccccttcatagcagcactggaaaaggttttggatggttgctttgaatggtttcatctctctcacagtctcacctggttcctggttttctggcaagacatgacattggtatcctggtgcaggaactgtctgcacacactactgatgtgcgtgttcaaagtgatgcgcttgatggcatgttcactttctatgatgcgacgaaagcaactctaaatgtctaccaggttgcaggtgttacttttgatctgctgttccttctggtgctcggctcctacctgattgttctcttctgtttcctagtgattactacacggggtgttgatgatctcattaacatattccggcggcctccatcacgcaaactcaagggtgcataggctaggctgtgttttgtgtattagcgccagccaagagaccgcatgcctagtagtcattagaagaagagatagagatgaggatgacaggcaggcaggcaggctagcttgcttcccacagcacatagacaaacattttttttcctttttgtgtcaggaatttcgactgtaatttagctgtattttggttacaattctggcttattcggggtggactggtggcggtgtctgatgagagacagagaagcacacaccaccacgccgcctctgaactttggatgctgagaaattcttgtctgaaacacaaacactgaaggcctgccgtgcctgtgtttacttgttgtctgaaatataaaaaataatagagaagaggaatataaagtcaaagcgaaacgaagcacctaccttgcaggatgagatactggaacatggagataggccaagaagatcgtgattgaatttcagtcccttgattttagatcggacggccgatagatagatagtaggatggataaggcagtgagtgatccagggccaatgggccatccaacaaagagtcagccgagtctgctctgctgctccatcggatctcccgcgcgccaaaccatgccgacgcagcaagcatgttctgctgcggcagcattgagatcgcggcggccttcccctgcatccacgacgacgacctcccggcagctgcggctgcgtccgcctcgtgccgccaccgcgggcgtgcggctgacggtgtcggacgcggagctggagtcccgcgggttcgctgtgcggcgcacggcggagggcatcgacgtggcggcgctgaacgaggtgttcgtgcgcgtgggcttcccgcggcgtcaggaggagcggctgcggcgcgcgctggagcacagccgtgtggtgtggctgtcggccggggaggaggaagggcggcccgtggcgttcgcgcgcgcggccggggacggcgtgttcaacgccgtggtgtgggacgtggtggtggagccgtcgagccagggcctcgggctgggacgcgccgtcatggagcgcctcgtcgacgagctgcggcgcgacggcgtggccaacatcgtgctctacgccgagacgcgcgtggtggggttctaccgcctgctggacttcgccatggaccccgacggcatcagggggatggcatactaccgcaagtccactactaccgccgcttgattcgtctcgtctgtcttgaactcattcatcaatgaaggaagtcgatcgaattccctaaagccccccatgtttgtatgatgtagatatgacatggtttatttttatcactcatctcatagttgctcgtttattacctttcattttatattccgcgaaaacgatctagctagaacatgtacttatatttcccgcaaatcaagcaatataaaaacctcacttctttc

SEQ ID NO: 60541 - DNA, 3028 bp, Zea Mays
atggcatctgcattgcagttgcagccacgccaacaactgggcagcggcgacatctgcatctcccacctcgtctccctcccgtatctgcaagccttgatcccgccgccagccatccatccaagggagccatgtctccatccggcgagctgctggcttccatctcctccgtcttcactgtcgccttcgtcctcctcgcctgcgtcgagctcggcgacgccgccgccgccgccgtcggcgtctaccgcctcatccagtacgacctcgccggcgctccgctcggctcccgcgccgcggtcctcaaccaccacgctgccgcgctcccgctccccgccggcgcagacctctcccgctccgccctcgtcgcgccgctcctcgacctcccgctctctttcctcagagagtacctggtggagaaaaaacatctggggggattactcattctgctcccgacaaataatgacagtgtggatgacaaggggcaattcaaaggtgtactgactgagctggagaagttgcttctgcatgaacaagttccaggatggttacctggatttaaaggagagggtgatagcgaacagcttccgactattgccatagttgcaaactatgacaccttcggtgctgtacctgcactttctgtgggaagcgacagcaatggaagtggagttgtggctcttctagagattgcgagactattttcacgtctgtattcaaatcctaagacaaggggcaagtacaatattctctttgggttaacatctggtggaccctacaattacaatggaactagcaagtggcttaggagttttgatcagcgtgtacgcgagagcattgactacgcaatttgcttgaacaatgttggttcctggggcaatgacctctggatgcatgtatcaaagcctccagaaaatccctatatcaagcaaatctttaaagaattttcagatgtttctaaagaaatgggtgtttcagttggaatcaagcacaagaagattaatgtctcaaatcccagagtagcatgggaacacgaacagttctcaaggtttagggtgactgcacttactctttcagaaatgtctacccctcctgattttttggaaagcactggcggtcttcatgacactagagaatctacagatgctgagtcagtaatccgagctgccagattagtttctgagagtcttgcgagacgcatctatggactgaagggaaggaacatagatgtttttgcagagaatagcagcttagccattaatcctcactatatccggtcctggttggatctgttgtcacggacaccacgggttgcaccttttctgcagaaaaatgaccccttcatagcagcactggaaaaggaactgtctgcacacactactgatgtgcgtgttcaaagtgatgcgcttgatggcatgttcactttctatgatgcgacgaaagcaactctaaatgtctaccaggttgcaggtgttacttttgatctgctgttccttctggtgctcggctcctacctgattgttctcttctgtttcctagtgattactacacggggtgttgatgatctcattaacatattccggcggcctccatcacgcaaactcaagggtgcataggctaggctgtgttttgtgtattagcgccagccaagagaccgcatgcctagtagtcattagaagaagagatagagatgaggatgacaggcaggcaggcaggctagcttgcttcccacagcacatagacaaacattttttttcctttttgtgtcaggaatttcgactgtaatttagctgtattttggttacaattctggcttattcggggtggactggtggcggtgtctgatgagagacagagaagcacacaccaccacgccgcctctgaactttggatgctgagaaattcttgtctgaaacacaaacactgaaggcctgccgtgcctgtgtttacttgttgtctgaaatataaaaaataatagagaagaggaatataaagtcaaagcgaaacgaagcacctaccttgcaggatgagatactggaacatggagataggccaagaagatcgtgattgaatttcagtcccttgattttagatcggacggccgatagatagatagtaggatggataaggcagtgagtgatccagggccaatgggccatccaacaaagagtcagccgagtctgctctgctgctccatcggatctcccgcgcgccaaaccatgccgacgcagcaagcatgttctgctgcggcagcattgagatcgcggcggccttcccctgcatccacgacgacgacctcccggcagctgcggctgcgtccgcctcgtgccgccaccgcgggcgtgcggctgacggtgtcggacgcggagctggagtcccgcgggttcgctgtgcggcgcacggcggagggcatcgacgtggcggcgctgaacgaggtgttcgtgcgcgtgggcttcccgcggcgtcaggaggagcggctgcggcgcgcgctggagcacagccgtgtggtgtggctgtcggccggggaggaggaagggcggcccgtggcgttcgcgcgcgcggccggggacggcgtgttcaacgccgtggtgtgggacgtggtggtggagccgtcgagccagggcctcgggctgggacgcgccgtcatggagcgcctcgtcgacgagctgcggcgcgacggcgtggccaacatcgtgctctacgccgagacgcgcgtggtggggttctaccgcctgctggacttcgccatggaccccgacggcatcagggggatggcatactaccgcaagtccactactaccgccgcttgattcgtctcgtctgtcttgaactcattcatcaatgaaggaagtcgatcgaattccctaaagccccccatgtttgtatgatgtagatatgacatggtttatttttatcactcatctcatagttgctcgtttattacctttcattttatattccgcgaaaacgatctagctagaacatgtacttatatttcccgcaaatcaagcaatataaaaacctcacttctttc

SEQ ID NO: 60542 - DNA, 3161 bp, Zea Mays
atggcatctgcattgcagttgcagccacgccaacaactgggcagcggcgacatctgcatctcccacctcgtctccctcccgtatctgcaagccttgatcccgccgccagccatccatccaagggagccatgtctccatccggcgagctgctggcttccatctcctccgtcttcactgtcgccttcgtcctcctcgcctgcgtcgagctcggcgacgccgccgccgccgccgtcggcgtctaccgcctcatccagtacgacctcgccggcgctccgctcggctcccgcgccgcggtcctcaaccaccacgctgccgcgctcccgctccccgccggcgcagacctctcccgctccgccctcgtcgcgccgctcctcgacctcccgctctctttcctcagagagtacctggtggagaaaaaacatctggggggattactcattctgctcccgacaaataatgacagtgtggatgacaaggggcaattcaaaggtgtactgactgagctggagaagttgcttctgcatgaacaagttccatatccagtgtactttgctttgcatgacgacaatcttgataacctgctggcagatatccatagaattgcctccacaggtcaaccagcctctgcaacaacaggaggttacaaacttgtcgtatcctcagcagagcctagaaaagtgtcatctccaaccatttctaatatccagggatggttacctggatttaaaggagagggtgatagcgaacagcttccgactattgccatagttgcaaactatgacaccttcggtgctgtacctgcactttctgtgggaagcgacagcaatggaagtggagttgtggctcttctagagattgcgagactattttcacgtctgtattcaaatcctaagacaaggggcaagtacaatattctctttgggttaacatctggtggaccctacaattacaatggaactagcaagtggcttaggagttttgatcagcgtgtacgcgagagcattgactacgcaatttgcttgaacaatgttggttcctggggcaatgacctctggatgcatgtatcaaagcctccagaaaatccctatatcaagcaaatctttaaagaattttcagatgtttctaaagaaatgggtgtttcagttggaatcaagcacaagaagattaatgtctcaaatcccagagtagcatgggaacacgaacagttctcaaggtttagggtgactgcacttactctttcagaaatgtctacccctcctgattttttggaaagcactggcggtcttcatgacactagagaatctacagatgctgagtcagtaatccgagctgccagattagtttctgagagtcttgcgagacgcatctatggactgaagggaaggaacatagatgtttttgcagagaatagcagcttagccattaatcctcactatatccggtcctggttggatctgttgtcacggacaccacgggttgcaccttttctgcagaaaaatgaccccttcatagcagcactggaaaagtgatgcgcttgatggcatgttcactttctatgatgcgacgaaagcaactctaaatgtctaccaggttgcaggtgttacttttgatctgctgttccttctggtgctcggctcctacctgattgttctcttctgtttcctagtgattactacacggggtgttgatgatctcattaacatattccggcggcctccatcacgcaaactcaagggtgcataggctaggctgtgttttgtgtattagcgccagccaagagaccgcatgcctagtagtcattagaagaagagatagagatgaggatgacaggcaggcaggcaggctagcttgcttcccacagcacatagacaaacattttttttcctttttgtgtcaggaatttcgactgtaatttagctgtattttggttacaattctggcttattcggggtggactggtggcggtgtctgatgagagacagagaagcacacaccaccacgccgcctctgaactttggatgctgagaaattcttgtctgaaacacaaacactgaaggcctgccgtgcctgtgtttacttgttgtctgaaatataaaaaataatagagaagaggaatataaagtcaaagcgaaacgaagcacctaccttgcaggatgagatactggaacatggagataggccaagaagatcgtgattgaatttcagtcccttgattttagatcggacggccgatagatagatagtaggatggataaggcagtgagtgatccagggccaatgggccatccaacaaagagtcagccgagtctgctctgctgctccatcggatctcccgcgcgccaaaccatgccgacgcagcaagcatgttctgctgcggcagcattgagatcgcggcggccttcccctgcatccacgacgacgacctcccggcagctgcggctgcgtccgcctcgtgccgccaccgcgggcgtgcggctgacggtgtcggacgcggagctggagtcccgcgggttcgctgtgcggcgcacggcggagggcatcgacgtggcggcgctgaacgaggtgttcgtgcgcgtgggcttcccgcggcgtcaggaggagcggctgcggcgcgcgctggagcacagccgtgtggtgtggctgtcggccggggaggaggaagggcggcccgtggcgttcgcgcgcgcggccggggacggcgtgttcaacgccgtggtgtgggacgtggtggtggagccgtcgagccagggcctcgggctgggacgcgccgtcatggagcgcctcgtcgacgagctgcggcgcgacggcgtggccaacatcgtgctctacgccgagacgcgcgtggtggggttctaccgcctgctggacttcgccatggaccccgacggcatcagggggatggcatactaccgcaagtccactactaccgccgcttgattcgtctcgtctgtcttgaactcattcatcaatgaaggaagtcgatcgaattccctaaagccccccatgtttgtatgatgtagatatgacatggtttatttttatcactcatctcatagttgctcgtttattacctttcattttatattccgcgaaaacgatctagctagaacatgtacttatatttcccgcaaatcaagcaatataaaaacctcacttctttc

SEQ ID NO: 60543 - DNA, 3135 bp, Zea Mays
atggcatctgcattgcagttgcagccacgccaacaactgggcagcggcgacatctgcatctcccacctcgtctccctcccgtatctgcaagccttgatcccgccgccagccatccatccaagggagccatgtctccatccggcgagctgctggcttccatctcctccgtcttcactgtcgccttcgtcctcctcgcctgcgtcgagctcggcgacgccgccgccgccgccgtcggcgtctaccgcctcatccagtacgacctcgccggcgctccgctcggctcccgcgccgcggtcctcaaccaccacgctgccgcgctcccgctccccgccggcgcagacctctcccgctccgccctcgtcgcgccgctcctcgacctcccgctctctttcctcagagtgtggatgacaaggggcaattcaaaggtgtactgactgagctggagaagttgcttctgcatgaacaagttccatatccagtgtactttgctttgcatgacgacaatcttgataacctgctggcagatatccatagaattgcctccacaggtcaaccagcctctgcaacaacaggaggttacaaacttgtcgtatcctcagcagagcctagaaaagtgtcatctccaaccatttctaatatccagggatggttacctggatttaaaggagagggtgatagcgaacagcttccgactattgccatagttgcaaactatgacaccttcggtgctgtacctgcactttctgtgggaagcgacagcaatggaagtggagttgtggctcttctagagattgcgagactattttcacgtctgtattcaaatcctaagacaaggggcaagtacaatattctctttgggttaacatctggtggaccctacaattacaatggaactagcaagtggcttaggagttttgatcagcgtgtacgcgagagcattgactacgcaatttgcttgaacaatgttggttcctggggcaatgacctctggatgcatgtatcaaagcctccagaaaatccctatatcaagcaaatctttaaagaattttcagatgtttctaaagaaatgggtgtttcagttggaatcaagcacaagaagattaatgtctcaaatcccagagtagcatgggaacacgaacagttctcaaggtttagggtgactgcacttactctttcagaaatgtctacccctcctgattttttggaaagcactggcggtcttcatgacactagagaatctacagatgctgagtcagtaatccgagctgccagattagtttctgagagtcttgcgagacgcatctatggactgaagggaaggaacatagatgtttttgcagagaatagcagcttagccattaatcctcactatatccggtcctggttggatctgttgtcacggacaccacgggttgcaccttttctgcagaaaaatgaccccttcatagcagcactggaaaaggaactgtctgcacacactactgatgtgcgtgttcaaagtgatgcgcttgatggcatgttcactttctatgatgcgacgaaagcaactctaaatgtctaccaggttgcaggtgttacttttgatctgctgttccttctggtgctcggctcctacctgattgttctcttctgtttcctagtgattactacacggggtgttgatgatctcattaacatattccggcggcctccatcacgcaaactcaagggtgcataggctaggctgtgttttgtgtattagcgccagccaagagaccgcatgcctagtagtcattagaagaagagatagagatgaggatgacaggcaggcaggcaggctagcttgcttcccacagcacatagacaaacattttttttcctttttgtgtcaggaatttcgactgtaatttagctgtattttggttacaattctggcttattcggggtggactggtggcggtgtctgatgagagacagagaagcacacaccaccacgccgcctctgaactttggatgctgagaaattcttgtctgaaacacaaacactgaaggcctgccgtgcctgtgtttacttgttgtctgaaatataaaaaataatagagaagaggaatataaagtcaaagcgaaacgaagcacctaccttgcaggatgagatactggaacatggagataggccaagaagatcgtgattgaatttcagtcccttgattttagatcggacggccgatagatagatagtaggatggataaggcagtgagtgatccagggccaatgggccatccaacaaagagtcagccgagtctgctctgctgctccatcggatctcccgcgcgccaaaccatgccgacgcagcaagcatgttctgctgcggcagcattgagatcgcggcggccttcccctgcatccacgacgacgacctcccggcagctgcggctgcgtccgcctcgtgccgccaccgcgggcgtgcggctgacggtgtcggacgcggagctggagtcccgcgggttcgctgtgcggcgcacggcggagggcatcgacgtggcggcgctgaacgaggtgttcgtgcgcgtgggcttcccgcggcgtcaggaggagcggctgcggcgcgcgctggagcacagccgtgtggtgtggctgtcggccggggaggaggaagggcggcccgtggcgttcgcgcgcgcggccggggacggcgtgttcaacgccgtggtgtgggacgtggtggtggagccgtcgagccagggcctcgggctgggacgcgccgtcatggagcgcctcgtcgacgagctgcggcgcgacggcgtggccaacatcgtgctctacgccgagacgcgcgtggtggggttctaccgcctgctggacttcgccatggaccccgacggcatcagggggatggcatactaccgcaagtccactactaccgccgcttgattcgtctcgtctgtcttgaactcattcatcaatgaaggaagtcgatcgaattccctaaagccccccatgtttgtatgatgtagatatgacatggtttatttttatcactcatctcatagttgctcgtttattacctttcattttatattccgcgaaaacgatctagctagaacatgtacttatatttcccgcaaatcaagcaatataaaaacctcacttctttc

SEQ ID NO: 60544 - DNA, 3656 bp, Zea Mays
aggggctacaggctgaggcgagattattgcggttatgaaaaacaacttgctgggcttcgcttgtttagaaacaatacagtgggctttgactgaatagcaacgaaacatggcctaaaactcccgtttggaaaagctctcgtcgtctcgcaccttgagctccgattggaacagacgttgtgacttcatttagaagcatcaagctttagtatcgggcctgccacacccaccgtactccgatccatggcggcacctgggaatgaaggcgtcagcaataacacggacagtacacagatcgggaggtagaactcacgagtcacgagggagctggcggcaaactcccctccatagctgtatccatcggctggtgaaggtcaaaacactttgccgagaaggtagaaggatggggaggaagaactcaccggacctctctgcactctgcagtgagcaggacatggagtcggcgtccatatgagcgttgcagccacgccaacaactgggcagcggcgacatctgcatctcccacctcgtctccctcccgtatctgcaagccttgatcccgccgccagccatccatccaagggagccatgtctccatccggcgagctgctggcttccatctcctccgtcttcactgtcgccttcgtcctcctcgcctgcgtcgagctcggcgacgccgccgccgccgccgtcggcgtctaccgcctcatccagtacgacctcgccggcgctccgctcggctcccgcgccgcggtcctcaaccaccacgctgccgcgctcccgctccccgccggcgcagacctctcccgctccgccctcgtcgcgccgctcctcgacctcccgctctctttcctcagagagtacctggtggagaaaaaacatctggggggattactcattctgctcccgacaaataatgacagtgtggatgacaaggggcaattcaaaggtgtactgactgagctggagaagttgcttctgcatgaacaagttccatatccagtgtactttgctttgcatgacgacaatcttgataacctgctggcagatatccatagaattgcctccacaggtcaaccagcctctgcaacaacaggaggttacaaacttgtcgtatcctcagcagagcctagaaaagtgtcatctccaaccatttctaatatccagggatggttacctggatttaaaggagagggtgatagcgaacagcttccgactattgccatagttgcaaactatgacaccttcggtgctgtacctgcactttctgtgggaagcgacagcaatggaagtggagttgtggctcttctagagattgcgagactattttcacgtctgtattcaaatcctaagacaaggggcaagtacaatattctctttgggttaacatctggtggaccctacaattacaatggaactagcaagtggcttaggagttttgatcagcgtgtacgcgagagcattgactacgcaatttgcttgaacaatgttggttcctggggcaatgacctctggatgcatgtatcaaagcctccagaaaatccctatatcaagcaaatctttaaagaattttcagatgtttctaaagaaatgggtgtttcagttggaatcaagcacaagaagattaatgtctcaaatcccagagtagcatgggaacacgaacagttctcaaggtttagggtgactgcacttactctttcagaaatgtctacccctcctgattttttggaaagcactggcggtcttcatgacactagagaatctacagatgctgagtcagtaatccgagctgccagattagtttctgagagtcttgcgagacgcatctatggactgaagggaaggaacatagatgtttttgcagagaatagcagcttagccattaatcctcactatatccggtcctggttggatctgttgtcacggacaccacgggttgcaccttttctgcagaaaaatgaccccttcatagcagcactggaaaaggaactgtctgcacacactactgatgtgcgtgttcaaagtgatgcgcttgatggcatgttcactttctatgatgcgacgaaagcaactctaaatgtctaccaggttgcaggtgttacttttgatctgctgttccttctggtgctcggctcctacctgattgttctcttctgtttcctagtgattactacacggggtgttgatgatctcattaacatattccggcggcctccatcacgcaaactcaagggtgcataggctaggctgtgttttgtgtattagcgccagccaagagaccgcatgcctagtagtcattagaagaagagatagagatgaggatgacaggcaggcaggcaggctagcttgcttcccacagcacatagacaaacattttttttcctttttgtgtcaggaatttcgactgtaatttagctgtattttggttacaattctggcttattcggggtggactggtggcggtgtctgatgagagacagagaagcacacaccaccacgccgcctctgaactttggatgctgagaaattcttgtctgaaacacaaacactgaaggcctgccgtgcctgtgtttacttgttgtctgaaatataaaaaataatagagaagaggaatataaagtcaaagcgaaacgaagcacctaccttgcaggatgagatactggaacatggagataggccaagaagatcgtgattgaatttcagtcccttgattttagatcggacggccgatagatagatagtaggatggataaggcagtgagtgatccagggccaatgggccatccaacaaagagtcagccgagtctgctctgctgctccatcggatctcccgcgcgccaaaccatgccgacgcagcaagcatgttctgctgcggcagcattgagatcgcggcggccttcccctgcatccacgacgacgacctcccggcagctgcggctgcgtccgcctcgtgccgccaccgcgggcgtgcggctgacggtgtcggacgcggagctggagtcccgcgggttcgctgtgcggcgcacggcggagggcatcgacgtggcggcgctgaacgaggtgttcgtgcgcgtgggcttcccgcggcgtcaggaggagcggctgcggcgcgcgctggagcacagccgtgtggtgtggctgtcggccggggaggaggaagggcggcccgtggcgttcgcgcgcgcggccggggacggcgtgttcaacgccgtggtgtgggacgtggtggtggagccgtcgagccagggcctcgggctgggacgcgccgtcatggagcgcctcgtcgacgagctgcggcgcgacggcgtggccaacatcgtgctctacgccgagacgcgcgtggtggggttctaccgcctgctggacttcgccatggaccccgacggcatcagggggatggcatactaccgcaagtccactactaccgccgcttgattcgtctcgtctgtcttgaactcattcatcaatgaaggaagtcgatcgaattccctaaagccccccatgtttgtatgatgtagatatgacatggtttatttttatcactcatctcatagttgctcgtttattacctttcattttatattccgcgaaaacgatctagctagaacatgtacttatatttcccgcaaatcaagcaatataaaaacctcacttctttc

SEQ ID NO: 60545 - DNA, 3758 bp, Zea Mays
aggggctacaggctgaggcgagattattgcggttatgaaaaacaacttgctgggcttcgcttgtttagaaacaatacagtgggctttgactgaatagcaacgaaacatggcctaaaactcccgtttggaaaagctctcgtcgtctcgcaccttgagctccgattggaacagacgttgtgacttcatttagaagcatcaagctttagtatcgggcctgccacacccaccgtactccgatccatggcggcacctgggaatgaaggcgtcagcaataacacggacagtacacagatcgggaggtagaactcacgagtcacgagggagctggcggcaaactcccctccatagctgtatccatcggctggtgaaggtcaaaacactttgccgagaaggtagaaggatggggaggaagaactcaccggacctctctgcactctgcagtgagcaggacatggagtcggcgtccatatgagcggtaatggtggtgacggtgctttttcaatcgggagttttgggccgtgtctcgttgctaagcccatggcattgtttccaaagaagtgaagcccatggcatctgcattgcagttgcagccacgccaacaactgggcagcggcgacatctgcatctcccacctcgtctccctcccgtatctgcaagccttgatcccgccgccagccatccatccaagggagccatgtctccatccggcgagctgctggcttccatctcctccgtcttcactgtcgccttcgtcctcctcgcctgcgtcgagctcggcgacgccgccgccgccgccgtcggcgtctaccgcctcatccagtacgacctcgccggcgctccgctcggctcccgcgccgcggtcctcaaccaccacgctgccgcgctcccgctccccgccggcgcagacctctcccgctccgccctcgtcgcgccgctcctcgacctcccgctctctttcctcagagagtacctggtggagaaaaaacatctggggggattactcattctgctcccgacaaataatgacagtgtggatgacaaggggcaattcaaaggtgtactgactgagctggagaagttgcttctgcatgaacaagttccatatccagtgtactttgctttgcatgacgacaatcttgataacctgctggcagatatccatagaattgcctccacaggtcaaccagcctctgcaacaacaggaggttacaaacttgtcgtatcctcagcagagcctagaaaagtgtcatctccaaccatttctaatatccagggatggttacctggatttaaaggagagggtgatagcgaacagcttccgactattgccatagttgcaaactatgacaccttcggtgctgtacctgcactttctgtgggaagcgacagcaatggaagtggagttgtggctcttctagagattgcgagactattttcacgtctgtattcaaatcctaagacaaggggcaagtacaatattctctttgggttaacatctggtggaccctacaattacaatggaactagcaagtggcttaggagttttgatcagcgtgtacgcgagagcattgactacgcaatttgcttgaacaatgttggttcctggggcaatgacctctggatgcatgtatcaaagcctccagaaaatccctatatcaagcaaatctttaaagaattttcagatgtttctaaagaaatgggtgtttcagttggaatcaagcacaagaagattaatgtctcaaatcccagagtagcatgggaacacgaacagttctcaaggtttagggtgactgcacttactctttcagaaatgtctacccctcctgattttttggaaagcactggcggtcttcatgacactagagaatctacagatgctgagtcagtaatccgagctgccagattagtttctgagagtcttgcgagacgcatctatggactgaagggaaggaacatagatgtttttgcagagaatagcagcttagccattaatcctcactatatccggtcctggttggatctgttgtcacggacaccacgggttgcaccttttctgcagaaaaatgaccccttcatagcagcactggaaaaggaactgtctgcacacactactgatgtgcgtgttcaaagtgatgcgcttgatggcatgttcactttctatgatgcgacgaaagcaactctaaatgtctaccaggtgttacttttgatctgctgttccttctggtgctcggctcctacctgattgttctcttctgtttcctagtgattactacacggggtgttgatgatctcattaacatattccggcggcctccatcacgcaaactcaagggtgcataggctaggctgtgttttgtgtattagcgccagccaagagaccgcatgcctagtagtcattagaagaagagatagagatgaggatgacaggcaggcaggcaggctagcttgcttcccacagcacatagacaaacattttttttcctttttgtgtcaggaatttcgactgtaatttagctgtattttggttacaattctggcttattcggggtggactggtggcggtgtctgatgagagacagagaagcacacaccaccacgccgcctctgaactttggatgctgagaaattcttgtctgaaacacaaacactgaaggcctgccgtgcctgtgtttacttgttgtctgaaatataaaaaataatagagaagaggaatataaagtcaaagcgaaacgaagcacctaccttgcaggatgagatactggaacatggagataggccaagaagatcgtgattgaatttcagtcccttgattttagatcggacggccgatagatagatagtaggatggataaggcagtgagtgatccagggccaatgggccatccaacaaagagtcagccgagtctgctctgctgctccatcggatctcccgcgcgccaaaccatgccgacgcagcaagcatgttctgctgcggcagcattgagatcgcggcggccttcccctgcatccacgacgacgacctcccggcagctgcggctgcgtccgcctcgtgccgccaccgcgggcgtgcggctgacggtgtcggacgcggagctggagtcccgcgggttcgctgtgcggcgcacggcggagggcatcgacgtggcggcgctgaacgaggtgttcgtgcgcgtgggcttcccgcggcgtcaggaggagcggctgcggcgcgcgctggagcacagccgtgtggtgtggctgtcggccggggaggaggaagggcggcccgtggcgttcgcgcgcgcggccggggacggcgtgttcaacgccgtggtgtgggacgtggtggtggagccgtcgagccagggcctcgggctgggacgcgccgtcatggagcgcctcgtcgacgagctgcggcgcgacggcgtggccaacatcgtgctctacgccgagacgcgcgtggtggggttctaccgcctgctggacttcgccatggaccccgacggcatcagggggatggcatactaccgcaagtccactactaccgccgcttgattcgtctcgtctgtcttgaactcattcatcaatgaaggaagtcgatcgaattccctaaagccccccatgtttgtatgatgtagatatgacatggtttatttttatcactcatctcatagttgctcgtttattacctttcattttatattccgcgaaaacgatctagctagaacatgtacttatatttcccgcaaatcaagcaatataaaaacctcacttctttc

SEQ ID NO: 60546 - DNA, 955 bp, Zea Mays
gccagtgccagtggcaggcttataaacactaggagtcgtcccttccttgctctgctttcctctctgctagctagctcttgtcttgtcactgagtgagcagaaggagtgtgtggtggagtgcaaaccaaatcaaacgaagaaaagtgggagcgaggaggaagaaaagaagaagaagaagacgacgacgacacccaccaccagcagcaagcagcaatcagcaaccagcataacgaaatgtcgatcaagtactgcgaccagcacaaggactgcgagcggcagcgtctgtaccgtcgcttctgcgccgccctggtgggcgtcatcgtgctcgtcctcctcatcgtgctcatcgtctggctcgtcctccgccccaccaagcctcgcttcttcctcaacgacgtgagcatcgtgtgcatcaacgtcagctccgcctcctacctcaccgtcaccatgcaggccacgctggcgtcgcgcaacaccaacgaccgcgtcggcatctactacgaccgcgccgacgtgtacgccgagtaccgggcgatgcagatcacggtgcccaccgcgctgccgcccttcttccagccgcccaacgacgccgccgtctgggcgcccttcctctccgcctccaacgtcccgctgccgccctacctcgccaccgcgctcacacaggacgagacggcggggtacctgctcgtcaccatccgcgtcgacggctggatccgctggaaggccggggccttcatcaccagccactaccacctcagggtgcgctgccccgcgctgctcaccgtcaacgacggacaaggaagctacggctccaacgccgagtgtattttggatttcctcgaggtatggtgggacaaaaaaaaggactattgctttgaatctacggaattcatgagagggacaaacccacacacacacaaaatgtaagtgtacgtgttactattaagttgttgat

SEQ ID NO: 60547 - DNA, 777 bp, Zea Mays
accaagaagctactagctagatctccttctccactagctcacaacagaagaggacgagaggaagcaaggcggcggcggcggcggcagcaacaacatacaccgctggccgtggcgccatgggcatcctggaccacatgtcgcatgtgtgcagcatcacggagacgaaggaggcgctcaagctcaggaagaagcgaccgctgcagacggtgaacatcaaggtgaagatggactgcgaaggttgcgagcgtcgcgtgaagagcgcggtgaagtcgatgcgcggcgtgacgagcgtgacggtgaacgcgaagcagagcaagtgcacggtgaccgggtacgtggagcccgccaaggtgctggagcgcgtcaaggccaccggcaagaacgccgagatgtggccctacgtgccctacacgctcaccacctacccctacgtcggcggcgcctacgacaagaaggctcccgcgggcttcgtccgcagcgcgccgcaggccatggcagaccccagcgctccggaggtcaagtacatgtccatgttcagcgacgagaacgtcaacgcctgcaccatcatgtgatgcatgcatatgtatagtctctcgatcgtatcatgtgtagtagtacgagctagctagtgcatatcgatcttcgtactgtatcatatcgatcgaaagaaccttaatagccaatacaagaggaatgtgaattaagcaatctatatagtatattacaaactaaaacttctaataatatcagtctattaaaatacatataataagcaaa

SEQ ID NO: 60548 - DNA, 1798 bp, Zea Mays
tctgggccggtccatccgtttccgacacgctcacgcaattcgggcgaaaagaacagaaaagcatctgtctcggttacgtctctttttctctctctctctctatcggccgcgtccggcgtcccgtccaaaaagggaaagcgatgcgcgtggcgtggcggcacttcctcctccgcctgcctcgcccgccatggccgcgcgcgccaaggccgccgccgtcgacgaccacgaccccatgccgccaccgctgccgctcccatggccgcgcccagcgccgctcctcgtcatgctgtccctgctcgccacggcctcctacctggccctcacgcgctttcccgccgcgctcctcccgatcgcccctcgctctcgcccccacgacgcgcccgcgcacgcgcccggggacagctgcgcggggttctacgcgggcgcggggccggcgcgcgaggtgtgggcgtccgtcgaggagttcggggccgtgggcgacggggccacgctcaacaccgcggcgttccggcgcgccgtcgcggagctgggcgcgagggccgtcggtgggggaggggccaggctcgacgtgccccccgggaggtggctcacgggcagcttcaacctcaccagccgcttcaccctcttcctgcaccgcggcgcggtcatcctcggctcccaggatccagaagagtggcctctcattacccctttgccgtcttacgggcgcgggagagagcggttaggaccacgccacatcagcctcattcacggagagggcttaaacgatgttgttattaccgcaacgggaccatagatgggcaaggtcatatgtggtgggagctatggcggaaccgaaccttgaaccacacgagaggccatctcatcgagcttgtgaactcaaccaacgtcctgatatccagtgtcacgctgagcaactcccctttctggacagtacacccggtctactgcagcaacgtggtgatgaaggatttgaccatactggctcccctggatgctccaaacacagatggcattgatccagactcgagctctgaagtttgcatcgaagactgctacatcgaaagcggagacgacctcgtggccgtcaagagtggctgggaccagtacgggatctcatttggcaagccgagcacgaacatcgtcatccagagggtttcgggcacgactccgacgtgctcgggcgtaggcttcggcagcgagatgtcaggaggcatatctaacgtgctcgtccgtgacctccacgtgtggaattcggcgcaggccgtgaggctcaagaccgacgtagggaggggtggctacatcaccaacatcaccatagccagtgtggccatggagaaggtcaaggtgccgataaggttcagccgaggcgcagatgaccatcctgacgacaggtatgacccggccgcgctgccgaggatcagcaacgtgctggtcagcgacgtcgtcggtgtacacctgcagcgagcaccgatgctggaggcagtgcctggcgcagtttatgaggggatctgcttcaggaacttcagcttcagagggataaggcggcagcaggacagcaggtggcattgcgagtctgtgtatggagaggcgcatgacgttttccctgcaccgtgtgaagagttcaggagagatggatcctcctcctggtgtggacttctttgaccaactactctatctagtagtagtacatactacagcgcccacaagttttgggagtggatgatataggttttttagattatacagacaaactcaattttttaaactttaattagtcttctgttttcgaatgggg

SEQ ID NO: 60549 - DNA, 736 bp, Zea Mays
agaagataagcctatccatcccttgcattggtattgtcatctggggcagggcaggggagggcaggagaagctatctattggccatctatccagcagccgctctccccagccccactctctccatctagagctccctaactgcaccggccgccacaccaccgtaccccgacccctcgacaacaatggccaccgtcctaggcagcccccgcgcgccggccaaggtgggcatcatgggccgtagcgccagcagcaggggcaggctgcgcgcgcaggccacctacaacgtgaagctgatcacgccggagggggaggtggagctgcaggtgcccgacgacgtgtacatcctggaccagtccgaccagagctacctcgacgacggccagatcgccgccggctgggtgctcacctgccacgcctaccccacctctgacgtcgtcatcgagacgcacaaggaggaggagctcaccggcgcataatcattcatgcccatccatctctatctctgtgggtcgtcgttgtgtgtaatttgagtacgcgcgtacacgtactgcttttgtttcatttgagcactgttcgtgtaagcgtcgagttgccctgccatcgtctctctctctctcgatctctactatttctgtgtgtgcgcgcttctatttttccaatgttgagttacgcatatttgtccagtaaccttgttttgcttaatcacacacagctcccaaattccagtcaaaaaaat

SEQ ID NO: 60550 - DNA, 1601 bp, Zea Mays
aacctaacagaagcaaccgaatatcccctcgcctttcaactcgtcttcctcctcatgtcgtcgcctcctatccctctatatcttctattctaagccacctcgatcggaccctagatagatgcaagaaaagaaaagagaagagcctctgtggatagtggtgggtgctggatcactgggcggagcagcttctcatatcggatcgatcgattaattaatatatactataaacatacaatcaattacatacatatacgccaagagaagaggaacgccggcccgtttcacttgtctccttcctccgatccctcccggcggccggccgggctcgggcgtttttccccttttgtttcccatggaggacgccaagatggggaacggcgccaccatccgcgcggtgctcgccatcctccagtggtggggattcaacgtcaccgtcatcatcatcaacaagtggatcttccagaaactggagttcaagttccccctgacggtgtcgtgcgtccacttcatatgttcctccatcggagcctacatcgcgatcaaagtcctgagaacgaagccgctgatcgaggtggcctcggaggaccggtggaggaggatattccccatgtcgttggtgttctgcgtcaacatcgtgctggggaacgtgagcctgaggtacataccagtgtcattcatgcagacgatcaagtcgttcactccggcaacgacagtggttcttcagtggctggtttggaggaaatactttgagtggcgcatctgggcgtccttggtgcccatcgttggaggaatccttgtcacctccgtgacggagctgagcttcaacacggctggcttctgcgccgcgctggtggggtgcctggccacgtccaccaagaccatcctggcagagtcgctgctccacggctacaagttcgacagcatcaacacggtgtactacatggctccgctggccacgctgatcctgtcggtgccggccgtggcgctggagggcggcgccgtgctggggtggctgcggacgcacgagtccgtgggaccggcgctggcggtcgtcgtcacctccggggtgctggccttctgcctcaacttctccatcttctacgtcatccactccacgacggcagtcaccttcaacgtggccggcaacctcaaggtggccgtggcggtgctggcgtcctggatggtgttccggaaccccatctccgccatgaacgcactcggctgcggcgtcacgctcgtcggatgcaccttctacggctacgtcaggcaccgactctcgcagaaccaggcgcccagagcccgcttggagatgctgccgctcaccgccgtcgacaagcaaggcgacaagatataaaaagtcttttcgaataaaccatctgattctttctgatccacctagcctaaccgccgatcgagaatgcatccaccatcagagatgacaggaaattattttttgttggcagccagattttgataatgagtcagttcagttgttgcttaaagagaaatgtcatgaggtctataaagtcttttggaatgataaatcttgttgtcttggttaaagagaacttagagaagaagatgaaaaaaaaaattaaaaa

SEQ ID NO: 60551 - DNA, 2039 bp, Zea Mays
ctcgacttttgtgtcctcacgccagctgaattcccaacctaacagaagcaaccgaatatcccctcgcctttcaactcgtcttcctcctcatgtcgtcgcctcctatccctctatatcttctattctaagccacctcgatcggaccctagatagatgcaagaaaagaaaagagaagagcctctgtggatagtggtgggtgctggatcactgggcggagcagcttctcatatcggatcgatcgattaattaatatatactataaacatacaatcaattacatacatatacgccaagagaagaggaacgccggcccgtttcacttgtctccttcctccgatccctcccggcggccggccgggctcgggcgtttttccccttttgtttcccatggaggacgccaagatggggaacggcgccaccatccgcgcggtgctcgccatcctccagtggtggggattcaacgtcaccgtcatcatcatcaacaagtggatcttccaggtcccgtccctcgcgcttgctcttgtttaaatcctggtcttctttttttgtttcaattcaatttccagagatggccatgtatgtagttatatatatattcattcaaggggatttaggggtggatccgtcaggacaaccaagagatttcgtctctttttagttcttgccttcatccaatcgttcgataggtgcagattaatcgcccccatgatgttgtcgtctttttcttcagtgatttggtaggaacataaaggaatcatccttttttttttgtccgactgaaaagaaaattacttacttgaaccggtggtggttcgtagattggatttccagatttaattgtaatcatggtaagaagagcctgttcttatcctgtgacgctgactctgtgtggggttgtcagaaactggagttcaagttccccctgacggtgtcgtgcgtccacttcatatgttcctccatcggagcctacatcgcgatcaaagtcctgagaacgaagccgctgatcgaggtggcctcggaggaccggtggaggaggatattccccatgtcgttggtgttctgcgtcaacatcgtgctggggaacgtgagcctgaggtacataccagtgtcattcatgcagacgatcaagtcgttcactccggcaacgacagtggttcttcagtggctggtttggaggaaatactttgagtggcgcatctgggcgtccttggtgcccatcgttggaggaatccttgtcacctccgtgacggagctgagcttcaacacggctggcttctgcgccgcgctggtggggtgcctggccacgtccaccaagaccatcctggcagagtcgctgctccacggctacaagttcgacagcatcaacacggtgtactacatggctccgctggccacgctgatcctgtcggtgccggccgtggcgctggagggcggcgccgtgctggggtggctgcggacgcacgagtccgtgggaccggcgctggcggtcgtcgtcacctccggggtgctggccttctgcctcaacttctccatcttctacgtcatccactccacgacggcagtcaccttcaacgtggccggcaacctcaaggtggccgtggcggtgctggcgtcctggatggtgttccggaaccccatctccgccatgaacgcactcggctgcggcgtcacgctcgtcggatgcaccttctacggctacgtcaggcaccgactctcgcagaaccaggcgcccagagcccgcttggagatgctgccgctcaccgccgtcgacaagcaaggcgacaagatataaaaagtcttttcgaataaaccatctgattctttctgatccacctagcctaaccgccgatcgagaatgcatccaccatcagagatgacaggaaattattttttgttggcagccagattttgataatgagtcagttcagttgttgcttaaagagaaatgtcatgaggtctataaagtcttttggaatgataaatcttgttgtcttggttaaagagaacttagagaagaagatgaaaaaaaaaattaaaaa

SEQ ID NO: 60552 - DNA, 2013 bp, Zea Mays
ctcgagtctagggtgtcttgtaatgccgccactcgtcttcttgggcgtgcatgcgtcttcttgggtgcagagttatcgcaaggtgggcgccaaacgctgggcaggcactggagaaactggagggacacgctggagggcgtcctacaatccactgctgggaagcagggctccggagggattcagagctgcatccgagctgcgctcagatttagtggttgccctcccacagaacatgggaacttagctcacgacggaggagcaggcagagatgaccctgttggagctgtacattctgaagagaatagtggtgccttggttcagttagaagacggaacagctgcacctttggaagccaacaaaacgatgtgccataatgctctctttgacattctgatctccgagaagtttgcgatgctgtgtgatctgctagctgcaacattccatgtcagtaagcctgacgatgtgattggtttgcaaataattgatgccaagatgagaaatggggattatgcacagaaccatgcgctgcttgaccatgatatcaagcagatatggaagaagtttgaacacgttggccaagaaatggctggtctggcaagcagtctctcagtgatttcacaagcttctcaccaaaagcaggcttctggtgtttcagaaattgatgtggctgaacacaagatagaagaaacaagcctggttggtgttgcccgcaaagccctaagggagttgactccccagtgcgattctggctattctacgataccaaaacgagctgggaggtctggatcggatggaatttgcaaggattgtggcagaaaggcagacagcaaaggaagaattatctgtgacagatgtgaagctgcgtaccatgtttcgtgtctgaagcttgccatcgatgaagaggccccagcaaaatggtactgtcccagctgcgttgagccagacgtagctttgaagcataaaaaccatggcaggtcacatgaaggctgtgatgtatgcgagtggctcgtggtgaagccagaagagcctgctgaagatgttagcgagcctgaactggcggtcaaaacgcaggagagctcagtgtcaagcatgggcgaagacagcgaaccagacctctcaacgactgctctagcgaacttgtgcaagaactgtggcacatgcgaagacgaggacaggaagttcatggtatgcgggcatggtttatgttctttcaagttctaccatgtcctgtgcctgaaagagagacagattgcaagcgagaagcagaagaatctaaagtgctggtactgcccgtcttgcctgtgcagacggtgcttcaaggacaaggatgatgagaaaatagtactgtgcgatggctgcgacgaggcttatcacatctactgcatggacccgccgtgcgagtctgtcccgagaggtaaatggttctgcacgcggtgtagcgcgcggaggtcagtgcaagggatgcagaggtatgagaagtcgatcctggagaaagtcaagcgtgctcctggtgccaatgggccgaaggtgcaggcatctgctggtccagaaaaataggcagcagtgtggatgatgtttcacaggccatactagggtagaagaaagggaaggatacttttgttcctctgagggagggggtatacattgctctggtagctttgaagaatcgatggatgggttgtgtatacgtggggggaaggaagatgccccgttggctgctgatgttgattcactgtgctgccatttcgtttttggaattcttgagtgtcgctcggcttgttgttgtgctgttatgttgtgtctgatggtaagtggcatcgcttatcgatgatatgtacatgcctgtaactcgttttcttttatttgttggacattgtgtgtgtgtgtgtgtgtgtttgaattgtgatgacctagagaacgctggtgtcaatcaatgcagcgtaccttgtttgcgcctaaatttggtagacaaaagaggagattaccttcgtagcatgtgtaccctgcatgtgg

SEQ ID NO: 60553 - DNA, 723 bp, Zea Mays
atggcagcaaccacaccgacgaccaataacgccccgctcctcctcctcctcctcctcctggcagtcctccctatagccgcactctcctcccgcgctggcccgccggccgcgcacaaaagccacggccacggccacggccacgaccacggccacggccacagaccgtcggccaagcacccgccgccgccgccgcctccatcatcatcgtcaacaccaccacccccaccacccgcggcggcgctggtgcgcaccacctgcaactccacgtcgtactacgccctgtgcgtgtccgcgctggcggcggacccgtcgagcgcgacggccgacgtgcggggcctgtcggccatcgcggtctcggccgcggccgccaacgcctcgggcggcgcggccaccgccgcggcgctggcggcgaacggcacggcccccgcagggaccgccacctccgccgccgacagcgccgtgcaggcgctcctccagacctgcgccgccaagtacgccagcgcccgcgacgcgctggccgccgccggggactccatcgcgctcgacgactacgactccgcgtccgtgcacgtcagcgccgccgccgagtacccgcaggtgtgccgcacgctgttccgccgccagaggcccggacagtacccggccgagctcgccgccagggaggagacgctcggccagctctgctccgtctcgctcgacatcatcgcgctgctctccagctga

SEQ ID NO: 60554 - DNA, 981 bp, Zea Mays
atggcgttcaaccctacccctccaggacttggcttcccctacctccctccgaacccttaccttccaagaccaccacagcagcccttcccgccaccgcgacgcgctccaccaccgcccaccctaccacaaccgcctcctccgcgccgtgctcccccaccaccggctctggcaccgccaccacccacaatgccgccaccgccaccgcgccgcgctcccccgcctcccactcagccaccgccgccaccacgccgcgctcctccacctcccactcagccaccgccgccaccacgccgcgcccctccacctcccactcagccaccgccgccaccacgccgcgctcctccaccaccaccgtcaccacccatccgcccaccaccaccaccaactcctcggcctcaagcgccaccaccgcctcacctgcccatgccgcctccgccggcgcccgtgccgcctccacctagccccccgcaccacatcgtcatcatcgtggtgttcgtctccctgggcggcctgctgctgctggcatgcctggctgccgcgctcctctgctggcacaagaagaagaagaggagggggaggaaggcagaggaggaggaggccaaggccgaggtgctcaacttcagcgaccacgtccacgtccacaagcagaccgtgcccgggccggccgggggcgcgagcgccgtcaggctgacggtggacgaggacgtcaggttccaggaggcggtcaggaagcaggacgccatcggcgagtcctcgagcaccgccccttggacctggcacaagaaacaccagagcggagaggagaggaagacggaggtcatcaacgtcaccaagcacaagcacgtcgacgagatgatcgtgcctgggccacatggcgaaagggttgaggtcctttcggaggatgaggacatcaggtttgaagaggccggcgagagccaggaagagtatgacaaatccaaggcgcgcataacaaagtcctga

SEQ ID NO: 60555 - DNA, 1247 bp, Zea Mays
agttggctgttctgacttgacacagagagggatgcgatgaacaacacaagacgccgctgtttattttttaaagaaaaggaaagaaaagaagaaaaggacagaaactagaagttgaccccatcatttgtcccaagaaatgccagcaaatgagcttgcttccgtgtgtataagtagtggattagctgaggctcggggtggttcaggtgataaggaaaggtagtggtaggaggatagatggagaggaaacggaaggagatggagaagggcaagtctgagctgagactggccatggaggagctccgtttgtgcggttcaagagatggggcggaggaggaggaggaggtgcaggttcagcaggtgaaagtgcaggagcagcacaagtcatccacaatggacctcctctatgtctccaagcagctcatccatgtccttgatgagattggaccaactctgctagtcctgaggcaggacattcagcaaaatgtccagaggttacaagacctgcatgaaaaggactgttccaaatacgcgtgcttgacggcgatagtcaccgaggaaatggagcaagggacagcgaagaagaccaagagctgcaccagagctatcatctggctgtctaggtcgataaaattctcaaagtacttactggagaggctgctggagactcctgagtcgagcctggaagagatcgtggaagaagcctacgcaaatactctgaagccatggcatggctggatctcgtcagctgcttacaagcactgaagctcatcccggaaagagagttcttcgtagcgctgctgatgggtaactgtcaagacttggaggatctagcagaagatgccaggatgctggcctatgccgtccagcccttgttacaggagatcgatgcgatttcggctaagcacaacctggacaagatgaaatcctcttaggacacgaggattttgccgatcacctggtgactgtacatagctgcatacgtgacctgaccttgtcttgtggctgtaaaagtgaaaggtgtaattttggggtttgtctgtagatttctagtgacatatcgaatgtgtaaaaaaaaaaagttgtcttcagtgtatccctgcagtggttttagtgcatgtatacccctcacgacctaggcacagaatcctcttctagtgtcaaattgtgtagtgcttgttttctttcttcgatttttttccaacgtaatggcacaacctctgctttttaataagaagaaaacaagaaga

SEQ ID NO: 60556 - DNA, 206 bp, Zea Mays
cttccatgcaaacgccaagttctagcttccgttcgtgtcgccgtgttcgtcggaaagaggggtgcagggaggcatcgtgcgaacatctgcgtcgctctcgagcgcggagaaggtcctgggccccggtcgaacctgttgtagtgagccagcaccgtagcgcgtgggcagtcctgccacctgccgagtccagcgcgaggacacgtgtc

SEQ ID NO: 60557 - DNA, 1346 bp, Zea Mays
atggaatcggagaacgaaaagctccgtaaagaactggctactctgctcagagttgttcaaaagcgtagttgtgacatcgttgatgtcgtcaaatcagccttccaacctttcaactcacctttggtggacgaattgaaccgagcactagttgagattgacgacctcgccaaggatctcgaagacgtagcagtgcaaactcagtgggaggtctatgaaagaccttgtgggttgtacatgctcatttatatcatgtttgatctacctctgttgcatagaatggggagtgattggaaccagtatcaactggcgcacatctccgctggagatttgttgcgggcggaaatcgctgctggctctgagaatgggaagcgggccaaggaattcatggagaagggccagctcgtgcctgatgagattgtcgttaatgaacgccttcggcaaccagacgctcaagaaaatggttggcttttggacgggtacccaagaagctattcacaggccatggccttggaaactcttgaaatccggcctgatactttcattctgttagatgttccagatgaactccttgttgaaagggtggttggaaggcggcttgatcctgtaacagggaaaatatatcatttgaagtattctccgccagagaatgaagaaatcgcttcaaggcttacacaaagatttgacgatacagaagaaaaggttaagttgaggctggagacttattaccaaaatatcgagtccttgctatcaacatatgagaacattattgtcaaagtgcaaggagatgccacagtggatgctgtctttgctaagatcgacgagctgctgggttctatcctggagaagaaaaatgaaatggtttccagcacatgagcaaggacgacacgtacaagtaatgtaagccagtctcacgtaatggaaatttctccatgtggatgtggtcaaagcataggaatttttttcctccaattattaactgtacgcgaatggaagcgacagatcattcgtaggttgtgagggcttcagagatcatctgctgctgtacatgttttgttgctgtcttgtgaacatacatgtcttgttgtttctcaactggaggaatgctgttaacctgctgtatcatttccttgaatggcttatgtgagagggaggaggacctgagcagcagctcttgcaatctttgtctaaattccttcggatggtgaagcccatttcgtctgttctccgaaaagtatattgattgcattttccgaagaattgatcctctgtactggattgtttttctccttaaacattctcatcaagagtattagttatgcaagatctaagagtcggtaagatctcac

SEQ ID NO: 60558 - DNA, 732 bp, Zea Mays
ggtgtgcctgtgaaccaacccaagttcgatgctttggtgttgcttgcatgttggcgtggggcttggaagcttagccacgtgtttgagccatgttgtgctggcgccatcaaagccttctctaccgtgaaccggccgagctcaatcactttgcactacccttttatctagtcgctgcagggccagggcagtgaagtctcttcccgttcttgagttctagcgagagtgcatcgtgtgagtgttgtggttcatgttcacgtcggtgtttactctccccggccatcagtgtctcgtcgggaacgccgcggtgccgccggtgaacgccgctgggaacggtctcgccgtggcagaccttatctggggccggttgcgtgcgtgatctggggttggtctgctctgtggtgagtcgcaagtgcctgctccaccatggttgggaactctactgcatcgtcgttccggcttaacaccatcgaagttggaagccgccgacacgcgcagaggaagcgcgggcgcgcgcggtgctggagcctagggctgtaagcgctgtctgagtgggccggttttgcctggagttgggctggctggaacaccaagaacaagaattggtccttgtgaagatggaacctactccagtgctattgatccagtggtggactccatctaactgcctatcgtgatagaagatctcagatctcctcctgtaataagtgtctcgtcgggaacgccgcggtgccg

SEQ ID NO: 60559 - DNA, 569 bp, Zea Mays
atcactttgcactacccttttatctagtcgctgcagggccagggcagtgaagtctcttcccgttcttgagttctagcgagagtgcatcgtgtgagtgttgtggttcatgttcacgtcggtgtttactctccccggccatcagtgtctcgtcgggaacgccgcggtgccgccggtgaacgccgctgggaacggtctcgccgtggcagaccttatctggggccggttgcgtgcgtgatctggggttggtctgctctgtggtgagtcgcaagtgcctgctccaccatggttgggaactctactgcatcgtcgttccggcttaacaccatcgaagttggaagccgccgacacgcgcagaggaagcgcgggcgcgcgcggtgctggagcctagggctgtaagcgctgtctgagtgggccggttttgcctggagttgggctggctgggagaagttttattcccttatcttttggttagttacttcatgtggaggccttgaagcttagaatgtttatgtatatatcttatggaaaggcttcacccttccaactattttaataagttatgcactttg

SEQ ID NO: 60560 - DNA, 2580 bp, Zea Mays
gttattaaatttcattccttcgcatacctagtcctggcaccacctacaaaatggttttggttttatacatgtaatacacaaaccgcgtgacatttttaattccacactctctctctccatcaattccttgcttgattgcttggcatggttgcgcggtcaatgtccaacccgtccccaattcgaatcctcttcttcctctgtgctgctgctgctcacagacccaggccaagtcgtctcagtcctcttctaccaccaagctcccgtctcttcccctcctggtctcagcgactccatcctctccctctccagatccccgcccgtgacgccgccggctgttacctctccggctcatcgtcctcaggcccaggtaattcatcaattgccgtgcttttatcgtttccctaccgatttacggtacagtacttgctccactccgtcggccgtgctgctgcggccagtgattgattcgtcgggcaaaggaccgtcttttttcttccatccatccatccatccatccatccatccttatgagcgattctagcttcttggattaaatcaattgggcggatgagcaccgtgcctcgcgaatttgcaggtcttgatccgcgatccgccgatttccatccggcgcttactcggtgtcccgtcacctgcgggttttgctgtgcggggaggctgatccggcgagcgccttggatgaattcgcgccggtctcggtcggtgaagctggtgtcagcgcgcgccaacggggacggggccctggaggtggacgtacctgaggaagagggagacgcgcggatgagctcctcggccgccaacaccgtgtactgctgcatcgccaggggccggagcgtgatctaccggtacagcagcaagggcggcgacccgcaggcggaggccacggcggcgctctgcctggaccggtcgccgccgcaccaccggcattacgtgcacacctccgggcgcaggagctacgggtacctgacggccgacggccacaccttcttcgccatcatcgaccccagcgtcggcagcgccggcgcgctgcagttcctggagcgcgtccgcgacgcgttccggagcagcgcaggcgtcggcgggcgccagccgcacgagtcgctggtgccggccgtgcagcggctggtggcgtcgctggagaagatgccccacgccgcgttcgtgctcgatggcgcgggcgcgggcgcgggcgacggcgacggctgcacgtcgtcgtccaaggcgcccctgctcgggaagagcgggagcaggaaggagaagcggcggtccagggacaagctgtcgtcgtcggcggcgggggcgggggcgggaggctgtgaggacgagcaccacgggacccgagcggtgaggatagacgtgatgccggccgaggacgtcggcggcatgtcgctggagcgcagcggcagccagtccaggctgcggaggcagcagtcgtcgcggtcgctgtggatgcggcacgtgaaggtcatcgtcgccgtggacgccgtcgtctgcctcgtgctgttggcggcctggctggcggtgtgcaaggggttccagtgtgtgtccgggtgatggtggtcagtcgtgtacagtgttttgaggagacctgaggatggattcaatgcaaattgcctatttcgattgattgatcagaagagggtacctgcctgtctgtgtgtctgcttccatggcagcttctattttcatgctgcagctcttctcgtcggcgatgggggaactagacggtgaggaggaggaggaggaggaggaggaagtggagcgcatacgcatactgtgacggcgatgcgggtagcataagggaaatccagccactgggtgtggcagcaggagctaagctagctagcgcgccagtgctgagtgctgactacgatcgttgtggtgcttgctggggatgttgaggagtatatatatcatgctagatagaataggaagaactctagatacaagtactgcatgtgatcgatttcttttattaacattcacgatgaatgaccaaccatgtgcgcttcgtcttcagcatccacagccaaagctaggaccatggaccgacacatggtttttctgttccttactttacctcagatgcagtatcttgtcaagcgcagcatcgccgccgcgtcgtaccgccggctctccgcgtccgtgagcaggtcgacgacgcactgcatcatcccggcgccgtgcctctgcagcgctctcacggccgcacagcacgggccgtttctcggcggcggcggcagcggcagactacggccggcgcttgctgttgctgccatggcgacgatgtaggagccacacgcctgcaggatctgcctcttctgcttgtctgtgcatgtctcgccgcagcatccactgctcgcggtgtcgagagacgcgagtgctgtcagtgctagtaggaagaggagagtagctagtaagttcttaggtattaacatctcgatctcggtgctgctagtctagtagtgtgattatctagcaggtggttctggacaaatgcacgggctcctgtatgtattatatattggtaaggcaagtgattgtatctagtctagctgcaag

SEQ ID NO: 60561 - DNA, 2656 bp, Zea Mays
cggggctcctcccttccccttcctcctcgccgcccgcggcgacctcaccgagaaagagaaatctcgctcgcggtcgcggccaaacggcggggtcgccctcgcctctgcctccgataaatacacgcgctcgctccccctcctccctcgagcccagtcgcgtcgagtcgacgctcactctctctctccacgtccttccctctccacatccagctgcgtatccaccaatcgacagcgacctcctcctccacgcgctccgctccccctccctccctttcccttcccttccctctccctccctccctccttagccgttaagcgtcctcccctccgcaccgcgcggcgaggctcgtcggcgccgtcgaggcccagctgcccctccctacaggaagcgcccgtccgacgccgcgagcacgcgcgcctcctccgctcccgatctctccacgcgtgccggagatcggccgcggcgggctcccgatcccgcccgatctacccccgcgctcccggccgagatgtggggcggcgactccaacgccaagcagatgctcaagtcccggggcggcacgggcgtcgtcggggggttacccgcggccggggacgaggagtcggactacttcccgcccaccccgcgcaaggactactggtggtccacgggcctcctcaagctcgtcaccgccaccgtcatcttcatgggcggcgtcgtgctcggcctctccgtcagcggcagcgtcgcgcgctactactacaacgcctcccacgccgagctcttcttcccggccaccacctacggctgcgacccgcgggaccgggactgcggcatgggcctcgccttcagggccttcgtccacccgccccgcctcgcgcactccatgaccgacgacgagctcttctggcgggcctccctcgtgcctagggccgaggagttcccgttccagcgggtgcccaaggtcgccttcctcttcatggcgcgcggccccatccccttcgcgccgctctgggacaagttcttccgcggacaccaggggctctactccgtctacgtccacaccgtgccggactacaagctcaatgtgtccaagagctccgccttctacggcagacagatccccagcgaggaggtgtcctggggatcaattaccttggtggacgctgagaagcgcctgctggccaatgccttgctggatttctcgaatgagcgcttcgtgctgctctcagagagctgcattcccgtgttcaacttcccgacggtctacgagtacctcatcaattcggcgcacagtttcgtcgagtcctacaacatcgacacccctcagtgtgctggccggtacaaccgtcgcatggctccccacatcatggcagatcaatggaggaaagggtcagagtggtttgagcttaaccgcgagctggctgtccagatagtagcggactacaagtactactccatcttcaggaagcactgcaggccatcctgttatccagacgagcattacataccgacttatcttcatctgttccatgggccactcaacgccaacaggactatcacatgggttgattggtcaagaggaggcccgcacccagcaagttatggtgccacagacatcacagaagacttcatccaggccatcaggaataatgcatctcgctactgaggtatatctatggatgcatgtgccggtcgggaactagagcttctataccctgctagattggagtctgcgacatgtgtctcacaatagatgaatgatcagaggtgggttttggtgtatgcgcctctcgcggatgatgacgcagtgtgggacagtgaaaacagccttttcactcgccctgaagatgatctccgcgagtgatcgacagatggcgccgcctacggagatgacgtttctttcacctcccattcttttttaatatatcatagtcatatgatagaggatgtcttctcttcttcttcttcctcctccctatctatctctactgtattgactcggtcagatactaatttctgtgaatataacttatccatcattgctttacttcaaatctggcgctgccagatgcctccatatgcttggtagtctgtctctctaaaccttcaagcaacaggttggcatttgttgttctgtcgatgatgctgatgcacaagtatacgggcaaggcaagctagctagggatgcaggcagcagaatatgccatattcttgcagacagtgcacatcatgtacaattgtggctgtcagtcttttccggcaaggggtaaaaagtaggctcctttcttgaaaggcacacatgagcatgcctataccatgctgttgggtttagattcttgatcagttcaaacatgggggatcctgtgttttattcttgcttttttatcagttgaaacagatagccacgaacatgcttgattgccttcatttgacagatgaaccaatattctaagattggctggtgaacatgggggacatgatttaggctggtggagccttgtcatgccctggtgtttgtaatgtataaaacccacgagcaaaggtccctggaccatggtattatagtgggtgggtccctttgtgctctgtatctaatctagccttagtctaatccaggcattagtttatgtgctgctacctgtttgtttacttccacatatatatggttgcagt

SEQ ID NO: 60562 - DNA, 3429 bp, Zea Mays
aggtaggcgtcgatgagtagtactcagacgccgccggcctcacgctgctgctccaggtcagcgccgtcccgaggctgcagatcaggaggtgcggtgcgtggatcagcgtcgaccccatccccgcgtgtttcgtaatagcaaaaatctccgtccatcagggaggtcggtcttgcagttggagttgggcacattcgcctctatcgggcgggcacattccctccgtcccgtgacttccaccttccttacccttcgtatggtgggggcccacctcgccgcccccaccccccgctgcccttctctcttccccgtctccgactccacacacctcccctttccactcgccgccggcgatcccgaaccgggagcagcgcacatggcaggccgggacgagaggtggggggcgcggggcggcccgggggacacgcacgcgtcgacgagccgcgcacccgcgggcaccgccggggagtcggagggcgcgtcgccggactcgctgcggaacacgccctccaacatcgcgcggctggaggacgcgatcgggcactgcgcggcgcggcgcaaataccttgcgcacaccaagagcccctccgacggcaaggacgtccgctggtacttctgcaatctccccctcgccgacaaagtgctctcttcgtccgtaccgcggacagagatagtggggaaaggagactatttccggttcagcgagagggactctctggcactggaggcgtctttcttggagagggaggaagtgctgcttgcatactggtggcgtgagtatgctgaatgcagtgcaggaccgagaggatccttggttgaaagtgatgattctgcatatctttataaggtggaggaagaacgggttggggttcctgtgaaaggtggactatatgaggttgatttgatgaggcggcattgcttccctgtgtactggaacggtgaaaacaggcgtgtcttgagaggccactggttcgctcgcaaaggtggtgttgattggattcccttgcgagaggatgtttctgaacaacttgagttagcatataattgtcaggtctggcatcgtcgaaaatttcaaccttcaggcctatttgcagcaagggttgacctccaaggaagtacactggatttgcatgctctttttactggagaggatgatacttgggaagcttggcttgtctttgatacgggtcctaagcttggtagtaacacaatcaaattaaggcgcggattttctccttctgaatctgcaagtacaaagccttcacaggatgagttgcgtcagacaaaagaagaggaaatggatgattactgctctcaggttccagttggtcatctggtattcatggttcatggcattggacagaggctggagaaagctaatcttgttgatgatgttgttgatttccgccgagtaactgctaacctagctgaaagatacttaacttcttatcaaagaagtacccagagggttctatttattccctgtcagtggaggaagggcttgaaactcagtggtgaaagtacggttgagaaactcactttggatggagttaaaggtcttcgagtcgcattaggtgccacagttcatgatgtcctatattatatgagtcctatctactgtcagcatattattgactcggtctctaaccagttgaacaagctgtacatgaaatttctgaagagaaatcctggttacagtggaaaggtttcattgtatggccactcattaggaagtgttctgtcgtatgatatactttgtcatcaagaatcccttttggccccatttccaacagagtatctgaacatggaaacatctgatcgaagtcaaggagcaaagtcagccaatgaagttgctctgcatgattcagttgttgctgagcaaaatgaaaaagaaaataggattgagaatcatcagacggtgtatactgaggaaggaacaacttcaggtgtaagcacaaaagatgctgaagcatcacacatttcaagatctgctgaggatgtccatgaagaggtccttgacaaagaaaaaatgatcatttcactagaagaagaggtgaaacgtcttaaagctaaactagatcagcttgaacagcataagcatctagtgactgagagcaccagtggtgttgagtatcatggaggcaaaaatggcaatcatgccttgaactttggcgaacttttcactgcacaaggaagtataaaccagccctactcaccacaaatcaaatacacaaaactaaactttaaggttgacacattctttgctgttggatctcccctgggtgtcttcctttccctgcgtaatgtccgtattggtattggcaaagggcgagattattggaaagataagaacataattgaagagatgccatgctgccggcagatgttcaatatttttcatccttttgatcctgtagcatacagagttgaaccacttgtatgtgaagattatcaaaagaagcgtcctgtaattgttccctaccatagaggcggaaagaggatacatgttggagtgcaggagttcacagaagatatttctgcacgttctcaagccattgcctgtcaattgaagtcactgaaggtcaaagcagtagctgctttgctagcattgagcagaaatgacacagaagaggatggtgagagtgctaatgaggaaggaagatcgtatggttccattatgatggaaaggttgaccggctcaccagatggtcgaattgatcatgtgcttcaggagaaaacatttcagcattcatacctatctgctctgggagctcataccaactattggcgagatcatgacactgctctcttcattctcaaacatttgtatcgtgatatacctgaggatcctccaagcgatgtcgttgaaaggatgcatattaaactgttttatgagagagatccggttgaggaagaaacgcccgtgacattttcggaccatgcagcaattaaggagttctgcagaaaggtgagagcctactcaacaaaaatggaggatgatgccaactgctaagcctcttgatggtgtcatttcctgatggaaaccatgttacatccccacgttcctcgccaagaaggaagatgcaggcatgggaagggagaacgattccacaaaatcgtgatcccaggataagaatcctaagaaatgtagttccacgcttgacaccagaatcaggacacttgagaaacgttgtacagagtcggttccccatgttgcttcacttgttcccgtcgtcaatgcagtgctgtacagagaacgtcctgctgtacctttctgtatatgtaatcttgcgtgctgtgcatacagaatatgatggatttagtttcaaacgacagcttacagcgacaccaggctgaaacgaagggactcgtgagagaaaatccataataatttagagacattaataacacagaacacctagctttcaaatg

SEQ ID NO: 60563 - DNA, 3531 bp, Zea Mays
aggtaggcgtcgatgagtagtactcagacgccgccggcctcacgctgctgctccaggtcagcgccgtcccgaggctgcagatcaggaggtgcggtgcgtggatcagcgtcgaccccatccccgcgtgtttcgtaatagcaaaaatctccgtccatcagggaggtcggtcttgcagttggagttgggcacattcgcctctatcgggcgggcacattccctccgtcccgtgacttccaccttccttacccttcgtatggtgggggcccacctcgccgcccccaccccccgctgcccttctctcttccccgtctccgactccacacacctcccctttccactcgccgccggcgatcccgaaccgggagcagcgcacatggcaggccgggacgagaggtggggggcgcggggcggcccgggggacacgcacgcgtcgacgagccgcgcacccgcgggcaccgccggggagtcggagggcgcgtcgccggactcgctgcggaacacgccctccaacatcgcgcggctggaggacgcgatcgggcactgcgcggcgcggcgcaaataccttgcgcacaccaagagcccctccgacggcaaggacgtccgctggtacttctgcaatctccccctcgccgacaaagtgctctcttcgtccgtaccgcggacagagatagtggggaaaggagactatttccggttcagcgagagggactctctggcactggaggcgtctttcttggagagggaggaagtgctgcttgcatactggtggcgtgagtatgctgaatgcagtgcaggaccgagaggatccttggttgaaagtgatgattctgcatatctttataaggtggaggaagaacgggttggggttcctgtgaaaggtggactatatgaggttgatttgatgaggcggcattgcttccctgtgtactggaacggtgaaaacaggcgtgtcttgagaggccactggttcgctcgcaaaggtggtgttgattggattcccttgcgagaggatgtttctgaacaacttgagttagcatataattgtcaggtctggcatcgtcgaaaatttcaaccttcaggcctatttgcagcaagggttgacctccaaggaagtacactggatttgcatgctctttttactggagaggatgatacttgggaagcttggcttgtctttgatacgggtcctaagcttggtagtaacacaatcaaattaaggcgcggattttctccttctgaatctgcaagtacaaagccttcacaggatgagttgcgtcagacaaaagaagaggaaatggatgattactgctctcaggttccagttggtcatctggtattcatggttcatggcattggacagaggctggagaaagctaatcttgttgatgatgttgttgatttccgccgagtaactgctaacctagctgaaagatacttaacttcttatcaaagaagtacccagagggttctatttattccctgtcagtggaggaagggcttgaaactcagtggtgaaagtacggttgagaaactcactttggatggagttaaaggtcttcgagtcgcattaggtgccacagttcatgatgtcctatattatatgagtcctatctactgtcagcatattattgactcggtctctaaccagttgaacaagctgtacatgaaatttctgaagagaaatcctggttacagtggaaaggtttcattgtatggccactcattaggaagtgttctgtcgtatgatatactttgtcatcaagaatcccttttggccccatttccaacagagtatctgaacatggaaacatctgatcgaagtcaaggagcaaagtcagccaatgaagttgctctgcatgattcaggtagcaccagaactgacatgtcacatatggacagcattgtcccatcatgtgtgctcgaggattcattaaataacccagaaactggtgtgccacgtggggcagttgttgctgagcaaaatgaaaaagaaaataggattgagaatcatcagacggtgtatactgaggaaggaacaacttcaggtgtaagcacaaaagatgctgaagcatcacacatttcaagatctgctgaggatgtccatgaagaggtccttgacaaagaaaaaatgatcatttcactagaagaagaggtgaaacgtcttaaagctaaactagatcagcttgaacagcataagcatctagtgactgagagcaccagtggtgttgagtatcatggaggcaaaaatggcaatcatgccttgaactttggcgaacttttcactgcacaaggaagtataaaccagccctactcaccacaaatcaaatacacaaaactaaactttaaggttgacacattctttgctgttggatctcccctgggtgtcttcctttccctgcgtaatgtccgtattggtattggcaaagggcgagattattggaaagataagaacataattgaagagatgccatgctgccggcagatgttcaatatttttcatccttttgatcctgtagcatacagagttgaaccacttgtatgtgaagattatcaaaagaagcgtcctgtaattgttccctaccatagaggcggaaagaggatacatgttggagtgcaggagttcacagaagatatttctgcacgttctcaagccattgcctgtcaattgaagtcactgaaggtcaaagcagtagctgctttgctagcattgagcagaaatgacacagaagaggatggtgagagtgctaatgaggaaggaagatcgtatggttccattatgatggaaaggttgaccggctcaccagatggtcgaattgatcatgtgcttcaggagaaaacatttcagcattcatacctatctgctctgggagctcataccaactattggcgagatcatgacactgctctcttcattctcaaacatttgtatcgtgatatacctgaggatcctccaagcgatgtcgttgaaaggatgcatattaaactgttttatgagagagatccggttgaggaagaaacgcccgtgacattttcggaccatgcagcaattaaggagttctgcagaaaggtgagagcctactcaacaaaaatggaggatgatgccaactgctaagcctcttgatggtgtcatttcctgatggaaaccatgttacatccccacgttcctcgccaagaaggaagatgcaggcatgggaagggagaacgattccacaaaatcgtgatcccaggataagaatcctaagaaatgtagttccacgcttgacaccagaatcaggacacttgagaaacgttgtacagagtcggttccccatgttgcttcacttgttcccgtcgtcaatgcagtgctgtacagagaacgtcctgctgtacctttctgtatatgtaatcttgcgtgctgtgcatacagaatatgatggatttagtttcaaacgacagcttacagcgacaccaggctgaaacgaagggactcgtgagagaaaatccataataatttagagacattaataacacagaacacctagctttcaaatg

SEQ ID NO: 60564 - DNA, 3619 bp, Zea Mays
aggtaggcgtcgatgagtagtactcagacgccgccggcctcacgctgctgctccaggtcagcgccgtcccgaggctgcagatcaggaggtgcggtgcgtggatcagcgtcgaccccatccccgcgtgtttcgtaatagcaaaaatctccgtccatcagggaggtcggtcttgcagttggagttgggcacattcgcctctatcgggcgggcacattccctccgtcccgtgacttccaccttccttacccttcgtatggtgggggcccacctcgccgcccccaccccccgctgcccttctctcttccccgtctccgactccacacacctcccctttccactcgccgccggcgatcccgaaccgggagcagcgcacatggcaggccgggacgagaggtggggggcgcggggcggcccgggggacacgcacgcgtcgacgagccgcgcacccgcgggcaccgccggggagtcggagggcgcgtcgccggactcgctgcggaacacgccctccaacatcgcgcggctggaggacgcgatcgggcactgcgcggcgcggcgcaaataccttgcgcacaccaagagcccctccgacggcaaggacgtccgctggtacttctgcaatctccccctcgccgacaaagtgctctcttcgtccgtaccgcggacagagatagtggggaaaggagactatttccggttcagcgagagggactctctggcactggaggcgtctttcttggagagggaggaagtgctgcttgcatactggtggcgtgagtatgctgaatgcagtgcaggaccgagaggatccttggttgaaagtgatgattctgcatatctttataaggtggaggaagaacgggttggggttcctgtgaaaggtggactatatgaggttgatttgatgaggcggcattgcttccctgtgtactggaacggtgaaaacaggcgtgtcttgagaggccactggttcgctcgcaaaggtggtgttgattggattcccttgcgagaggatgtttctgaacaacttgagttagcatataattgtcaggtctggcatcgtcgaaaatttcaaccttcaggcctatttgcagcaagggttgacctccaaggaagtacactggatttgcatgctctttttactggagaggatgatacttgggaagcttggcttgtctttgatacgggtcctaagcttggtagtaacacaatcaaattaaggcgcggattttctccttctgaatctgcaagtacaaagccttcacaggatgagttgcgtcagacaaaagaagaggaaatggatgattactgctctcaggttccagttggtcatctggtattcatggttcatggcattggacagaggctggagaaagctaatcttgttgatgatgttgttgatttccgccgagtaactgctaacctagctgaaagatacttaacttcttatcaaagaagtacccagagggttctatttattccctgtcagtggaggaagggcttgaaactcagtggtgaaagtacggttgagaaactcactttggatggagttaaaggtcttcgagtcgcattaggtgccacagttcatgatgtcctatattatatgagtcctatctactgtcagcatattattgactcggtctctaaccagttgaacaagctgtacatgaaatttctgaagagaaatcctggttacagtggaaaggtttcattgtatggccactcattaggaagtgttctgtcgtatgatatactttgtcatcaagaatcccttttggccccatttccaacagagtatctgaacatggaaacatctgatcgaagtcaaggagcaaagtcagccaatgaagttgctctgcatgattcaggtgcaaaggatcatgatacttatactctagggcattcttgtactggtaatgaaaacagtgccgttgatgaaggtagcaccagaactgacatgtcacatatggacagcattgtcccatcatgtgtgctcgaggattcattaaataacccagaaactggtgtgccacgtggggcagttgttgctgagcaaaatgaaaaagaaaataggattgagaatcatcagacggtgtatactgaggaaggaacaacttcaggtgtaagcacaaaagatgctgaagcatcacacatttcaagatctgctgaggatgtccatgaagaggtccttgacaaagaaaaaatgatcatttcactagaagaagaggtgaaacgtcttaaagctaaactagatcagcttgaacagcataagcatctagtgactgagagcaccagtggtgttgagtatcatggaggcaaaaatggcaatcatgccttgaactttggcgaacttttcactgcacaaggaagtataaaccagccctactcaccacaaatcaaatacacaaaactaaactttaaggttgacacattctttgctgttggatctcccctgggtgtcttcctttccctgcgtaatgtccgtattggtattggcaaagggcgagattattggaaagataagaacataattgaagagatgccatgctgccggcagatgttcaatatttttcatccttttgatcctgtagcatacaggtgggcttttatacagagttgaaccacttgtatgtgaagattatcaaaagaagcgtcctgtaattgttccctaccatagaggcggaaagaggatacatgttggagtgcaggagttcacagaagatatttctgcacgttctcaagccattgcctgtcaattgaagtcactgaaggtcaaagcagtagctgctttgctagcattgagcagaaatgacacagaagaggatggtgagagtgctaatgaggaaggaagatcgtatggttccattatgatggaaaggttgaccggctcaccagatggtcgaattgatcatgtgcttcaggagaaaacatttcagcattcatacctatctgctctgggagctcataccaactattggcgagatcatgacactgctctcttcattctcaaacatttgtatcgtgatatacctgaggatcctccaagcgatgtcgttgaaaggatgcatattaaactgttttatgagagagatccggttgaggaagaaacgcccgtgacattttcggaccatgcagcaattaaggagttctgcagaaaggtgagagcctactcaacaaaaatggaggatgatgccaactgctaagcctcttgatggtgtcatttcctgatggaaaccatgttacatccccacgttcctcgccaagaaggaagatgcaggcatgggaagggagaacgattccacaaaatcgtgatcccaggataagaatcctaagaaatgtagttccacgcttgacaccagaatcaggacacttgagaaacgttgtacagagtcggttccccatgttgcttcacttgttcccgtcgtcaatgcagtgctgtacagagaacgtcctgctgtacctttctgtatatgtaatcttgcgtgctgtgcatacagaatatgatggatttagtttcaaacgacagcttacagcgacaccaggctgaaacgaagggactcgtgagagaaaatccataataatttagagacattaataacacagaacacctagctttcaaatg

SEQ ID NO: 60565 - DNA, 3518 bp, Zea Mays
aggtaggcgtcgatgagtagtactcagacgccgccggcctcacgctgctgctccaggtcagcgccgtcccgaggctgcagatcaggaggtgcggtgcgtggatcagcgtcgaccccatccccgcgtgtttcgtaatagcaaaaatctccgtccatcagggaggtcggtcttgcagttggagttgggcacattcgcctctatcgggcgggcacattccctccgtcccgtgacttccaccttccttacccttcgtatggtgggggcccacctcgccgcccccaccccccgctgcccttctctcttccccgtctccgactccacacacctcccctttccactcgccgccggcgatcccgaaccgggagcagcgcacatggcaggccgggacgagaggtggggggcgcggggcggcccgggggacacgcacgcgtcgacgagccgcgcacccgcgggcaccgccggggagtcggagggcgcgtcgccggactcgctgcggaacacgccctccaacatcgcgcggctggaggacgcgatcgggcactgcgcggcgcggcgcaaataccttgcgcacaccaagagcccctccgacggcaaggacgtccgctggtacttctgcaatctccccctcgccgacaaagagggaggaagtgctgcttgcatactggtggcgtgagtatgctgaatgcagtgcaggaccgagaggatccttggttgaaagtgatgattctgcatatctttataaggtggaggaagaacgggttggggttcctgtgaaaggtggactatatgaggttgatttgatgaggcggcattgcttccctgtgtactggaacggtgaaaacaggcgtgtcttgagaggccactggttcgctcgcaaaggtggtgttgattggattcccttgcgagaggatgtttctgaacaacttgagttagcatataattgtcaggtctggcatcgtcgaaaatttcaaccttcaggcctatttgcagcaagggttgacctccaaggaagtacactggatttgcatgctctttttactggagaggatgatacttgggaagcttggcttgtctttgatacgggtcctaagcttggtagtaacacaatcaaattaaggcgcggattttctccttctgaatctgcaagtacaaagccttcacaggatgagttgcgtcagacaaaagaagaggaaatggatgattactgctctcaggttccagttggtcatctggtattcatggttcatggcattggacagaggctggagaaagctaatcttgttgatgatgttgttgatttccgccgagtaactgctaacctagctgaaagatacttaacttcttatcaaagaagtacccagagggttctatttattccctgtcagtggaggaagggcttgaaactcagtggtgaaagtacggttgagaaactcactttggatggagttaaaggtcttcgagtcgcattaggtgccacagttcatgatgtcctatattatatgagtcctatctactgtcagcatattattgactcggtctctaaccagttgaacaagctgtacatgaaatttctgaagagaaatcctggttacagtggaaaggtttcattgtatggccactcattaggaagtgttctgtcgtatgatatactttgtcatcaagaatcccttttggccccatttccaacagagtatctgaacatggaaacatctgatcgaagtcaaggagcaaagtcagccaatgaagttgctctgcatgattcaggtgcaaaggatcatgatacttatactctagggcattcttgtactggtaatgaaaacagtgccgttgatgaaggtagcaccagaactgacatgtcacatatggacagcattgtcccatcatgtgtgctcgaggattcattaaataacccagaaactggtgtgccacgtggggcagttgttgctgagcaaaatgaaaaagaaaataggattgagaatcatcagacggtgtatactgaggaaggaacaacttcaggtgtaagcacaaaagatgctgaagcatcacacatttcaagatctgctgaggatgtccatgaagaggtccttgacaaagaaaaaatgatcatttcactagaagaagaggtgaaacgtcttaaagctaaactagatcagcttgaacagcataagcatctagtgactgagagcaccagtggtgttgagtatcatggaggcaaaaatggcaatcatgccttgaactttggcgaacttttcactgcacaaggaagtataaaccagccctactcaccacaaatcaaatacacaaaactaaactttaaggttgacacattctttgctgttggatctcccctgggtgtcttcctttccctgcgtaatgtccgtattggtattggcaaagggcgagattattggaaagataagaacataattgaagagatgccatgctgccggcagatgttcaatatttttcatccttttgatcctgtagcatacaggtgggcttttatacagagttgaaccacttgtatgtgaagattatcaaaagaagcgtcctgtaattgttccctaccatagaggcggaaagaggatacatgttggagtgcaggagttcacagaagatatttctgcacgttctcaagccattgcctgtcaattgaagtcactgaaggtcaaagcagtagctgctttgctagcattgagcagaaatgacacagaagaggatggtgagagtgctaatgaggaaggaagatcgtatggttccattatgatggaaaggttgaccggctcaccagatggtcgaattgatcatgtgcttcaggagaaaacatttcagcattcatacctatctgctctgggagctcataccaactattggcgagatcatgacactgctctcttcattctcaaacatttgtatcgtgatatacctgaggatcctccaagcgatgtcgttgaaaggatgcatattaaactgttttatgagagagatccggttgaggaagaaacgcccgtgacattttcggaccatgcagcaattaaggagttctgcagaaaggtgagagcctactcaacaaaaatggaggatgatgccaactgctaagcctcttgatggtgtcatttcctgatggaaaccatgttacatccccacgttcctcgccaagaaggaagatgcaggcatgggaagggagaacgattccacaaaatcgtgatcccaggataagaatcctaagaaatgtagttccacgcttgacaccagaatcaggacacttgagaaacgttgtacagagtcggttccccatgttgcttcacttgttcccgtcgtcaatgcagtgctgtacagagaacgtcctgctgtacctttctgtatatgtaatcttgcgtgctgtgcatacagaatatgatggatttagtttcaaacgacagcttacagcgacaccaggctgaaacgaagggactcgtgagagaaaatccataataatttagagacattaataacacagaacacctagctttcaaatg

SEQ ID NO: 60566 - DNA, 3408 bp, Zea Mays
aggtaggcgtcgatgagtagtactcagacgccgccggcctcacgctgctgctccaggtcagcgccgtcccgaggctgcagatcaggaggtgcggtgcgtggatcagcgtcgaccccatccccgcgtgtttcgtaatagcaaaaatctccgtccatcagggaggtcggtcttgcagttggagttgggcacattcgcctctatcgggcgggcacattccctccgtcccgtgacttccaccttccttacccttcgtatggtgggggcccacctcgccgcccccaccccccgctgcccttctctcttccccgtctccgactccacacacctcccctttccactcgccgccggcgatcccgaaccgggagcagcgcacatggcaggccgggacgagaggtggggggcgcggggcggcccgggggacacgcacgcgtcgacgagccgcgcacccgcgggcaccgccggggagtcggagggcgcgtcgccggactcgctgcggaacacgccctccaacatcgcgcggctggaggacgcgatcgggcactgcgcggcgcggcgcaaataccttgcgcacaccaagagcccctccgacggcaaggacgtccgctggtacttctgcaatctccccctcgccgacaaagtgctctcttcgtccgtaccgcggacagagatagtggggaaaggagactatttccggttcagcgagagggactctctggcactggaggcgtctttcttggagagggaggaagtgctgcttgcatactggtggcgtgagtatgctgaatgcagtgcaggaccgagaggatccttggttgaaagtgatgattctgcatatctttataaggtggaggaagaacgggttggggttcctgtgaaaggtggactatatgaggttgatttgatgaggcggcattgcttccctgtgtactggaacggtgaaaacaggcgtgtcttgagaggccactggttcgctcgcaaaggtggtgttgattggattcccttgcgagaggatgtttctgaacaacttgagttagcatataattgtcaggtctggcatcgtcgaaaatttcaaccttcaggcctatttgcagcaagggttgacctccaaggaagtacactggatttgcatgctctttttactggagaggatgatacttgggaagcttggcttgtctttgatacgggtcctaagcttggtagtaacacaatcaaattaaggcgcggattttctccttctgaatctgcaagtacaaagccttcacaggatgagttgcgtcagacaaaagaagaggaaatggatgattactgctctcaggttccagttggtcatctggtattcatggttcatggcattggacagaggctggagaaagctaatcttgttgatgatgttgttgatttccgccgagtaactgctaacctagctgaaagatacttaacttcttatcaaagaagtacccagagggttctatttattccctgtcagtggaggaagggcttgaaactcagtggtgaaagtacggttgagaaactcactttggatggagttaaaggtcttcgagtcgcattaggtgccacagttcatgatgtcctatattatatgagtcctatctactgtcagcatattattgactcggtctctaaccagttgaacaagctgtacatgaaatttctgaagagaaatcctggttacagtggaaaggtttcattgtatggccactcattaggaagtgttctgtcgtatgatatactttgtcatcaagaatcccttttggccccatttccaacagagtatctgaacatggaaacatctgatcgaagtcaaggagcaaagtcagccaatgaagttgctctgcatgattcaggtgcaaaggatcatgatacttatactctagggcattcttgtactggtaatgaaaacagtgccgttgatgaaggtagcaccagaactgacatgtcacatatggacagcattgtcccatcatgtgtgctcgaggattcattaaataacccagaaactggtgtgccacgtggggcagttgttgctgagcaaaatgaaaaagaaaataggattgagaatcatcagacggtgtatactgaggaaggaacaacttcaggtgtaagcacaaaagatgctgaagcatcacacatttcaagatctgctgaggatgtccatgaagaggtccttgacaaagaaaaaatgatcatttcactagaagaagaggttgacacattctttgctgttggatctcccctgggtgtcttcctttccctgcgtaatgtccgtattggtattggcaaagggcgagattattggaaagataagaacataattgaagagatgccatgctgccggcagatgttcaatatttttcatccttttgatcctgtagcatacagagttgaaccacttgtatgtgaagattatcaaaagaagcgtcctgtaattgttccctaccatagaggcggaaagaggatacatgttggagtgcaggagttcacagaagatatttctgcacgttctcaagccattgcctgtcaattgaagtcactgaaggtcaaagcagtagctgctttgctagcattgagcagaaatgacacagaagaggatggtgagagtgctaatgaggaaggaagatcgtatggttccattatgatggaaaggttgaccggctcaccagatggtcgaattgatcatgtgcttcaggagaaaacatttcagcattcatacctatctgctctgggagctcataccaactattggcgagatcatgacactgctctcttcattctcaaacatttgtatcgtgatatacctgaggatcctccaagcgatgtcgttgaaaggatgcatattaaactgttttatgagagagatccggttgaggaagaaacgcccgtgacattttcggaccatgcagcaattaaggagttctgcagaaaggtgagagcctactcaacaaaaatggaggatgatgccaactgctaagcctcttgatggtgtcatttcctgatggaaaccatgttacatccccacgttcctcgccaagaaggaagatgcaggcatgggaagggagaacgattccacaaaatcgtgatcccaggataagaatcctaagaaatgtagttccacgcttgacaccagaatcaggacacttgagaaacgttgtacagagtcggttccccatgttgcttcacttgttcccgtcgtcaatgcagtgctgtacagagaacgtcctgctgtacctttctgtatatgtaatcttgcgtgctgtgcatacagaatatgatggatttagtttcaaacgacagcttacagcgacaccaggctgaaacgaagggactcgtgagagaaaatccataataatttagagacattaataacacagaacacctagctttcaaatg

SEQ ID NO: 60567 - DNA, 3601 bp, Zea Mays
aggtaggcgtcgatgagtagtactcagacgccgccggcctcacgctgctgctccaggtcagcgccgtcccgaggctgcagatcaggaggtgcggtgcgtggatcagcgtcgaccccatccccgcgtgtttcgtaatagcaaaaatctccgtccatcagggaggtcggtcttgcagttggagttgggcacattcgcctctatcgggcgggcacattccctccgtcccgtgacttccaccttccttacccttcgtatggtgggggcccacctcgccgcccccaccccccgctgcccttctctcttccccgtctccgactccacacacctcccctttccactcgccgccggcgatcccgaaccgggagcagcgcacatggcaggccgggacgagaggtggggggcgcggggcggcccgggggacacgcacgcgtcgacgagccgcgcacccgcgggcaccgccggggagtcggagggcgcgtcgccggactcgctgcggaacacgccctccaacatcgcgcggctggaggacgcgatcgggcactgcgcggcgcggcgcaaataccttgcgcacaccaagagcccctccgacggcaaggacgtccgctggtacttctgcaatctccccctcgccgacaaagtgctctcttcgtccgtaccgcggacagagatagtggggaaaggagactatttccggttcagcgagagggactctctggcactggaggcgtctttcttggagagggaggaagtgctgcttgcatactggtggcgtgagtatgctgaatgcagtgcaggaccgagaggatccttggttgaaagtgatgattctgcatatctttataaggtggaggaagaacgggttggggttcctgtgaaaggtggactatatgaggttgatttgatgaggcggcattgcttccctgtgtactggaacggtgaaaacaggcgtgtcttgagaggccactggttcgctcgcaaaggtggtgttgattggattcccttgcgagaggatgtttctgaacaacttgagttagcatataattgtcaggtctggcatcgtcgaaaatttcaaccttcaggcctatttgcagcaagggttgacctccaaggaagtacactggatttgcatgctctttttactggagaggatgatacttgggaagcttggcttgtctttgatacgggtcctaagcttggtagtaacacaatcaaattaaggcgcggattttctccttctgaatctgcaagtacaaagccttcacaggatgagttgcgtcagacaaaagaagaggaaatggatgattactgctctcaggttccagttggtcatctggtattcatggttcatggcattggacagaggctggagaaagctaatcttgttgatgatgttgttgatttccgccgagtaactgctaacctagctgaaagatacttaacttcttatcaaagaagtacccagagggttctatttattccctgtcagtggaggaagggcttgaaactcagtggtgaaagtacggttgagaaactcactttggatggagttaaaggtcttcgagtcgcattaggtgccacagttcatgatgtcctatattatatgagtcctatctactgtcagcatattattgactcggtctctaaccagttgaacaagctgtacatgaaatttctgaagagaaatcctggttacagtggaaaggtttcattgtatggccactcattaggaagtgttctgtcgtatgatatactttgtcatcaagaatcccttttggccccatttccaacagagtatctgaacatggaaacatctgatcgaagtcaaggagcaaagtcagccaatgaagttgctctgcatgattcaggtgcaaaggatcatgatacttatactctagggcattcttgtactggtaatgaaaacagtgccgttgatgaaggtagcaccagaactgacatgtcacatatggacagcattgtcccatcatgtgtgctcgaggattcattaaataacccagaaactggtgtgccacgtggggcagttgttgctgagcaaaatgaaaaagaaaataggattgagaatcatcagacggtgtatactgaggaaggaacaacttcaggtgtaagcacaaaagatgctgaagcatcacacatttcaagatctgctgaggatgtccatgaagaggtccttgacaaagaaaaaatgatcatttcactagaagaagaggtgaaacgtcttaaagctaaactagatcagcttgaacagcataagcatctagtgactgagagcaccagtggtgttgagtatcatggaggcaaaaatggcaatcatgccttgaactttggcgaacttttcactgcacaaggaagtataaaccagccctactcaccacaaatcaaatacacaaaactaaactttaaggttgacacattctttgctgttggatctcccctgggtgtcttcctttccctgcgtaatgtccgtattggtattggcaaagggcgagattattggaaagataagaacataattgaagagatgccatgctgccggcagatgttcaatatttttcatccttttgatcctgtagcatacagagttgaaccacttgtatgtgaagattatcaaaagaagcgtcctgtaattgttccctaccatagaggcggaaagaggatacatgttggagtgcaggagttcacagaagatatttctgcacgttctcaagccattgcctgtcaattgaagtcactgaaggtcaaagcagtagctgctttgctagcattgagcagaaatgacacagaaggatggtgagagtgctaatgaggaaggaagatcgtatggttccattatgatggaaaggttgaccggctcaccagatggtcgaattgatcatgtgcttcaggagaaaacatttcagcattcatacctatctgctctgggagctcataccaactattggcgagatcatgacactgctctcttcattctcaaacatttgtatcgtgatatacctgaggatcctccaagcgatgtcgttgaaaggatgcatattaaactgttttatgagagagatccggttgaggaagaaacgcccgtgacattttcggaccatgcagcaattaaggagttctgcagaaaggtgagagcctactcaacaaaaatggaggatgatgccaactgctaagcctcttgatggtgtcatttcctgatggaaaccatgttacatccccacgttcctcgccaagaaggaagatgcaggcatgggaagggagaacgattccacaaaatcgtgatcccaggataagaatcctaagaaatgtagttccacgcttgacaccagaatcaggacacttgagaaacgttgtacagagtcggttccccatgttgcttcacttgttcccgtcgtcaatgcagtgctgtacagagaacgtcctgctgtacctttctgtatatgtaatcttgcgtgctgtgcatacagaatatgatggatttagtttcaaacgacagcttacagcgacaccaggctgaaacgaagggactcgtgagagaaaatccataataatttagagacattaataacacagaacacctagctttcaaatg

SEQ ID NO: 60568 - DNA, 3396 bp, Zea Mays
aggtaggcgtcgatgagtagtactcagacgccgccggcctcacgctgctgctccaggtcagcgccgtcccgaggctgcagatcaggaggtgcggtgcgtggatcagcgtcgaccccatccccgcgtgtttcgtaatagcaaaaatctccgtccatcagggaggtcggtcttgcagttggagttgggcacattcgcctctatcgggcgggcacattccctccgtcccgtgacttccaccttccttacccttcgtatggtgggggcccacctcgccgcccccaccccccgctgcccttctctcttccccgtctccgactccacacacctcccctttccactcgccgccggcgatcccgaaccgggagcagcgcacatggcaggccgggacgagaggtggggggcgcggggcggcccgggggacacgcacgcgtcgacgagccgcgcacccgcgggcaccgccggggagtcggagggcgcgtcgccggactcgctgcggaacacgccctccaacatcgcgcggctggaggacgcgatcgggcactgcgcggcgcggcgcaaataccttgcgcacaccaagagcccctccgacggcaaggacgtccgctggtacttctgcaatctccccctcgccgacaaagagggaggaagtgctgcttgcatactggtggcgtgagtatgctgaatgcagtgcaggaccgagaggatccttggttgaaagtgatgattctgcatatctttataaggtggaggaagaacgggttggggttcctgtgaaaggtggactatatgaggttgatttgatgaggcggcattgcttccctgtgtactggaacggtgaaaacaggcgtgtcttgagaggccactggttcgctcgcaaaggtggtgttgattggattcccttgcgagaggatgtttctgaacaacttgagttagcatataattgtcaggtctggcatcgtcgaaaatttcaaccttcaggcctatttgcagcaagggttgacctccaaggaagtacactggatttgcatgctctttttactggagaggatgatacttgggaagcttggcttgtctttgatacgggtcctaagcttggtagtaacacaatcaaattaaggcgcggattttctccttctgaatctgcaagtacaaagccttcacaggatgagttgcgtcagacaaaagaagaggaaatggatgattactgctctcaggttccagttggtcatctggtattcatggttcatggcattggacagaggctggagaaagctaatcttgttgatgatgttgttgatttccgccgagtaactgctaacctagctgaaagatacttaacttcttatcaaagaagtacccagagggttctatttattccctgtcagtggaggaagggcttgaaactcagtggtgaaagtacggttgagaaactcactttggatggagttaaaggtcttcgagtcgcattaggtgccacagttcatgatgtcctatattatatgagtcctatctactgtcagcatattattgactcggtctctaaccagttgaacaagctgtacatgaaatttctgaagagaaatcctggttacagtggaaaggtttcattgtatggccactcattaggaagtgttctgtcgtatgatatactttgtcatcaagaatcccttttggccccatttccaacagagtatctgaacatggaaacatctgatcgaagtcaaggagcaaagtcagccaatgaagttgctctgcatgattcagcattgtcccatcatgtgtgctcgaggattcattaaataacccagaaactggtgtgccacgtggggcagttgttgctgagcaaaatgaaaaagaaaataggattgagaatcatcagacggtgtatactgaggaaggaacaacttcaggtgtaagcacaaaagatgctgaagcatcacacatttcaagatctgctgaggatgtccatgaagaggtccttgacaaagaaaaaatgatcatttcactagaagaagaggtgaaacgtcttaaagctaaactagatcagcttgaacagcataagcatctagtgactgagagcaccagtggtgttgagtatcatggaggcaaaaatggcaatcatgccttgaactttggcgaacttttcactgcacaaggaagtataaaccagccctactcaccacaaatcaaatacacaaaactaaactttaaggttgacacattctttgctgttggatctcccctgggtgtcttcctttccctgcgtaatgtccgtattggtattggcaaagggcgagattattggaaagataagaacataattgaagagatgccatgctgccggcagatgttcaatatttttcatccttttgatcctgtagcatacagagttgaaccacttgtatgtgaagattatcaaaagaagcgtcctgtaattgttccctaccatagaggcggaaagaggatacatgttggagtgcaggagttcacagaagatatttctgcacgttctcaagccattgcctgtcaattgaagtcactgaaggtcaaagcagtagctgctttgctagcattgagcagaaatgacacagaagaggatggtgagagtgctaatgaggaaggaagatcgtatggttccattatgatggaaaggttgaccggctcaccagatggtcgaattgatcatgtgcttcaggagaaaacatttcagcattcatacctatctgctctgggagctcataccaactattggcgagatcatgacactgctctcttcattctcaaacatttgtatcgtgatatacctgaggatcctccaagcgatgtcgttgaaaggatgcatattaaactgttttatgagagagatccggttgaggaagaaacgcccgtgacattttcggaccatgcagcaattaaggagttctgcagaaaggtgagagcctactcaacaaaaatggaggatgatgccaactgctaagcctcttgatggtgtcatttcctgatggaaaccatgttacatccccacgttcctcgccaagaaggaagatgcaggcatgggaagggagaacgattccacaaaatcgtgatcccaggataagaatcctaagaaatgtagttccacgcttgacaccagaatcaggacacttgagaaacgttgtacagagtcggttccccatgttgcttcacttgttcccgtcgtcaatgcagtgctgtacagagaacgtcctgctgtacctttctgtatatgtaatcttgcgtgctgtgcatacagaatatgatggatttagtttcaaacgacagcttacagcgacaccaggctgaaacgaagggactcgtgagagaaaatccataataatttagagacattaataacacagaacacctagctttcaaatg
